United States Patent Application Publication US 2026/0265762 A1 - sequence listing, part 4

SEQ ID NO: 3217 - protein, 2021 aa, synthetic construct
MPAAKRVKLDGGDKKYSIGLDIGTNSVGWAVITDEYKVPSKKFKVLGNTDRHSIKKNLIGALLFDSGETAEATRLKRTARRRYTRRKNRICYLQEIFSNEMAKVDDSFFHRLEESFLVEEDKKHERHPIFGNIVDEVAYHEKYPTIYHLRKKLVDSTDKADLRLIYLALAHMIKFRGHFLIEGDLNPDNSDVDKLFIQLVQTYNQLFEENPINASGVDAKAILSARLSKSRRLENLIAQLPGEKKNGLFGNLIALSLGLTPNFKSNFDLAEDAKLQLSKDTYDDDLDNLLAQIGDQYADLFLAAKNLSDAILLSDILRVNTEITKAPLSASMIKRYDEHHQDLTLLKALVRQQLPEKYKEIFFDQSKNGYAGYIDGGASQEEFYKFIKPILEKMDGTEELLVKLNREDLLRKQRTFDNGSIPHQIHLGELHAILRRQEDFYPFLKDNREKIEKILTFRIPYYVGPLARGNSRFAWMTRKSEETITPWNFEEVVDKGASAQSFIERMTNFDKNLPNEKVLPKHSLLYEYFTVYNELTKVKYVTEGMRKPAFLSGEQKKAIVDLLFKTNRKVTVKQLKEDYFKKIECFDSVEISGVEDRFNASLGTYHDLLKIIKDKDFLDNEENEDILEDIVLTLTLFEDREMIEERLKTYAHLFDDKVMKQLKRRRYTGWGRLSRKLINGIRDKQSGKTILDFLKSDGFANRNFMQLIHDDSLTFKEDIQKAQVSGQGDSLHEHIANLAGSPAIKKGILQTVKVVDELVKVMGRHKPENIVIEMARENQTTQKGQKNSRERMKRIEEGIKELGSQILKEHPVENTQLQNEKLYLYYLQNGRDMYVDQELDINRLSDYDVDHIVPQSFLKDDSIDNKVLTRSDKARGKSDNVPSEEVVKKMKNYWRQLLNAKLITQRKFDNLTKAERGGLSELDKAGFIKRQLVETRQITKHVAQILDSRMNTKYDENDKLIREVKVITLKSKLVSDFRKDFQFYKVREINNYHHAHDAYLNAVVGTALIKKYPKLESEFVYGDYKVYDVRKMIAKSEQEIGKATAKYFFYSNIMNFFKTEITLANGEIRKRPLIETNGETGEIVWDKGRDFATVRKVLSMPQVNIVKKTEVQTGGFSKESILPKRNSDKLIARKKDWDPKKYGGFDSPTVAYSVLVVAKVEKGKSKKLKSVKELLGITIMERSSFEKNPIDFLEAKGYKEVKKDLIIKLPKYSLFELENGRKRMLASAGELQKGNELALPSKYVNFLYLASHYEKLKGSPEDNEQKQLFVEQHKHYLDEIIEQISEFSKRVILADANLDKVLSAYNKHRDKPIREQAENIIHLFTLTNLGAPAAFKYFDTTIDRKRYTSTKEVLDATLIHQSITGLYETRIDLSQLGGDGGPAPEAAAKGGGRDIMKDIKVRLMTDSPDDSQDLMIGAIESNLFADQISWKSDQPVWLNQWPLKQEKLQALQQLVTEQLQLGHLEESNSPWNTPVFVIKKKSGKWRLLQDLRAVNATMHDMGALQPGLPSPVAVPKGWEIIIIDLQDCFFNIKLHPEDCKRFAFSVPSPNFKRPYQRFQWKVLPQGMKNSPTLCQKFVDKAILTVRDKYQDSYIVHYMDDILLAHPSRSIVDEILTSMIQALNKHGLVVSTEKIQKYDNLKYLGTHIQGDSVSYQKLQIRTDKLRTLNDFQKLLGNINWIRPFLKLTTGELKPLFEILNGDSNPISTRKLTPEACKALQLMNERLSTARVKRLDLSQPWSLCILKTEYTPTACLWQDGVVEWIHLPHISPKVITPYDIFCTQLIIKGRHRSKELFSKDPDYIVVPYTKVQFDLLLQEKEDWPISLLGFLGEVHFHLPKDPLLTFTLQTAIIFPHMTSTTPLEKGIVIFTDGSANGRSVTYIQGREPIIKENTQNTAQQAEIVAVITAFEEVSQPFNLYTDSKYVTGLFPEIETATLSPRTKIYTELKHLQRLIHKRQEKFYIGHIRGHTGLPGPLAQGNAYADSLTRILTAGKRTADGSEFEKRTADGSEFESPKKKAKVE

SEQ ID NO: 3218 - protein, 2018 aa, synthetic construct
MPAAKRVKLDGGDKKYSIGLDIGTNSVGWAVITDEYKVPSKKFKVLGNTDRHSIKKNLIGALLFDSGETAEATRLKRTARRRYTRRKNRICYLQEIFSNEMAKVDDSFFHRLEESFLVEEDKKHERHPIFGNIVDEVAYHEKYPTIYHLRKKLVDSTDKADLRLIYLALAHMIKFRGHFLIEGDLNPDNSDVDKLFIQLVQTYNQLFEENPINASGVDAKAILSARLSKSRRLENLIAQLPGEKKNGLFGNLIALSLGLTPNFKSNFDLAEDAKLQLSKDTYDDDLDNLLAQIGDQYADLFLAAKNLSDAILLSDILRVNTEITKAPLSASMIKRYDEHHQDLTLLKALVRQQLPEKYKEIFFDQSKNGYAGYIDGGASQEEFYKFIKPILEKMDGTEELLVKLNREDLLRKQRTFDNGSIPHQIHLGELHAILRRQEDFYPFLKDNREKIEKILTFRIPYYVGPLARGNSRFAWMTRKSEETITPWNFEEVVDKGASAQSFIERMTNFDKNLPNEKVLPKHSLLYEYFTVYNELTKVKYVTEGMRKPAFLSGEQKKAIVDLLFKTNRKVTVKQLKEDYFKKIECFDSVEISGVEDRFNASLGTYHDLLKIIKDKDFLDNEENEDILEDIVLTLTLFEDREMIEERLKTYAHLFDDKVMKQLKRRRYTGWGRLSRKLINGIRDKQSGKTILDFLKSDGFANRNFMQLIHDDSLTFKEDIQKAQVSGQGDSLHEHIANLAGSPAIKKGILQTVKVVDELVKVMGRHKPENIVIEMARENQTTQKGQKNSRERMKRIEEGIKELGSQILKEHPVENTQLQNEKLYLYYLQNGRDMYVDQELDINRLSDYDVDHIVPQSFLKDDSIDNKVLTRSDKARGKSDNVPSEEVVKKMKNYWRQLLNAKLITQRKFDNLTKAERGGLSELDKAGFIKRQLVETRQITKHVAQILDSRMNTKYDENDKLIREVKVITLKSKLVSDFRKDFQFYKVREINNYHHAHDAYLNAVVGTALIKKYPKLESEFVYGDYKVYDVRKMIAKSEQEIGKATAKYFFYSNIMNFFKTEITLANGEIRKRPLIETNGETGEIVWDKGRDFATVRKVLSMPQVNIVKKTEVQTGGFSKESILPKRNSDKLIARKKDWDPKKYGGFDSPTVAYSVLVVAKVEKGKSKKLKSVKELLGITIMERSSFEKNPIDFLEAKGYKEVKKDLIIKLPKYSLFELENGRKRMLASAGELQKGNELALPSKYVNFLYLASHYEKLKGSPEDNEQKQLFVEQHKHYLDEIIEQISEFSKRVILADANLDKVLSAYNKHRDKPIREQAENIIHLFTLTNLGAPAAFKYFDTTIDRKRYTSTKEVLDATLIHQSITGLYETRIDLSQLGGDGGPAPAPGGGRDIMKDIKVRLMTDSPDDSQDLMIGAIESNLFADQISWKSDQPVWLNQWPLKQEKLQALQQLVTEQLQLGHLEESNSPWNTPVFVIKKKSGKWRLLQDLRAVNATMHDMGALQPGLPSPVAVPKGWEIIIIDLQDCFFNIKLHPEDCKRFAFSVPSPNFKRPYQRFQWKVLPQGMKNSPTLCQKFVDKAILTVRDKYQDSYIVHYMDDILLAHPSRSIVDEILTSMIQALNKHGLVVSTEKIQKYDNLKYLGTHIQGDSVSYQKLQIRTDKLRTLNDFQKLLGNINWIRPFLKLTTGELKPLFEILNGDSNPISTRKLTPEACKALQLMNERLSTARVKRLDLSQPWSLCILKTEYTPTACLWQDGVVEWIHLPHISPKVITPYDIFCTQLIIKGRHRSKELFSKDPDYIVVPYTKVQFDLLLQEKEDWPISLLGFLGEVHFHLPKDPLLTFTLQTAIIFPHMTSTTPLEKGIVIFTDGSANGRSVTYIQGREPIIKENTQNTAQQAEIVAVITAFEEVSQPFNLYTDSKYVTGLFPEIETATLSPRTKIYTELKHLQRLIHKRQEKFYIGHIRGHTGLPGPLAQGNAYADSLTRILTAGKRTADGSEFEKRTADGSEFESPKKKAKVE

SEQ ID NO: 3219 - protein, 2025 aa, synthetic construct
MPAAKRVKLDGGDKKYSIGLDIGTNSVGWAVITDEYKVPSKKFKVLGNTDRHSIKKNLIGALLFDSGETAEATRLKRTARRRYTRRKNRICYLQEIFSNEMAKVDDSFFHRLEESFLVEEDKKHERHPIFGNIVDEVAYHEKYPTIYHLRKKLVDSTDKADLRLIYLALAHMIKFRGHFLIEGDLNPDNSDVDKLFIQLVQTYNQLFEENPINASGVDAKAILSARLSKSRRLENLIAQLPGEKKNGLFGNLIALSLGLTPNFKSNFDLAEDAKLQLSKDTYDDDLDNLLAQIGDQYADLFLAAKNLSDAILLSDILRVNTEITKAPLSASMIKRYDEHHQDLTLLKALVRQQLPEKYKEIFFDQSKNGYAGYIDGGASQEEFYKFIKPILEKMDGTEELLVKLNREDLLRKQRTFDNGSIPHQIHLGELHAILRRQEDFYPFLKDNREKIEKILTFRIPYYVGPLARGNSRFAWMTRKSEETITPWNFEEVVDKGASAQSFIERMTNFDKNLPNEKVLPKHSLLYEYFTVYNELTKVKYVTEGMRKPAFLSGEQKKAIVDLLFKTNRKVTVKQLKEDYFKKIECFDSVEISGVEDRFNASLGTYHDLLKIIKDKDFLDNEENEDILEDIVLTLTLFEDREMIEERLKTYAHLFDDKVMKQLKRRRYTGWGRLSRKLINGIRDKQSGKTILDFLKSDGFANRNFMQLIHDDSLTFKEDIQKAQVSGQGDSLHEHIANLAGSPAIKKGILQTVKVVDELVKVMGRHKPENIVIEMARENQTTQKGQKNSRERMKRIEEGIKELGSQILKEHPVENTQLQNEKLYLYYLQNGRDMYVDQELDINRLSDYDVDHIVPQSFLKDDSIDNKVLTRSDKARGKSDNVPSEEVVKKMKNYWRQLLNAKLITQRKFDNLTKAERGGLSELDKAGFIKRQLVETRQITKHVAQILDSRMNTKYDENDKLIREVKVITLKSKLVSDFRKDFQFYKVREINNYHHAHDAYLNAVVGTALIKKYPKLESEFVYGDYKVYDVRKMIAKSEQEIGKATAKYFFYSNIMNFFKTEITLANGEIRKRPLIETNGETGEIVWDKGRDFATVRKVLSMPQVNIVKKTEVQTGGFSKESILPKRNSDKLIARKKDWDPKKYGGFDSPTVAYSVLVVAKVEKGKSKKLKSVKELLGITIMERSSFEKNPIDFLEAKGYKEVKKDLIIKLPKYSLFELENGRKRMLASAGELQKGNELALPSKYVNFLYLASHYEKLKGSPEDNEQKQLFVEQHKHYLDEIIEQISEFSKRVILADANLDKVLSAYNKHRDKPIREQAENIIHLFTLTNLGAPAAFKYFDTTIDRKRYTSTKEVLDATLIHQSITGLYETRIDLSQLGGDGGGSAGSAAGSGEFGGGRDIMKDIKVRLMTDSPDDSQDLMIGAIESNLFADQISWKSDQPVWLNQWPLKQEKLQALQQLVTEQLQLGHLEESNSPWNTPVFVIKKKSGKWRLLQDLRAVNATMHDMGALQPGLPSPVAVPKGWEIIIIDLQDCFFNIKLHPEDCKRFAFSVPSPNFKRPYQRFQWKVLPQGMKNSPTLCQKFVDKAILTVRDKYQDSYIVHYMDDILLAHPSRSIVDEILTSMIQALNKHGLVVSTEKIQKYDNLKYLGTHIQGDSVSYQKLQIRTDKLRTLNDFQKLLGNINWIRPFLKLTTGELKPLFEILNGDSNPISTRKLTPEACKALQLMNERLSTARVKRLDLSQPWSLCILKTEYTPTACLWQDGVVEWIHLPHISPKVITPYDIFCTQLIIKGRHRSKELFSKDPDYIVVPYTKVQFDLLLQEKEDWPISLLGFLGEVHFHLPKDPLLTFTLQTAIIFPHMTSTTPLEKGIVIFTDGSANGRSVTYIQGREPIIKENTQNTAQQAEIVAVITAFEEVSQPFNLYTDSKYVTGLFPEIETATLSPRTKIYTELKHLQRLIHKRQEKFYIGHIRGHTGLPGPLAQGNAYADSLTRILTAGKRTADGSEFEKRTADGSEFESPKKKAKVE

SEQ ID NO: 3220 - protein, 2022 aa, synthetic construct
MPAAKRVKLDGGDKKYSIGLDIGTNSVGWAVITDEYKVPSKKFKVLGNTDRHSIKKNLIGALLFDSGETAEATRLKRTARRRYTRRKNRICYLQEIFSNEMAKVDDSFFHRLEESFLVEEDKKHERHPIFGNIVDEVAYHEKYPTIYHLRKKLVDSTDKADLRLIYLALAHMIKFRGHFLIEGDLNPDNSDVDKLFIQLVQTYNQLFEENPINASGVDAKAILSARLSKSRRLENLIAQLPGEKKNGLFGNLIALSLGLTPNFKSNFDLAEDAKLQLSKDTYDDDLDNLLAQIGDQYADLFLAAKNLSDAILLSDILRVNTEITKAPLSASMIKRYDEHHQDLTLLKALVRQQLPEKYKEIFFDQSKNGYAGYIDGGASQEEFYKFIKPILEKMDGTEELLVKLNREDLLRKQRTFDNGSIPHQIHLGELHAILRRQEDFYPFLKDNREKIEKILTFRIPYYVGPLARGNSRFAWMTRKSEETITPWNFEEVVDKGASAQSFIERMTNFDKNLPNEKVLPKHSLLYEYFTVYNELTKVKYVTEGMRKPAFLSGEQKKAIVDLLFKTNRKVTVKQLKEDYFKKIECFDSVEISGVEDRFNASLGTYHDLLKIIKDKDFLDNEENEDILEDIVLTLTLFEDREMIEERLKTYAHLFDDKVMKQLKRRRYTGWGRLSRKLINGIRDKQSGKTILDFLKSDGFANRNFMQLIHDDSLTFKEDIQKAQVSGQGDSLHEHIANLAGSPAIKKGILQTVKVVDELVKVMGRHKPENIVIEMARENQTTQKGQKNSRERMKRIEEGIKELGSQILKEHPVENTQLQNEKLYLYYLQNGRDMYVDQELDINRLSDYDVDHIVPQSFLKDDSIDNKVLTRSDKARGKSDNVPSEEVVKKMKNYWRQLLNAKLITQRKFDNLTKAERGGLSELDKAGFIKRQLVETRQITKHVAQILDSRMNTKYDENDKLIREVKVITLKSKLVSDFRKDFQFYKVREINNYHHAHDAYLNAVVGTALIKKYPKLESEFVYGDYKVYDVRKMIAKSEQEIGKATAKYFFYSNIMNFFKTEITLANGEIRKRPLIETNGETGEIVWDKGRDFATVRKVLSMPQVNIVKKTEVQTGGFSKESILPKRNSDKLIARKKDWDPKKYGGFDSPTVAYSVLVVAKVEKGKSKKLKSVKELLGITIMERSSFEKNPIDFLEAKGYKEVKKDLIIKLPKYSLFELENGRKRMLASAGELQKGNELALPSKYVNFLYLASHYEKLKGSPEDNEQKQLFVEQHKHYLDEIIEQISEFSKRVILADANLDKVLSAYNKHRDKPIREQAENIIHLFTLTNLGAPAAFKYFDTTIDRKRYTSTKEVLDATLIHQSITGLYETRIDLSQLGGDGGPAPGGGGGSGGGRDIMKDIKVRLMTDSPDDSQDLMIGAIESNLFADQISWKSDQPVWLNQWPLKQEKLQALQQLVTEQLQLGHLEESNSPWNTPVFVIKKKSGKWRLLQDLRAVNATMHDMGALQPGLPSPVAVPKGWEIIIIDLQDCFFNIKLHPEDCKRFAFSVPSPNFKRPYQRFQWKVLPQGMKNSPTLCQKFVDKAILTVRDKYQDSYIVHYMDDILLAHPSRSIVDEILTSMIQALNKHGLVVSTEKIQKYDNLKYLGTHIQGDSVSYQKLQIRTDKLRTLNDFQKLLGNINWIRPFLKLTTGELKPLFEILNGDSNPISTRKLTPEACKALQLMNERLSTARVKRLDLSQPWSLCILKTEYTPTACLWQDGVVEWIHLPHISPKVITPYDIFCTQLIIKGRHRSKELFSKDPDYIVVPYTKVQFDLLLQEKEDWPISLLGFLGEVHFHLPKDPLLTFTLQTAIIFPHMTSTTPLEKGIVIFTDGSANGRSVTYIQGREPIIKENTQNTAQQAEIVAVITAFEEVSQPFNLYTDSKYVTGLFPEIETATLSPRTKIYTELKHLQRLIHKRQEKFYIGHIRGHTGLPGPLAQGNAYADSLTRILTAGKRTADGSEFEKRTADGSEFESPKKKAKVE

SEQ ID NO: 3221 - protein, 2022 aa, synthetic construct
MPAAKRVKLDGGDKKYSIGLDIGTNSVGWAVITDEYKVPSKKFKVLGNTDRHSIKKNLIGALLFDSGETAEATRLKRTARRRYTRRKNRICYLQEIFSNEMAKVDDSFFHRLEESFLVEEDKKHERHPIFGNIVDEVAYHEKYPTIYHLRKKLVDSTDKADLRLIYLALAHMIKFRGHFLIEGDLNPDNSDVDKLFIQLVQTYNQLFEENPINASGVDAKAILSARLSKSRRLENLIAQLPGEKKNGLFGNLIALSLGLTPNFKSNFDLAEDAKLQLSKDTYDDDLDNLLAQIGDQYADLFLAAKNLSDAILLSDILRVNTEITKAPLSASMIKRYDEHHQDLTLLKALVRQQLPEKYKEIFFDQSKNGYAGYIDGGASQEEFYKFIKPILEKMDGTEELLVKLNREDLLRKQRTFDNGSIPHQIHLGELHAILRRQEDFYPFLKDNREKIEKILTFRIPYYVGPLARGNSRFAWMTRKSEETITPWNFEEVVDKGASAQSFIERMTNFDKNLPNEKVLPKHSLLYEYFTVYNELTKVKYVTEGMRKPAFLSGEQKKAIVDLLFKTNRKVTVKQLKEDYFKKIECFDSVEISGVEDRFNASLGTYHDLLKIIKDKDFLDNEENEDILEDIVLTLTLFEDREMIEERLKTYAHLFDDKVMKQLKRRRYTGWGRLSRKLINGIRDKQSGKTILDFLKSDGFANRNFMQLIHDDSLTFKEDIQKAQVSGQGDSLHEHIANLAGSPAIKKGILQTVKVVDELVKVMGRHKPENIVIEMARENQTTQKGQKNSRERMKRIEEGIKELGSQILKEHPVENTQLQNEKLYLYYLQNGRDMYVDQELDINRLSDYDVDHIVPQSFLKDDSIDNKVLTRSDKARGKSDNVPSEEVVKKMKNYWRQLLNAKLITQRKFDNLTKAERGGLSELDKAGFIKRQLVETRQITKHVAQILDSRMNTKYDENDKLIREVKVITLKSKLVSDFRKDFQFYKVREINNYHHAHDAYLNAVVGTALIKKYPKLESEFVYGDYKVYDVRKMIAKSEQEIGKATAKYFFYSNIMNFFKTEITLANGEIRKRPLIETNGETGEIVWDKGRDFATVRKVLSMPQVNIVKKTEVQTGGFSKESILPKRNSDKLIARKKDWDPKKYGGFDSPTVAYSVLVVAKVEKGKSKKLKSVKELLGITIMERSSFEKNPIDFLEAKGYKEVKKDLIIKLPKYSLFELENGRKRMLASAGELQKGNELALPSKYVNFLYLASHYEKLKGSPEDNEQKQLFVEQHKHYLDEIIEQISEFSKRVILADANLDKVLSAYNKHRDKPIREQAENIIHLFTLTNLGAPAAFKYFDTTIDRKRYTSTKEVLDATLIHQSITGLYETRIDLSQLGGDGGPAPAPAPAPGGGRDIMKDIKVRLMTDSPDDSQDLMIGAIESNLFADQISWKSDQPVWLNQWPLKQEKLQALQQLVTEQLQLGHLEESNSPWNTPVFVIKKKSGKWRLLQDLRAVNATMHDMGALQPGLPSPVAVPKGWEIIIIDLQDCFFNIKLHPEDCKRFAFSVPSPNFKRPYQRFQWKVLPQGMKNSPTLCQKFVDKAILTVRDKYQDSYIVHYMDDILLAHPSRSIVDEILTSMIQALNKHGLVVSTEKIQKYDNLKYLGTHIQGDSVSYQKLQIRTDKLRTLNDFQKLLGNINWIRPFLKLTTGELKPLFEILNGDSNPISTRKLTPEACKALQLMNERLSTARVKRLDLSQPWSLCILKTEYTPTACLWQDGVVEWIHLPHISPKVITPYDIFCTQLIIKGRHRSKELFSKDPDYIVVPYTKVQFDLLLQEKEDWPISLLGFLGEVHFHLPKDPLLTFTLQTAIIFPHMTSTTPLEKGIVIFTDGSANGRSVTYIQGREPIIKENTQNTAQQAEIVAVITAFEEVSQPFNLYTDSKYVTGLFPEIETATLSPRTKIYTELKHLQRLIHKRQEKFYIGHIRGHTGLPGPLAQGNAYADSLTRILTAGKRTADGSEFEKRTADGSEFESPKKKAKVE

SEQ ID NO: 3222 - protein, 2024 aa, synthetic construct
MPAAKRVKLDGGDKKYSIGLDIGTNSVGWAVITDEYKVPSKKFKVLGNTDRHSIKKNLIGALLFDSGETAEATRLKRTARRRYTRRKNRICYLQEIFSNEMAKVDDSFFHRLEESFLVEEDKKHERHPIFGNIVDEVAYHEKYPTIYHLRKKLVDSTDKADLRLIYLALAHMIKFRGHFLIEGDLNPDNSDVDKLFIQLVQTYNQLFEENPINASGVDAKAILSARLSKSRRLENLIAQLPGEKKNGLFGNLIALSLGLTPNFKSNFDLAEDAKLQLSKDTYDDDLDNLLAQIGDQYADLFLAAKNLSDAILLSDILRVNTEITKAPLSASMIKRYDEHHQDLTLLKALVRQQLPEKYKEIFFDQSKNGYAGYIDGGASQEEFYKFIKPILEKMDGTEELLVKLNREDLLRKQRTFDNGSIPHQIHLGELHAILRRQEDFYPFLKDNREKIEKILTFRIPYYVGPLARGNSRFAWMTRKSEETITPWNFEEVVDKGASAQSFIERMTNFDKNLPNEKVLPKHSLLYEYFTVYNELTKVKYVTEGMRKPAFLSGEQKKAIVDLLFKTNRKVTVKQLKEDYFKKIECFDSVEISGVEDRFNASLGTYHDLLKIIKDKDFLDNEENEDILEDIVLTLTLFEDREMIEERLKTYAHLFDDKVMKQLKRRRYTGWGRLSRKLINGIRDKQSGKTILDFLKSDGFANRNFMQLIHDDSLTFKEDIQKAQVSGQGDSLHEHIANLAGSPAIKKGILQTVKVVDELVKVMGRHKPENIVIEMARENQTTQKGQKNSRERMKRIEEGIKELGSQILKEHPVENTQLQNEKLYLYYLQNGRDMYVDQELDINRLSDYDVDHIVPQSFLKDDSIDNKVLTRSDKARGKSDNVPSEEVVKKMKNYWRQLLNAKLITQRKFDNLTKAERGGLSELDKAGFIKRQLVETRQITKHVAQILDSRMNTKYDENDKLIREVKVITLKSKLVSDFRKDFQFYKVREINNYHHAHDAYLNAVVGTALIKKYPKLESEFVYGDYKVYDVRKMIAKSEQEIGKATAKYFFYSNIMNFFKTEITLANGEIRKRPLIETNGETGEIVWDKGRDFATVRKVLSMPQVNIVKKTEVQTGGFSKESILPKRNSDKLIARKKDWDPKKYGGFDSPTVAYSVLVVAKVEKGKSKKLKSVKELLGITIMERSSFEKNPIDFLEAKGYKEVKKDLIIKLPKYSLFELENGRKRMLASAGELQKGNELALPSKYVNFLYLASHYEKLKGSPEDNEQKQLFVEQHKHYLDEIIEQISEFSKRVILADANLDKVLSAYNKHRDKPIREQAENIIHLFTLTNLGAPAAFKYFDTTIDRKRYTSTKEVLDATLIHQSITGLYETRIDLSQLGGDGGPAPEAAAKGGSGGGRDIMKDIKVRLMTDSPDDSQDLMIGAIESNLFADQISWKSDQPVWLNQWPLKQEKLQALQQLVTEQLQLGHLEESNSPWNTPVFVIKKKSGKWRLLQDLRAVNATMHDMGALQPGLPSPVAVPKGWEIIIIDLQDCFFNIKLHPEDCKRFAFSVPSPNFKRPYQRFQWKVLPQGMKNSPTLCQKFVDKAILTVRDKYQDSYIVHYMDDILLAHPSRSIVDEILTSMIQALNKHGLVVSTEKIQKYDNLKYLGTHIQGDSVSYQKLQIRTDKLRTLNDFQKLLGNINWIRPFLKLTTGELKPLFEILNGDSNPISTRKLTPEACKALQLMNERLSTARVKRLDLSQPWSLCILKTEYTPTACLWQDGVVEWIHLPHISPKVITPYDIFCTQLIIKGRHRSKELFSKDPDYIVVPYTKVQFDLLLQEKEDWPISLLGFLGEVHFHLPKDPLLTFTLQTAIIFPHMTSTTPLEKGIVIFTDGSANGRSVTYIQGREPIIKENTQNTAQQAEIVAVITAFEEVSQPFNLYTDSKYVTGLFPEIETATLSPRTKIYTELKHLQRLIHKRQEKFYIGHIRGHTGLPGPLAQGNAYADSLTRILTAGKRTADGSEFEKRTADGSEFESPKKKAKVE

SEQ ID NO: 3223 - protein, 2022 aa, synthetic construct
MPAAKRVKLDGGDKKYSIGLDIGTNSVGWAVITDEYKVPSKKFKVLGNTDRHSIKKNLIGALLFDSGETAEATRLKRTARRRYTRRKNRICYLQEIFSNEMAKVDDSFFHRLEESFLVEEDKKHERHPIFGNIVDEVAYHEKYPTIYHLRKKLVDSTDKADLRLIYLALAHMIKFRGHFLIEGDLNPDNSDVDKLFIQLVQTYNQLFEENPINASGVDAKAILSARLSKSRRLENLIAQLPGEKKNGLFGNLIALSLGLTPNFKSNFDLAEDAKLQLSKDTYDDDLDNLLAQIGDQYADLFLAAKNLSDAILLSDILRVNTEITKAPLSASMIKRYDEHHQDLTLLKALVRQQLPEKYKEIFFDQSKNGYAGYIDGGASQEEFYKFIKPILEKMDGTEELLVKLNREDLLRKQRTFDNGSIPHQIHLGELHAILRRQEDFYPFLKDNREKIEKILTFRIPYYVGPLARGNSRFAWMTRKSEETITPWNFEEVVDKGASAQSFIERMTNFDKNLPNEKVLPKHSLLYEYFTVYNELTKVKYVTEGMRKPAFLSGEQKKAIVDLLFKTNRKVTVKQLKEDYFKKIECFDSVEISGVEDRFNASLGTYHDLLKIIKDKDFLDNEENEDILEDIVLTLTLFEDREMIEERLKTYAHLFDDKVMKQLKRRRYTGWGRLSRKLINGIRDKQSGKTILDFLKSDGFANRNFMQLIHDDSLTFKEDIQKAQVSGQGDSLHEHIANLAGSPAIKKGILQTVKVVDELVKVMGRHKPENIVIEMARENQTTQKGQKNSRERMKRIEEGIKELGSQILKEHPVENTQLQNEKLYLYYLQNGRDMYVDQELDINRLSDYDVDHIVPQSFLKDDSIDNKVLTRSDKARGKSDNVPSEEVVKKMKNYWRQLLNAKLITQRKFDNLTKAERGGLSELDKAGFIKRQLVETRQITKHVAQILDSRMNTKYDENDKLIREVKVITLKSKLVSDFRKDFQFYKVREINNYHHAHDAYLNAVVGTALIKKYPKLESEFVYGDYKVYDVRKMIAKSEQEIGKATAKYFFYSNIMNFFKTEITLANGEIRKRPLIETNGETGEIVWDKGRDFATVRKVLSMPQVNIVKKTEVQTGGFSKESILPKRNSDKLIARKKDWDPKKYGGFDSPTVAYSVLVVAKVEKGKSKKLKSVKELLGITIMERSSFEKNPIDFLEAKGYKEVKKDLIIKLPKYSLFELENGRKRMLASAGELQKGNELALPSKYVNFLYLASHYEKLKGSPEDNEQKQLFVEQHKHYLDEIIEQISEFSKRVILADANLDKVLSAYNKHRDKPIREQAENIIHLFTLTNLGAPAAFKYFDTTIDRKRYTSTKEVLDATLIHQSITGLYETRIDLSQLGGDGGGGGPAPGSSGGGRDIMKDIKVRLMTDSPDDSQDLMIGAIESNLFADQISWKSDQPVWLNQWPLKQEKLQALQQLVTEQLQLGHLEESNSPWNTPVFVIKKKSGKWRLLQDLRAVNATMHDMGALQPGLPSPVAVPKGWEIIIIDLQDCFFNIKLHPEDCKRFAFSVPSPNFKRPYQRFQWKVLPQGMKNSPTLCQKFVDKAILTVRDKYQDSYIVHYMDDILLAHPSRSIVDEILTSMIQALNKHGLVVSTEKIQKYDNLKYLGTHIQGDSVSYQKLQIRTDKLRTLNDFQKLLGNINWIRPFLKLTTGELKPLFEILNGDSNPISTRKLTPEACKALQLMNERLSTARVKRLDLSQPWSLCILKTEYTPTACLWQDGVVEWIHLPHISPKVITPYDIFCTQLIIKGRHRSKELFSKDPDYIVVPYTKVQFDLLLQEKEDWPISLLGFLGEVHFHLPKDPLLTFTLQTAIIFPHMTSTTPLEKGIVIFTDGSANGRSVTYIQGREPIIKENTQNTAQQAEIVAVITAFEEVSQPFNLYTDSKYVTGLFPEIETATLSPRTKIYTELKHLQRLIHKRQEKFYIGHIRGHTGLPGPLAQGNAYADSLTRILTAGKRTADGSEFEKRTADGSEFESPKKKAKVE

SEQ ID NO: 3224 - protein, 2022 aa, synthetic construct
MPAAKRVKLDGGDKKYSIGLDIGTNSVGWAVITDEYKVPSKKFKVLGNTDRHSIKKNLIGALLFDSGETAEATRLKRTARRRYTRRKNRICYLQEIFSNEMAKVDDSFFHRLEESFLVEEDKKHERHPIFGNIVDEVAYHEKYPTIYHLRKKLVDSTDKADLRLIYLALAHMIKFRGHFLIEGDLNPDNSDVDKLFIQLVQTYNQLFEENPINASGVDAKAILSARLSKSRRLENLIAQLPGEKKNGLFGNLIALSLGLTPNFKSNFDLAEDAKLQLSKDTYDDDLDNLLAQIGDQYADLFLAAKNLSDAILLSDILRVNTEITKAPLSASMIKRYDEHHQDLTLLKALVRQQLPEKYKEIFFDQSKNGYAGYIDGGASQEEFYKFIKPILEKMDGTEELLVKLNREDLLRKQRTFDNGSIPHQIHLGELHAILRRQEDFYPFLKDNREKIEKILTFRIPYYVGPLARGNSRFAWMTRKSEETITPWNFEEVVDKGASAQSFIERMTNFDKNLPNEKVLPKHSLLYEYFTVYNELTKVKYVTEGMRKPAFLSGEQKKAIVDLLFKTNRKVTVKQLKEDYFKKIECFDSVEISGVEDRFNASLGTYHDLLKIIKDKDFLDNEENEDILEDIVLTLTLFEDREMIEERLKTYAHLFDDKVMKQLKRRRYTGWGRLSRKLINGIRDKQSGKTILDFLKSDGFANRNFMQLIHDDSLTFKEDIQKAQVSGQGDSLHEHIANLAGSPAIKKGILQTVKVVDELVKVMGRHKPENIVIEMARENQTTQKGQKNSRERMKRIEEGIKELGSQILKEHPVENTQLQNEKLYLYYLQNGRDMYVDQELDINRLSDYDVDHIVPQSFLKDDSIDNKVLTRSDKARGKSDNVPSEEVVKKMKNYWRQLLNAKLITQRKFDNLTKAERGGLSELDKAGFIKRQLVETRQITKHVAQILDSRMNTKYDENDKLIREVKVITLKSKLVSDFRKDFQFYKVREINNYHHAHDAYLNAVVGTALIKKYPKLESEFVYGDYKVYDVRKMIAKSEQEIGKATAKYFFYSNIMNFFKTEITLANGEIRKRPLIETNGETGEIVWDKGRDFATVRKVLSMPQVNIVKKTEVQTGGFSKESILPKRNSDKLIARKKDWDPKKYGGFDSPTVAYSVLVVAKVEKGKSKKLKSVKELLGITIMERSSFEKNPIDFLEAKGYKEVKKDLIIKLPKYSLFELENGRKRMLASAGELQKGNELALPSKYVNFLYLASHYEKLKGSPEDNEQKQLFVEQHKHYLDEIIEQISEFSKRVILADANLDKVLSAYNKHRDKPIREQAENIIHLFTLTNLGAPAAFKYFDTTIDRKRYTSTKEVLDATLIHQSITGLYETRIDLSQLGGDGGGGSPAPGGGGGGRDIMKDIKVRLMTDSPDDSQDLMIGAIESNLFADQISWKSDQPVWLNQWPLKQEKLQALQQLVTEQLQLGHLEESNSPWNTPVFVIKKKSGKWRLLQDLRAVNATMHDMGALQPGLPSPVAVPKGWEIIIIDLQDCFFNIKLHPEDCKRFAFSVPSPNFKRPYQRFQWKVLPQGMKNSPTLCQKFVDKAILTVRDKYQDSYIVHYMDDILLAHPSRSIVDEILTSMIQALNKHGLVVSTEKIQKYDNLKYLGTHIQGDSVSYQKLQIRTDKLRTLNDFQKLLGNINWIRPFLKLTTGELKPLFEILNGDSNPISTRKLTPEACKALQLMNERLSTARVKRLDLSQPWSLCILKTEYTPTACLWQDGVVEWIHLPHISPKVITPYDIFCTQLIIKGRHRSKELFSKDPDYIVVPYTKVQFDLLLQEKEDWPISLLGFLGEVHFHLPKDPLLTFTLQTAIIFPHMTSTTPLEKGIVIFTDGSANGRSVTYIQGREPIIKENTQNTAQQAEIVAVITAFEEVSQPFNLYTDSKYVTGLFPEIETATLSPRTKIYTELKHLQRLIHKRQEKFYIGHIRGHTGLPGPLAQGNAYADSLTRILTAGKRTADGSEFEKRTADGSEFESPKKKAKVE

SEQ ID NO: 3225 - protein, 2019 aa, synthetic construct
MPAAKRVKLDGGDKKYSIGLDIGTNSVGWAVITDEYKVPSKKFKVLGNTDRHSIKKNLIGALLFDSGETAEATRLKRTARRRYTRRKNRICYLQEIFSNEMAKVDDSFFHRLEESFLVEEDKKHERHPIFGNIVDEVAYHEKYPTIYHLRKKLVDSTDKADLRLIYLALAHMIKFRGHFLIEGDLNPDNSDVDKLFIQLVQTYNQLFEENPINASGVDAKAILSARLSKSRRLENLIAQLPGEKKNGLFGNLIALSLGLTPNFKSNFDLAEDAKLQLSKDTYDDDLDNLLAQIGDQYADLFLAAKNLSDAILLSDILRVNTEITKAPLSASMIKRYDEHHQDLTLLKALVRQQLPEKYKEIFFDQSKNGYAGYIDGGASQEEFYKFIKPILEKMDGTEELLVKLNREDLLRKQRTFDNGSIPHQIHLGELHAILRRQEDFYPFLKDNREKIEKILTFRIPYYVGPLARGNSRFAWMTRKSEETITPWNFEEVVDKGASAQSFIERMTNFDKNLPNEKVLPKHSLLYEYFTVYNELTKVKYVTEGMRKPAFLSGEQKKAIVDLLFKTNRKVTVKQLKEDYFKKIECFDSVEISGVEDRFNASLGTYHDLLKIIKDKDFLDNEENEDILEDIVLTLTLFEDREMIEERLKTYAHLFDDKVMKQLKRRRYTGWGRLSRKLINGIRDKQSGKTILDFLKSDGFANRNFMQLIHDDSLTFKEDIQKAQVSGQGDSLHEHIANLAGSPAIKKGILQTVKVVDELVKVMGRHKPENIVIEMARENQTTQKGQKNSRERMKRIEEGIKELGSQILKEHPVENTQLQNEKLYLYYLQNGRDMYVDQELDINRLSDYDVDHIVPQSFLKDDSIDNKVLTRSDKARGKSDNVPSEEVVKKMKNYWRQLLNAKLITQRKFDNLTKAERGGLSELDKAGFIKRQLVETRQITKHVAQILDSRMNTKYDENDKLIREVKVITLKSKLVSDFRKDFQFYKVREINNYHHAHDAYLNAVVGTALIKKYPKLESEFVYGDYKVYDVRKMIAKSEQEIGKATAKYFFYSNIMNFFKTEITLANGEIRKRPLIETNGETGEIVWDKGRDFATVRKVLSMPQVNIVKKTEVQTGGFSKESILPKRNSDKLIARKKDWDPKKYGGFDSPTVAYSVLVVAKVEKGKSKKLKSVKELLGITIMERSSFEKNPIDFLEAKGYKEVKKDLIIKLPKYSLFELENGRKRMLASAGELQKGNELALPSKYVNFLYLASHYEKLKGSPEDNEQKQLFVEQHKHYLDEIIEQISEFSKRVILADANLDKVLSAYNKHRDKPIREQAENIIHLFTLTNLGAPAAFKYFDTTIDRKRYTSTKEVLDATLIHQSITGLYETRIDLSQLGGDGGGGGGGSGGGRDIMKDIKVRLMTDSPDDSQDLMIGAIESNLFADQISWKSDQPVWLNQWPLKQEKLQALQQLVTEQLQLGHLEESNSPWNTPVFVIKKKSGKWRLLQDLRAVNATMHDMGALQPGLPSPVAVPKGWEIIIIDLQDCFFNIKLHPEDCKRFAFSVPSPNFKRPYQRFQWKVLPQGMKNSPTLCQKFVDKAILTVRDKYQDSYIVHYMDDILLAHPSRSIVDEILTSMIQALNKHGLVVSTEKIQKYDNLKYLGTHIQGDSVSYQKLQIRTDKLRTLNDFQKLLGNINWIRPFLKLTTGELKPLFEILNGDSNPISTRKLTPEACKALQLMNERLSTARVKRLDLSQPWSLCILKTEYTPTACLWQDGVVEWIHLPHISPKVITPYDIFCTQLIIKGRHRSKELFSKDPDYIVVPYTKVQFDLLLQEKEDWPISLLGFLGEVHFHLPKDPLLTFTLQTAIIFPHMTSTTPLEKGIVIFTDGSANGRSVTYIQGREPIIKENTQNTAQQAEIVAVITAFEEVSQPFNLYTDSKYVTGLFPEIETATLSPRTKIYTELKHLQRLIHKRQEKFYIGHIRGHTGLPGPLAQGNAYADSLTRILTAGKRTADGSEFEKRTADGSEFESPKKKAKVE

SEQ ID NO: 3226 - protein, 2024 aa, synthetic construct
MPAAKRVKLDGGDKKYSIGLDIGTNSVGWAVITDEYKVPSKKFKVLGNTDRHSIKKNLIGALLFDSGETAEATRLKRTARRRYTRRKNRICYLQEIFSNEMAKVDDSFFHRLEESFLVEEDKKHERHPIFGNIVDEVAYHEKYPTIYHLRKKLVDSTDKADLRLIYLALAHMIKFRGHFLIEGDLNPDNSDVDKLFIQLVQTYNQLFEENPINASGVDAKAILSARLSKSRRLENLIAQLPGEKKNGLFGNLIALSLGLTPNFKSNFDLAEDAKLQLSKDTYDDDLDNLLAQIGDQYADLFLAAKNLSDAILLSDILRVNTEITKAPLSASMIKRYDEHHQDLTLLKALVRQQLPEKYKEIFFDQSKNGYAGYIDGGASQEEFYKFIKPILEKMDGTEELLVKLNREDLLRKQRTFDNGSIPHQIHLGELHAILRRQEDFYPFLKDNREKIEKILTFRIPYYVGPLARGNSRFAWMTRKSEETITPWNFEEVVDKGASAQSFIERMTNFDKNLPNEKVLPKHSLLYEYFTVYNELTKVKYVTEGMRKPAFLSGEQKKAIVDLLFKTNRKVTVKQLKEDYFKKIECFDSVEISGVEDRFNASLGTYHDLLKIIKDKDFLDNEENEDILEDIVLTLTLFEDREMIEERLKTYAHLFDDKVMKQLKRRRYTGWGRLSRKLINGIRDKQSGKTILDFLKSDGFANRNFMQLIHDDSLTFKEDIQKAQVSGQGDSLHEHIANLAGSPAIKKGILQTVKVVDELVKVMGRHKPENIVIEMARENQTTQKGQKNSRERMKRIEEGIKELGSQILKEHPVENTQLQNEKLYLYYLQNGRDMYVDQELDINRLSDYDVDHIVPQSFLKDDSIDNKVLTRSDKARGKSDNVPSEEVVKKMKNYWRQLLNAKLITQRKFDNLTKAERGGLSELDKAGFIKRQLVETRQITKHVAQILDSRMNTKYDENDKLIREVKVITLKSKLVSDFRKDFQFYKVREINNYHHAHDAYLNAVVGTALIKKYPKLESEFVYGDYKVYDVRKMIAKSEQEIGKATAKYFFYSNIMNFFKTEITLANGEIRKRPLIETNGETGEIVWDKGRDFATVRKVLSMPQVNIVKKTEVQTGGFSKESILPKRNSDKLIARKKDWDPKKYGGFDSPTVAYSVLVVAKVEKGKSKKLKSVKELLGITIMERSSFEKNPIDFLEAKGYKEVKKDLIIKLPKYSLFELENGRKRMLASAGELQKGNELALPSKYVNFLYLASHYEKLKGSPEDNEQKQLFVEQHKHYLDEIIEQISEFSKRVILADANLDKVLSAYNKHRDKPIREQAENIIHLFTLTNLGAPAAFKYFDTTIDRKRYTSTKEVLDATLIHQSITGLYETRIDLSQLGGDGGEAAAKGGGGGSGGGRDIMKDIKVRLMTDSPDDSQDLMIGAIESNLFADQISWKSDQPVWLNQWPLKQEKLQALQQLVTEQLQLGHLEESNSPWNTPVFVIKKKSGKWRLLQDLRAVNATMHDMGALQPGLPSPVAVPKGWEIIIIDLQDCFFNIKLHPEDCKRFAFSVPSPNFKRPYQRFQWKVLPQGMKNSPTLCQKFVDKAILTVRDKYQDSYIVHYMDDILLAHPSRSIVDEILTSMIQALNKHGLVVSTEKIQKYDNLKYLGTHIQGDSVSYQKLQIRTDKLRTLNDFQKLLGNINWIRPFLKLTTGELKPLFEILNGDSNPISTRKLTPEACKALQLMNERLSTARVKRLDLSQPWSLCILKTEYTPTACLWQDGVVEWIHLPHISPKVITPYDIFCTQLIIKGRHRSKELFSKDPDYIVVPYTKVQFDLLLQEKEDWPISLLGFLGEVHFHLPKDPLLTFTLQTAIIFPHMTSTTPLEKGIVIFTDGSANGRSVTYIQGREPIIKENTQNTAQQAEIVAVITAFEEVSQPFNLYTDSKYVTGLFPEIETATLSPRTKIYTELKHLQRLIHKRQEKFYIGHIRGHTGLPGPLAQGNAYADSLTRILTAGKRTADGSEFEKRTADGSEFESPKKKAKVE

SEQ ID NO: 3227 - protein, 2019 aa, synthetic construct
MPAAKRVKLDGGDKKYSIGLDIGTNSVGWAVITDEYKVPSKKFKVLGNTDRHSIKKNLIGALLFDSGETAEATRLKRTARRRYTRRKNRICYLQEIFSNEMAKVDDSFFHRLEESFLVEEDKKHERHPIFGNIVDEVAYHEKYPTIYHLRKKLVDSTDKADLRLIYLALAHMIKFRGHFLIEGDLNPDNSDVDKLFIQLVQTYNQLFEENPINASGVDAKAILSARLSKSRRLENLIAQLPGEKKNGLFGNLIALSLGLTPNFKSNFDLAEDAKLQLSKDTYDDDLDNLLAQIGDQYADLFLAAKNLSDAILLSDILRVNTEITKAPLSASMIKRYDEHHQDLTLLKALVRQQLPEKYKEIFFDQSKNGYAGYIDGGASQEEFYKFIKPILEKMDGTEELLVKLNREDLLRKQRTFDNGSIPHQIHLGELHAILRRQEDFYPFLKDNREKIEKILTFRIPYYVGPLARGNSRFAWMTRKSEETITPWNFEEVVDKGASAQSFIERMTNFDKNLPNEKVLPKHSLLYEYFTVYNELTKVKYVTEGMRKPAFLSGEQKKAIVDLLFKTNRKVTVKQLKEDYFKKIECFDSVEISGVEDRFNASLGTYHDLLKIIKDKDFLDNEENEDILEDIVLTLTLFEDREMIEERLKTYAHLFDDKVMKQLKRRRYTGWGRLSRKLINGIRDKQSGKTILDFLKSDGFANRNFMQLIHDDSLTFKEDIQKAQVSGQGDSLHEHIANLAGSPAIKKGILQTVKVVDELVKVMGRHKPENIVIEMARENQTTQKGQKNSRERMKRIEEGIKELGSQILKEHPVENTQLQNEKLYLYYLQNGRDMYVDQELDINRLSDYDVDHIVPQSFLKDDSIDNKVLTRSDKARGKSDNVPSEEVVKKMKNYWRQLLNAKLITQRKFDNLTKAERGGLSELDKAGFIKRQLVETRQITKHVAQILDSRMNTKYDENDKLIREVKVITLKSKLVSDFRKDFQFYKVREINNYHHAHDAYLNAVVGTALIKKYPKLESEFVYGDYKVYDVRKMIAKSEQEIGKATAKYFFYSNIMNFFKTEITLANGEIRKRPLIETNGETGEIVWDKGRDFATVRKVLSMPQVNIVKKTEVQTGGFSKESILPKRNSDKLIARKKDWDPKKYGGFDSPTVAYSVLVVAKVEKGKSKKLKSVKELLGITIMERSSFEKNPIDFLEAKGYKEVKKDLIIKLPKYSLFELENGRKRMLASAGELQKGNELALPSKYVNFLYLASHYEKLKGSPEDNEQKQLFVEQHKHYLDEIIEQISEFSKRVILADANLDKVLSAYNKHRDKPIREQAENIIHLFTLTNLGAPAAFKYFDTTIDRKRYTSTKEVLDATLIHQSITGLYETRIDLSQLGGDGGGGSPAPGGGRDIMKDIKVRLMTDSPDDSQDLMIGAIESNLFADQISWKSDQPVWLNQWPLKQEKLQALQQLVTEQLQLGHLEESNSPWNTPVFVIKKKSGKWRLLQDLRAVNATMHDMGALQPGLPSPVAVPKGWEIIIIDLQDCFFNIKLHPEDCKRFAFSVPSPNFKRPYQRFQWKVLPQGMKNSPTLCQKFVDKAILTVRDKYQDSYIVHYMDDILLAHPSRSIVDEILTSMIQALNKHGLVVSTEKIQKYDNLKYLGTHIQGDSVSYQKLQIRTDKLRTLNDFQKLLGNINWIRPFLKLTTGELKPLFEILNGDSNPISTRKLTPEACKALQLMNERLSTARVKRLDLSQPWSLCILKTEYTPTACLWQDGVVEWIHLPHISPKVITPYDIFCTQLIIKGRHRSKELFSKDPDYIVVPYTKVQFDLLLQEKEDWPISLLGFLGEVHFHLPKDPLLTFTLQTAIIFPHMTSTTPLEKGIVIFTDGSANGRSVTYIQGREPIIKENTQNTAQQAEIVAVITAFEEVSQPFNLYTDSKYVTGLFPEIETATLSPRTKIYTELKHLQRLIHKRQEKFYIGHIRGHTGLPGPLAQGNAYADSLTRILTAGKRTADGSEFEKRTADGSEFESPKKKAKVE

SEQ ID NO: 3228 - protein, 2024 aa, synthetic construct
MPAAKRVKLDGGDKKYSIGLDIGTNSVGWAVITDEYKVPSKKFKVLGNTDRHSIKKNLIGALLFDSGETAEATRLKRTARRRYTRRKNRICYLQEIFSNEMAKVDDSFFHRLEESFLVEEDKKHERHPIFGNIVDEVAYHEKYPTIYHLRKKLVDSTDKADLRLIYLALAHMIKFRGHFLIEGDLNPDNSDVDKLFIQLVQTYNQLFEENPINASGVDAKAILSARLSKSRRLENLIAQLPGEKKNGLFGNLIALSLGLTPNFKSNFDLAEDAKLQLSKDTYDDDLDNLLAQIGDQYADLFLAAKNLSDAILLSDILRVNTEITKAPLSASMIKRYDEHHQDLTLLKALVRQQLPEKYKEIFFDQSKNGYAGYIDGGASQEEFYKFIKPILEKMDGTEELLVKLNREDLLRKQRTFDNGSIPHQIHLGELHAILRRQEDFYPFLKDNREKIEKILTFRIPYYVGPLARGNSRFAWMTRKSEETITPWNFEEVVDKGASAQSFIERMTNFDKNLPNEKVLPKHSLLYEYFTVYNELTKVKYVTEGMRKPAFLSGEQKKAIVDLLFKTNRKVTVKQLKEDYFKKIECFDSVEISGVEDRFNASLGTYHDLLKIIKDKDFLDNEENEDILEDIVLTLTLFEDREMIEERLKTYAHLFDDKVMKQLKRRRYTGWGRLSRKLINGIRDKQSGKTILDFLKSDGFANRNFMQLIHDDSLTFKEDIQKAQVSGQGDSLHEHIANLAGSPAIKKGILQTVKVVDELVKVMGRHKPENIVIEMARENQTTQKGQKNSRERMKRIEEGIKELGSQILKEHPVENTQLQNEKLYLYYLQNGRDMYVDQELDINRLSDYDVDHIVPQSFLKDDSIDNKVLTRSDKARGKSDNVPSEEVVKKMKNYWRQLLNAKLITQRKFDNLTKAERGGLSELDKAGFIKRQLVETRQITKHVAQILDSRMNTKYDENDKLIREVKVITLKSKLVSDFRKDFQFYKVREINNYHHAHDAYLNAVVGTALIKKYPKLESEFVYGDYKVYDVRKMIAKSEQEIGKATAKYFFYSNIMNFFKTEITLANGEIRKRPLIETNGETGEIVWDKGRDFATVRKVLSMPQVNIVKKTEVQTGGFSKESILPKRNSDKLIARKKDWDPKKYGGFDSPTVAYSVLVVAKVEKGKSKKLKSVKELLGITIMERSSFEKNPIDFLEAKGYKEVKKDLIIKLPKYSLFELENGRKRMLASAGELQKGNELALPSKYVNFLYLASHYEKLKGSPEDNEQKQLFVEQHKHYLDEIIEQISEFSKRVILADANLDKVLSAYNKHRDKPIREQAENIIHLFTLTNLGAPAAFKYFDTTIDRKRYTSTKEVLDATLIHQSITGLYETRIDLSQLGGDGGEAAAKGGSGGGGGGRDIMKDIKVRLMTDSPDDSQDLMIGAIESNLFADQISWKSDQPVWLNQWPLKQEKLQALQQLVTEQLQLGHLEESNSPWNTPVFVIKKKSGKWRLLQDLRAVNATMHDMGALQPGLPSPVAVPKGWEIIIIDLQDCFFNIKLHPEDCKRFAFSVPSPNFKRPYQRFQWKVLPQGMKNSPTLCQKFVDKAILTVRDKYQDSYIVHYMDDILLAHPSRSIVDEILTSMIQALNKHGLVVSTEKIQKYDNLKYLGTHIQGDSVSYQKLQIRTDKLRTLNDFQKLLGNINWIRPFLKLTTGELKPLFEILNGDSNPISTRKLTPEACKALQLMNERLSTARVKRLDLSQPWSLCILKTEYTPTACLWQDGVVEWIHLPHISPKVITPYDIFCTQLIIKGRHRSKELFSKDPDYIVVPYTKVQFDLLLQEKEDWPISLLGFLGEVHFHLPKDPLLTFTLQTAIIFPHMTSTTPLEKGIVIFTDGSANGRSVTYIQGREPIIKENTQNTAQQAEIVAVITAFEEVSQPFNLYTDSKYVTGLFPEIETATLSPRTKIYTELKHLQRLIHKRQEKFYIGHIRGHTGLPGPLAQGNAYADSLTRILTAGKRTADGSEFEKRTADGSEFESPKKKAKVE

SEQ ID NO: 3229 - protein, 2022 aa, synthetic construct
MPAAKRVKLDGGDKKYSIGLDIGTNSVGWAVITDEYKVPSKKFKVLGNTDRHSIKKNLIGALLFDSGETAEATRLKRTARRRYTRRKNRICYLQEIFSNEMAKVDDSFFHRLEESFLVEEDKKHERHPIFGNIVDEVAYHEKYPTIYHLRKKLVDSTDKADLRLIYLALAHMIKFRGHFLIEGDLNPDNSDVDKLFIQLVQTYNQLFEENPINASGVDAKAILSARLSKSRRLENLIAQLPGEKKNGLFGNLIALSLGLTPNFKSNFDLAEDAKLQLSKDTYDDDLDNLLAQIGDQYADLFLAAKNLSDAILLSDILRVNTEITKAPLSASMIKRYDEHHQDLTLLKALVRQQLPEKYKEIFFDQSKNGYAGYIDGGASQEEFYKFIKPILEKMDGTEELLVKLNREDLLRKQRTFDNGSIPHQIHLGELHAILRRQEDFYPFLKDNREKIEKILTFRIPYYVGPLARGNSRFAWMTRKSEETITPWNFEEVVDKGASAQSFIERMTNFDKNLPNEKVLPKHSLLYEYFTVYNELTKVKYVTEGMRKPAFLSGEQKKAIVDLLFKTNRKVTVKQLKEDYFKKIECFDSVEISGVEDRFNASLGTYHDLLKIIKDKDFLDNEENEDILEDIVLTLTLFEDREMIEERLKTYAHLFDDKVMKQLKRRRYTGWGRLSRKLINGIRDKQSGKTILDFLKSDGFANRNFMQLIHDDSLTFKEDIQKAQVSGQGDSLHEHIANLAGSPAIKKGILQTVKVVDELVKVMGRHKPENIVIEMARENQTTQKGQKNSRERMKRIEEGIKELGSQILKEHPVENTQLQNEKLYLYYLQNGRDMYVDQELDINRLSDYDVDHIVPQSFLKDDSIDNKVLTRSDKARGKSDNVPSEEVVKKMKNYWRQLLNAKLITQRKFDNLTKAERGGLSELDKAGFIKRQLVETRQITKHVAQILDSRMNTKYDENDKLIREVKVITLKSKLVSDFRKDFQFYKVREINNYHHAHDAYLNAVVGTALIKKYPKLESEFVYGDYKVYDVRKMIAKSEQEIGKATAKYFFYSNIMNFFKTEITLANGEIRKRPLIETNGETGEIVWDKGRDFATVRKVLSMPQVNIVKKTEVQTGGFSKESILPKRNSDKLIARKKDWDPKKYGGFDSPTVAYSVLVVAKVEKGKSKKLKSVKELLGITIMERSSFEKNPIDFLEAKGYKEVKKDLIIKLPKYSLFELENGRKRMLASAGELQKGNELALPSKYVNFLYLASHYEKLKGSPEDNEQKQLFVEQHKHYLDEIIEQISEFSKRVILADANLDKVLSAYNKHRDKPIREQAENIIHLFTLTNLGAPAAFKYFDTTIDRKRYTSTKEVLDATLIHQSITGLYETRIDLSQLGGDGGGGSPAPGSSGGGRDIMKDIKVRLMTDSPDDSQDLMIGAIESNLFADQISWKSDQPVWLNQWPLKQEKLQALQQLVTEQLQLGHLEESNSPWNTPVFVIKKKSGKWRLLQDLRAVNATMHDMGALQPGLPSPVAVPKGWEIIIIDLQDCFFNIKLHPEDCKRFAFSVPSPNFKRPYQRFQWKVLPQGMKNSPTLCQKFVDKAILTVRDKYQDSYIVHYMDDILLAHPSRSIVDEILTSMIQALNKHGLVVSTEKIQKYDNLKYLGTHIQGDSVSYQKLQIRTDKLRTLNDFQKLLGNINWIRPFLKLTTGELKPLFEILNGDSNPISTRKLTPEACKALQLMNERLSTARVKRLDLSQPWSLCILKTEYTPTACLWQDGVVEWIHLPHISPKVITPYDIFCTQLIIKGRHRSKELFSKDPDYIVVPYTKVQFDLLLQEKEDWPISLLGFLGEVHFHLPKDPLLTFTLQTAIIFPHMTSTTPLEKGIVIFTDGSANGRSVTYIQGREPIIKENTQNTAQQAEIVAVITAFEEVSQPFNLYTDSKYVTGLFPEIETATLSPRTKIYTELKHLQRLIHKRQEKFYIGHIRGHTGLPGPLAQGNAYADSLTRILTAGKRTADGSEFEKRTADGSEFESPKKKAKVE

SEQ ID NO: 3230 - protein, 2024 aa, synthetic construct
MPAAKRVKLDGGDKKYSIGLDIGTNSVGWAVITDEYKVPSKKFKVLGNTDRHSIKKNLIGALLFDSGETAEATRLKRTARRRYTRRKNRICYLQEIFSNEMAKVDDSFFHRLEESFLVEEDKKHERHPIFGNIVDEVAYHEKYPTIYHLRKKLVDSTDKADLRLIYLALAHMIKFRGHFLIEGDLNPDNSDVDKLFIQLVQTYNQLFEENPINASGVDAKAILSARLSKSRRLENLIAQLPGEKKNGLFGNLIALSLGLTPNFKSNFDLAEDAKLQLSKDTYDDDLDNLLAQIGDQYADLFLAAKNLSDAILLSDILRVNTEITKAPLSASMIKRYDEHHQDLTLLKALVRQQLPEKYKEIFFDQSKNGYAGYIDGGASQEEFYKFIKPILEKMDGTEELLVKLNREDLLRKQRTFDNGSIPHQIHLGELHAILRRQEDFYPFLKDNREKIEKILTFRIPYYVGPLARGNSRFAWMTRKSEETITPWNFEEVVDKGASAQSFIERMTNFDKNLPNEKVLPKHSLLYEYFTVYNELTKVKYVTEGMRKPAFLSGEQKKAIVDLLFKTNRKVTVKQLKEDYFKKIECFDSVEISGVEDRFNASLGTYHDLLKIIKDKDFLDNEENEDILEDIVLTLTLFEDREMIEERLKTYAHLFDDKVMKQLKRRRYTGWGRLSRKLINGIRDKQSGKTILDFLKSDGFANRNFMQLIHDDSLTFKEDIQKAQVSGQGDSLHEHIANLAGSPAIKKGILQTVKVVDELVKVMGRHKPENIVIEMARENQTTQKGQKNSRERMKRIEEGIKELGSQILKEHPVENTQLQNEKLYLYYLQNGRDMYVDQELDINRLSDYDVDHIVPQSFLKDDSIDNKVLTRSDKARGKSDNVPSEEVVKKMKNYWRQLLNAKLITQRKFDNLTKAERGGLSELDKAGFIKRQLVETRQITKHVAQILDSRMNTKYDENDKLIREVKVITLKSKLVSDFRKDFQFYKVREINNYHHAHDAYLNAVVGTALIKKYPKLESEFVYGDYKVYDVRKMIAKSEQEIGKATAKYFFYSNIMNFFKTEITLANGEIRKRPLIETNGETGEIVWDKGRDFATVRKVLSMPQVNIVKKTEVQTGGFSKESILPKRNSDKLIARKKDWDPKKYGGFDSPTVAYSVLVVAKVEKGKSKKLKSVKELLGITIMERSSFEKNPIDFLEAKGYKEVKKDLIIKLPKYSLFELENGRKRMLASAGELQKGNELALPSKYVNFLYLASHYEKLKGSPEDNEQKQLFVEQHKHYLDEIIEQISEFSKRVILADANLDKVLSAYNKHRDKPIREQAENIIHLFTLTNLGAPAAFKYFDTTIDRKRYTSTKEVLDATLIHQSITGLYETRIDLSQLGGDGGEAAAKGGSGSSGGGRDIMKDIKVRLMTDSPDDSQDLMIGAIESNLFADQISWKSDQPVWLNQWPLKQEKLQALQQLVTEQLQLGHLEESNSPWNTPVFVIKKKSGKWRLLQDLRAVNATMHDMGALQPGLPSPVAVPKGWEIIIIDLQDCFFNIKLHPEDCKRFAFSVPSPNFKRPYQRFQWKVLPQGMKNSPTLCQKFVDKAILTVRDKYQDSYIVHYMDDILLAHPSRSIVDEILTSMIQALNKHGLVVSTEKIQKYDNLKYLGTHIQGDSVSYQKLQIRTDKLRTLNDFQKLLGNINWIRPFLKLTTGELKPLFEILNGDSNPISTRKLTPEACKALQLMNERLSTARVKRLDLSQPWSLCILKTEYTPTACLWQDGVVEWIHLPHISPKVITPYDIFCTQLIIKGRHRSKELFSKDPDYIVVPYTKVQFDLLLQEKEDWPISLLGFLGEVHFHLPKDPLLTFTLQTAIIFPHMTSTTPLEKGIVIFTDGSANGRSVTYIQGREPIIKENTQNTAQQAEIVAVITAFEEVSQPFNLYTDSKYVTGLFPEIETATLSPRTKIYTELKHLQRLIHKRQEKFYIGHIRGHTGLPGPLAQGNAYADSLTRILTAGKRTADGSEFEKRTADGSEFESPKKKAKVE

SEQ ID NO: 3231 - protein, 2022 aa, synthetic construct
MPAAKRVKLDGGDKKYSIGLDIGTNSVGWAVITDEYKVPSKKFKVLGNTDRHSIKKNLIGALLFDSGETAEATRLKRTARRRYTRRKNRICYLQEIFSNEMAKVDDSFFHRLEESFLVEEDKKHERHPIFGNIVDEVAYHEKYPTIYHLRKKLVDSTDKADLRLIYLALAHMIKFRGHFLIEGDLNPDNSDVDKLFIQLVQTYNQLFEENPINASGVDAKAILSARLSKSRRLENLIAQLPGEKKNGLFGNLIALSLGLTPNFKSNFDLAEDAKLQLSKDTYDDDLDNLLAQIGDQYADLFLAAKNLSDAILLSDILRVNTEITKAPLSASMIKRYDEHHQDLTLLKALVRQQLPEKYKEIFFDQSKNGYAGYIDGGASQEEFYKFIKPILEKMDGTEELLVKLNREDLLRKQRTFDNGSIPHQIHLGELHAILRRQEDFYPFLKDNREKIEKILTFRIPYYVGPLARGNSRFAWMTRKSEETITPWNFEEVVDKGASAQSFIERMTNFDKNLPNEKVLPKHSLLYEYFTVYNELTKVKYVTEGMRKPAFLSGEQKKAIVDLLFKTNRKVTVKQLKEDYFKKIECFDSVEISGVEDRFNASLGTYHDLLKIIKDKDFLDNEENEDILEDIVLTLTLFEDREMIEERLKTYAHLFDDKVMKQLKRRRYTGWGRLSRKLINGIRDKQSGKTILDFLKSDGFANRNFMQLIHDDSLTFKEDIQKAQVSGQGDSLHEHIANLAGSPAIKKGILQTVKVVDELVKVMGRHKPENIVIEMARENQTTQKGQKNSRERMKRIEEGIKELGSQILKEHPVENTQLQNEKLYLYYLQNGRDMYVDQELDINRLSDYDVDHIVPQSFLKDDSIDNKVLTRSDKARGKSDNVPSEEVVKKMKNYWRQLLNAKLITQRKFDNLTKAERGGLSELDKAGFIKRQLVETRQITKHVAQILDSRMNTKYDENDKLIREVKVITLKSKLVSDFRKDFQFYKVREINNYHHAHDAYLNAVVGTALIKKYPKLESEFVYGDYKVYDVRKMIAKSEQEIGKATAKYFFYSNIMNFFKTEITLANGEIRKRPLIETNGETGEIVWDKGRDFATVRKVLSMPQVNIVKKTEVQTGGFSKESILPKRNSDKLIARKKDWDPKKYGGFDSPTVAYSVLVVAKVEKGKSKKLKSVKELLGITIMERSSFEKNPIDFLEAKGYKEVKKDLIIKLPKYSLFELENGRKRMLASAGELQKGNELALPSKYVNFLYLASHYEKLKGSPEDNEQKQLFVEQHKHYLDEIIEQISEFSKRVILADANLDKVLSAYNKHRDKPIREQAENIIHLFTLTNLGAPAAFKYFDTTIDRKRYTSTKEVLDATLIHQSITGLYETRIDLSQLGGDGGGGGGSSPAPGGGRDIMKDIKVRLMTDSPDDSQDLMIGAIESNLFADQISWKSDQPVWLNQWPLKQEKLQALQQLVTEQLQLGHLEESNSPWNTPVFVIKKKSGKWRLLQDLRAVNATMHDMGALQPGLPSPVAVPKGWEIIIIDLQDCFFNIKLHPEDCKRFAFSVPSPNFKRPYQRFQWKVLPQGMKNSPTLCQKFVDKAILTVRDKYQDSYIVHYMDDILLAHPSRSIVDEILTSMIQALNKHGLVVSTEKIQKYDNLKYLGTHIQGDSVSYQKLQIRTDKLRTLNDFQKLLGNINWIRPFLKLTTGELKPLFEILNGDSNPISTRKLTPEACKALQLMNERLSTARVKRLDLSQPWSLCILKTEYTPTACLWQDGVVEWIHLPHISPKVITPYDIFCTQLIIKGRHRSKELFSKDPDYIVVPYTKVQFDLLLQEKEDWPISLLGFLGEVHFHLPKDPLLTFTLQTAIIFPHMTSTTPLEKGIVIFTDGSANGRSVTYIQGREPIIKENTQNTAQQAEIVAVITAFEEVSQPFNLYTDSKYVTGLFPEIETATLSPRTKIYTELKHLQRLIHKRQEKFYIGHIRGHTGLPGPLAQGNAYADSLTRILTAGKRTADGSEFEKRTADGSEFESPKKKAKVE

SEQ ID NO: 3232 - protein, 2024 aa, synthetic construct
MPAAKRVKLDGGDKKYSIGLDIGTNSVGWAVITDEYKVPSKKFKVLGNTDRHSIKKNLIGALLFDSGETAEATRLKRTARRRYTRRKNRICYLQEIFSNEMAKVDDSFFHRLEESFLVEEDKKHERHPIFGNIVDEVAYHEKYPTIYHLRKKLVDSTDKADLRLIYLALAHMIKFRGHFLIEGDLNPDNSDVDKLFIQLVQTYNQLFEENPINASGVDAKAILSARLSKSRRLENLIAQLPGEKKNGLFGNLIALSLGLTPNFKSNFDLAEDAKLQLSKDTYDDDLDNLLAQIGDQYADLFLAAKNLSDAILLSDILRVNTEITKAPLSASMIKRYDEHHQDLTLLKALVRQQLPEKYKEIFFDQSKNGYAGYIDGGASQEEFYKFIKPILEKMDGTEELLVKLNREDLLRKQRTFDNGSIPHQIHLGELHAILRRQEDFYPFLKDNREKIEKILTFRIPYYVGPLARGNSRFAWMTRKSEETITPWNFEEVVDKGASAQSFIERMTNFDKNLPNEKVLPKHSLLYEYFTVYNELTKVKYVTEGMRKPAFLSGEQKKAIVDLLFKTNRKVTVKQLKEDYFKKIECFDSVEISGVEDRFNASLGTYHDLLKIIKDKDFLDNEENEDILEDIVLTLTLFEDREMIEERLKTYAHLFDDKVMKQLKRRRYTGWGRLSRKLINGIRDKQSGKTILDFLKSDGFANRNFMQLIHDDSLTFKEDIQKAQVSGQGDSLHEHIANLAGSPAIKKGILQTVKVVDELVKVMGRHKPENIVIEMARENQTTQKGQKNSRERMKRIEEGIKELGSQILKEHPVENTQLQNEKLYLYYLQNGRDMYVDQELDINRLSDYDVDHIVPQSFLKDDSIDNKVLTRSDKARGKSDNVPSEEVVKKMKNYWRQLLNAKLITQRKFDNLTKAERGGLSELDKAGFIKRQLVETRQITKHVAQILDSRMNTKYDENDKLIREVKVITLKSKLVSDFRKDFQFYKVREINNYHHAHDAYLNAVVGTALIKKYPKLESEFVYGDYKVYDVRKMIAKSEQEIGKATAKYFFYSNIMNFFKTEITLANGEIRKRPLIETNGETGEIVWDKGRDFATVRKVLSMPQVNIVKKTEVQTGGFSKESILPKRNSDKLIARKKDWDPKKYGGFDSPTVAYSVLVVAKVEKGKSKKLKSVKELLGITIMERSSFEKNPIDFLEAKGYKEVKKDLIIKLPKYSLFELENGRKRMLASAGELQKGNELALPSKYVNFLYLASHYEKLKGSPEDNEQKQLFVEQHKHYLDEIIEQISEFSKRVILADANLDKVLSAYNKHRDKPIREQAENIIHLFTLTNLGAPAAFKYFDTTIDRKRYTSTKEVLDATLIHQSITGLYETRIDLSQLGGDGGGSSPAPEAAAKGGGRDIMKDIKVRLMTDSPDDSQDLMIGAIESNLFADQISWKSDQPVWLNQWPLKQEKLQALQQLVTEQLQLGHLEESNSPWNTPVFVIKKKSGKWRLLQDLRAVNATMHDMGALQPGLPSPVAVPKGWEIIIIDLQDCFFNIKLHPEDCKRFAFSVPSPNFKRPYQRFQWKVLPQGMKNSPTLCQKFVDKAILTVRDKYQDSYIVHYMDDILLAHPSRSIVDEILTSMIQALNKHGLVVSTEKIQKYDNLKYLGTHIQGDSVSYQKLQIRTDKLRTLNDFQKLLGNINWIRPFLKLTTGELKPLFEILNGDSNPISTRKLTPEACKALQLMNERLSTARVKRLDLSQPWSLCILKTEYTPTACLWQDGVVEWIHLPHISPKVITPYDIFCTQLIIKGRHRSKELFSKDPDYIVVPYTKVQFDLLLQEKEDWPISLLGFLGEVHFHLPKDPLLTFTLQTAIIFPHMTSTTPLEKGIVIFTDGSANGRSVTYIQGREPIIKENTQNTAQQAEIVAVITAFEEVSQPFNLYTDSKYVTGLFPEIETATLSPRTKIYTELKHLQRLIHKRQEKFYIGHIRGHTGLPGPLAQGNAYADSLTRILTAGKRTADGSEFEKRTADGSEFESPKKKAKVE

SEQ ID NO: 3233 - protein, 2022 aa, synthetic construct
MPAAKRVKLDGGDKKYSIGLDIGTNSVGWAVITDEYKVPSKKFKVLGNTDRHSIKKNLIGALLFDSGETAEATRLKRTARRRYTRRKNRICYLQEIFSNEMAKVDDSFFHRLEESFLVEEDKKHERHPIFGNIVDEVAYHEKYPTIYHLRKKLVDSTDKADLRLIYLALAHMIKFRGHFLIEGDLNPDNSDVDKLFIQLVQTYNQLFEENPINASGVDAKAILSARLSKSRRLENLIAQLPGEKKNGLFGNLIALSLGLTPNFKSNFDLAEDAKLQLSKDTYDDDLDNLLAQIGDQYADLFLAAKNLSDAILLSDILRVNTEITKAPLSASMIKRYDEHHQDLTLLKALVRQQLPEKYKEIFFDQSKNGYAGYIDGGASQEEFYKFIKPILEKMDGTEELLVKLNREDLLRKQRTFDNGSIPHQIHLGELHAILRRQEDFYPFLKDNREKIEKILTFRIPYYVGPLARGNSRFAWMTRKSEETITPWNFEEVVDKGASAQSFIERMTNFDKNLPNEKVLPKHSLLYEYFTVYNELTKVKYVTEGMRKPAFLSGEQKKAIVDLLFKTNRKVTVKQLKEDYFKKIECFDSVEISGVEDRFNASLGTYHDLLKIIKDKDFLDNEENEDILEDIVLTLTLFEDREMIEERLKTYAHLFDDKVMKQLKRRRYTGWGRLSRKLINGIRDKQSGKTILDFLKSDGFANRNFMQLIHDDSLTFKEDIQKAQVSGQGDSLHEHIANLAGSPAIKKGILQTVKVVDELVKVMGRHKPENIVIEMARENQTTQKGQKNSRERMKRIEEGIKELGSQILKEHPVENTQLQNEKLYLYYLQNGRDMYVDQELDINRLSDYDVDHIVPQSFLKDDSIDNKVLTRSDKARGKSDNVPSEEVVKKMKNYWRQLLNAKLITQRKFDNLTKAERGGLSELDKAGFIKRQLVETRQITKHVAQILDSRMNTKYDENDKLIREVKVITLKSKLVSDFRKDFQFYKVREINNYHHAHDAYLNAVVGTALIKKYPKLESEFVYGDYKVYDVRKMIAKSEQEIGKATAKYFFYSNIMNFFKTEITLANGEIRKRPLIETNGETGEIVWDKGRDFATVRKVLSMPQVNIVKKTEVQTGGFSKESILPKRNSDKLIARKKDWDPKKYGGFDSPTVAYSVLVVAKVEKGKSKKLKSVKELLGITIMERSSFEKNPIDFLEAKGYKEVKKDLIIKLPKYSLFELENGRKRMLASAGELQKGNELALPSKYVNFLYLASHYEKLKGSPEDNEQKQLFVEQHKHYLDEIIEQISEFSKRVILADANLDKVLSAYNKHRDKPIREQAENIIHLFTLTNLGAPAAFKYFDTTIDRKRYTSTKEVLDATLIHQSITGLYETRIDLSQLGGDGGPAPGGGGSSGGGRDIMKDIKVRLMTDSPDDSQDLMIGAIESNLFADQISWKSDQPVWLNQWPLKQEKLQALQQLVTEQLQLGHLEESNSPWNTPVFVIKKKSGKWRLLQDLRAVNATMHDMGALQPGLPSPVAVPKGWEIIIIDLQDCFFNIKLHPEDCKRFAFSVPSPNFKRPYQRFQWKVLPQGMKNSPTLCQKFVDKAILTVRDKYQDSYIVHYMDDILLAHPSRSIVDEILTSMIQALNKHGLVVSTEKIQKYDNLKYLGTHIQGDSVSYQKLQIRTDKLRTLNDFQKLLGNINWIRPFLKLTTGELKPLFEILNGDSNPISTRKLTPEACKALQLMNERLSTARVKRLDLSQPWSLCILKTEYTPTACLWQDGVVEWIHLPHISPKVITPYDIFCTQLIIKGRHRSKELFSKDPDYIVVPYTKVQFDLLLQEKEDWPISLLGFLGEVHFHLPKDPLLTFTLQTAIIFPHMTSTTPLEKGIVIFTDGSANGRSVTYIQGREPIIKENTQNTAQQAEIVAVITAFEEVSQPFNLYTDSKYVTGLFPEIETATLSPRTKIYTELKHLQRLIHKRQEKFYIGHIRGHTGLPGPLAQGNAYADSLTRILTAGKRTADGSEFEKRTADGSEFESPKKKAKVE

SEQ ID NO: 3234 - protein, 2022 aa, synthetic construct
MPAAKRVKLDGGDKKYSIGLDIGTNSVGWAVITDEYKVPSKKFKVLGNTDRHSIKKNLIGALLFDSGETAEATRLKRTARRRYTRRKNRICYLQEIFSNEMAKVDDSFFHRLEESFLVEEDKKHERHPIFGNIVDEVAYHEKYPTIYHLRKKLVDSTDKADLRLIYLALAHMIKFRGHFLIEGDLNPDNSDVDKLFIQLVQTYNQLFEENPINASGVDAKAILSARLSKSRRLENLIAQLPGEKKNGLFGNLIALSLGLTPNFKSNFDLAEDAKLQLSKDTYDDDLDNLLAQIGDQYADLFLAAKNLSDAILLSDILRVNTEITKAPLSASMIKRYDEHHQDLTLLKALVRQQLPEKYKEIFFDQSKNGYAGYIDGGASQEEFYKFIKPILEKMDGTEELLVKLNREDLLRKQRTFDNGSIPHQIHLGELHAILRRQEDFYPFLKDNREKIEKILTFRIPYYVGPLARGNSRFAWMTRKSEETITPWNFEEVVDKGASAQSFIERMTNFDKNLPNEKVLPKHSLLYEYFTVYNELTKVKYVTEGMRKPAFLSGEQKKAIVDLLFKTNRKVTVKQLKEDYFKKIECFDSVEISGVEDRFNASLGTYHDLLKIIKDKDFLDNEENEDILEDIVLTLTLFEDREMIEERLKTYAHLFDDKVMKQLKRRRYTGWGRLSRKLINGIRDKQSGKTILDFLKSDGFANRNFMQLIHDDSLTFKEDIQKAQVSGQGDSLHEHIANLAGSPAIKKGILQTVKVVDELVKVMGRHKPENIVIEMARENQTTQKGQKNSRERMKRIEEGIKELGSQILKEHPVENTQLQNEKLYLYYLQNGRDMYVDQELDINRLSDYDVDHIVPQSFLKDDSIDNKVLTRSDKARGKSDNVPSEEVVKKMKNYWRQLLNAKLITQRKFDNLTKAERGGLSELDKAGFIKRQLVETRQITKHVAQILDSRMNTKYDENDKLIREVKVITLKSKLVSDFRKDFQFYKVREINNYHHAHDAYLNAVVGTALIKKYPKLESEFVYGDYKVYDVRKMIAKSEQEIGKATAKYFFYSNIMNFFKTEITLANGEIRKRPLIETNGETGEIVWDKGRDFATVRKVLSMPQVNIVKKTEVQTGGFSKESILPKRNSDKLIARKKDWDPKKYGGFDSPTVAYSVLVVAKVEKGKSKKLKSVKELLGITIMERSSFEKNPIDFLEAKGYKEVKKDLIIKLPKYSLFELENGRKRMLASAGELQKGNELALPSKYVNFLYLASHYEKLKGSPEDNEQKQLFVEQHKHYLDEIIEQISEFSKRVILADANLDKVLSAYNKHRDKPIREQAENIIHLFTLTNLGAPAAFKYFDTTIDRKRYTSTKEVLDATLIHQSITGLYETRIDLSQLGGDGGPAPGGSGGGGGGRDIMKDIKVRLMTDSPDDSQDLMIGAIESNLFADQISWKSDQPVWLNQWPLKQEKLQALQQLVTEQLQLGHLEESNSPWNTPVFVIKKKSGKWRLLQDLRAVNATMHDMGALQPGLPSPVAVPKGWEIIIIDLQDCFFNIKLHPEDCKRFAFSVPSPNFKRPYQRFQWKVLPQGMKNSPTLCQKFVDKAILTVRDKYQDSYIVHYMDDILLAHPSRSIVDEILTSMIQALNKHGLVVSTEKIQKYDNLKYLGTHIQGDSVSYQKLQIRTDKLRTLNDFQKLLGNINWIRPFLKLTTGELKPLFEILNGDSNPISTRKLTPEACKALQLMNERLSTARVKRLDLSQPWSLCILKTEYTPTACLWQDGVVEWIHLPHISPKVITPYDIFCTQLIIKGRHRSKELFSKDPDYIVVPYTKVQFDLLLQEKEDWPISLLGFLGEVHFHLPKDPLLTFTLQTAIIFPHMTSTTPLEKGIVIFTDGSANGRSVTYIQGREPIIKENTQNTAQQAEIVAVITAFEEVSQPFNLYTDSKYVTGLFPEIETATLSPRTKIYTELKHLQRLIHKRQEKFYIGHIRGHTGLPGPLAQGNAYADSLTRILTAGKRTADGSEFEKRTADGSEFESPKKKAKVE

SEQ ID NO: 3235 - protein, 2024 aa, synthetic construct
MPAAKRVKLDGGDKKYSIGLDIGTNSVGWAVITDEYKVPSKKFKVLGNTDRHSIKKNLIGALLFDSGETAEATRLKRTARRRYTRRKNRICYLQEIFSNEMAKVDDSFFHRLEESFLVEEDKKHERHPIFGNIVDEVAYHEKYPTIYHLRKKLVDSTDKADLRLIYLALAHMIKFRGHFLIEGDLNPDNSDVDKLFIQLVQTYNQLFEENPINASGVDAKAILSARLSKSRRLENLIAQLPGEKKNGLFGNLIALSLGLTPNFKSNFDLAEDAKLQLSKDTYDDDLDNLLAQIGDQYADLFLAAKNLSDAILLSDILRVNTEITKAPLSASMIKRYDEHHQDLTLLKALVRQQLPEKYKEIFFDQSKNGYAGYIDGGASQEEFYKFIKPILEKMDGTEELLVKLNREDLLRKQRTFDNGSIPHQIHLGELHAILRRQEDFYPFLKDNREKIEKILTFRIPYYVGPLARGNSRFAWMTRKSEETITPWNFEEVVDKGASAQSFIERMTNFDKNLPNEKVLPKHSLLYEYFTVYNELTKVKYVTEGMRKPAFLSGEQKKAIVDLLFKTNRKVTVKQLKEDYFKKIECFDSVEISGVEDRFNASLGTYHDLLKIIKDKDFLDNEENEDILEDIVLTLTLFEDREMIEERLKTYAHLFDDKVMKQLKRRRYTGWGRLSRKLINGIRDKQSGKTILDFLKSDGFANRNFMQLIHDDSLTFKEDIQKAQVSGQGDSLHEHIANLAGSPAIKKGILQTVKVVDELVKVMGRHKPENIVIEMARENQTTQKGQKNSRERMKRIEEGIKELGSQILKEHPVENTQLQNEKLYLYYLQNGRDMYVDQELDINRLSDYDVDHIVPQSFLKDDSIDNKVLTRSDKARGKSDNVPSEEVVKKMKNYWRQLLNAKLITQRKFDNLTKAERGGLSELDKAGFIKRQLVETRQITKHVAQILDSRMNTKYDENDKLIREVKVITLKSKLVSDFRKDFQFYKVREINNYHHAHDAYLNAVVGTALIKKYPKLESEFVYGDYKVYDVRKMIAKSEQEIGKATAKYFFYSNIMNFFKTEITLANGEIRKRPLIETNGETGEIVWDKGRDFATVRKVLSMPQVNIVKKTEVQTGGFSKESILPKRNSDKLIARKKDWDPKKYGGFDSPTVAYSVLVVAKVEKGKSKKLKSVKELLGITIMERSSFEKNPIDFLEAKGYKEVKKDLIIKLPKYSLFELENGRKRMLASAGELQKGNELALPSKYVNFLYLASHYEKLKGSPEDNEQKQLFVEQHKHYLDEIIEQISEFSKRVILADANLDKVLSAYNKHRDKPIREQAENIIHLFTLTNLGAPAAFKYFDTTIDRKRYTSTKEVLDATLIHQSITGLYETRIDLSQLGGDGGGGSEAAAKGGGGGGRDIMKDIKVRLMTDSPDDSQDLMIGAIESNLFADQISWKSDQPVWLNQWPLKQEKLQALQQLVTEQLQLGHLEESNSPWNTPVFVIKKKSGKWRLLQDLRAVNATMHDMGALQPGLPSPVAVPKGWEIIIIDLQDCFFNIKLHPEDCKRFAFSVPSPNFKRPYQRFQWKVLPQGMKNSPTLCQKFVDKAILTVRDKYQDSYIVHYMDDILLAHPSRSIVDEILTSMIQALNKHGLVVSTEKIQKYDNLKYLGTHIQGDSVSYQKLQIRTDKLRTLNDFQKLLGNINWIRPFLKLTTGELKPLFEILNGDSNPISTRKLTPEACKALQLMNERLSTARVKRLDLSQPWSLCILKTEYTPTACLWQDGVVEWIHLPHISPKVITPYDIFCTQLIIKGRHRSKELFSKDPDYIVVPYTKVQFDLLLQEKEDWPISLLGFLGEVHFHLPKDPLLTFTLQTAIIFPHMTSTTPLEKGIVIFTDGSANGRSVTYIQGREPIIKENTQNTAQQAEIVAVITAFEEVSQPFNLYTDSKYVTGLFPEIETATLSPRTKIYTELKHLQRLIHKRQEKFYIGHIRGHTGLPGPLAQGNAYADSLTRILTAGKRTADGSEFEKRTADGSEFESPKKKAKVE

SEQ ID NO: 3236 - protein, 2024 aa, synthetic construct
MPAAKRVKLDGGDKKYSIGLDIGTNSVGWAVITDEYKVPSKKFKVLGNTDRHSIKKNLIGALLFDSGETAEATRLKRTARRRYTRRKNRICYLQEIFSNEMAKVDDSFFHRLEESFLVEEDKKHERHPIFGNIVDEVAYHEKYPTIYHLRKKLVDSTDKADLRLIYLALAHMIKFRGHFLIEGDLNPDNSDVDKLFIQLVQTYNQLFEENPINASGVDAKAILSARLSKSRRLENLIAQLPGEKKNGLFGNLIALSLGLTPNFKSNFDLAEDAKLQLSKDTYDDDLDNLLAQIGDQYADLFLAAKNLSDAILLSDILRVNTEITKAPLSASMIKRYDEHHQDLTLLKALVRQQLPEKYKEIFFDQSKNGYAGYIDGGASQEEFYKFIKPILEKMDGTEELLVKLNREDLLRKQRTFDNGSIPHQIHLGELHAILRRQEDFYPFLKDNREKIEKILTFRIPYYVGPLARGNSRFAWMTRKSEETITPWNFEEVVDKGASAQSFIERMTNFDKNLPNEKVLPKHSLLYEYFTVYNELTKVKYVTEGMRKPAFLSGEQKKAIVDLLFKTNRKVTVKQLKEDYFKKIECFDSVEISGVEDRFNASLGTYHDLLKIIKDKDFLDNEENEDILEDIVLTLTLFEDREMIEERLKTYAHLFDDKVMKQLKRRRYTGWGRLSRKLINGIRDKQSGKTILDFLKSDGFANRNFMQLIHDDSLTFKEDIQKAQVSGQGDSLHEHIANLAGSPAIKKGILQTVKVVDELVKVMGRHKPENIVIEMARENQTTQKGQKNSRERMKRIEEGIKELGSQILKEHPVENTQLQNEKLYLYYLQNGRDMYVDQELDINRLSDYDVDHIVPQSFLKDDSIDNKVLTRSDKARGKSDNVPSEEVVKKMKNYWRQLLNAKLITQRKFDNLTKAERGGLSELDKAGFIKRQLVETRQITKHVAQILDSRMNTKYDENDKLIREVKVITLKSKLVSDFRKDFQFYKVREINNYHHAHDAYLNAVVGTALIKKYPKLESEFVYGDYKVYDVRKMIAKSEQEIGKATAKYFFYSNIMNFFKTEITLANGEIRKRPLIETNGETGEIVWDKGRDFATVRKVLSMPQVNIVKKTEVQTGGFSKESILPKRNSDKLIARKKDWDPKKYGGFDSPTVAYSVLVVAKVEKGKSKKLKSVKELLGITIMERSSFEKNPIDFLEAKGYKEVKKDLIIKLPKYSLFELENGRKRMLASAGELQKGNELALPSKYVNFLYLASHYEKLKGSPEDNEQKQLFVEQHKHYLDEIIEQISEFSKRVILADANLDKVLSAYNKHRDKPIREQAENIIHLFTLTNLGAPAAFKYFDTTIDRKRYTSTKEVLDATLIHQSITGLYETRIDLSQLGGDGGPAPEAAAKGSSGGGRDIMKDIKVRLMTDSPDDSQDLMIGAIESNLFADQISWKSDQPVWLNQWPLKQEKLQALQQLVTEQLQLGHLEESNSPWNTPVFVIKKKSGKWRLLQDLRAVNATMHDMGALQPGLPSPVAVPKGWEIIIIDLQDCFFNIKLHPEDCKRFAFSVPSPNFKRPYQRFQWKVLPQGMKNSPTLCQKFVDKAILTVRDKYQDSYIVHYMDDILLAHPSRSIVDEILTSMIQALNKHGLVVSTEKIQKYDNLKYLGTHIQGDSVSYQKLQIRTDKLRTLNDFQKLLGNINWIRPFLKLTTGELKPLFEILNGDSNPISTRKLTPEACKALQLMNERLSTARVKRLDLSQPWSLCILKTEYTPTACLWQDGVVEWIHLPHISPKVITPYDIFCTQLIIKGRHRSKELFSKDPDYIVVPYTKVQFDLLLQEKEDWPISLLGFLGEVHFHLPKDPLLTFTLQTAIIFPHMTSTTPLEKGIVIFTDGSANGRSVTYIQGREPIIKENTQNTAQQAEIVAVITAFEEVSQPFNLYTDSKYVTGLFPEIETATLSPRTKIYTELKHLQRLIHKRQEKFYIGHIRGHTGLPGPLAQGNAYADSLTRILTAGKRTADGSEFEKRTADGSEFESPKKKAKVE

SEQ ID NO: 3237 - protein, 2024 aa, synthetic construct
MPAAKRVKLDGGDKKYSIGLDIGTNSVGWAVITDEYKVPSKKFKVLGNTDRHSIKKNLIGALLFDSGETAEATRLKRTARRRYTRRKNRICYLQEIFSNEMAKVDDSFFHRLEESFLVEEDKKHERHPIFGNIVDEVAYHEKYPTIYHLRKKLVDSTDKADLRLIYLALAHMIKFRGHFLIEGDLNPDNSDVDKLFIQLVQTYNQLFEENPINASGVDAKAILSARLSKSRRLENLIAQLPGEKKNGLFGNLIALSLGLTPNFKSNFDLAEDAKLQLSKDTYDDDLDNLLAQIGDQYADLFLAAKNLSDAILLSDILRVNTEITKAPLSASMIKRYDEHHQDLTLLKALVRQQLPEKYKEIFFDQSKNGYAGYIDGGASQEEFYKFIKPILEKMDGTEELLVKLNREDLLRKQRTFDNGSIPHQIHLGELHAILRRQEDFYPFLKDNREKIEKILTFRIPYYVGPLARGNSRFAWMTRKSEETITPWNFEEVVDKGASAQSFIERMTNFDKNLPNEKVLPKHSLLYEYFTVYNELTKVKYVTEGMRKPAFLSGEQKKAIVDLLFKTNRKVTVKQLKEDYFKKIECFDSVEISGVEDRFNASLGTYHDLLKIIKDKDFLDNEENEDILEDIVLTLTLFEDREMIEERLKTYAHLFDDKVMKQLKRRRYTGWGRLSRKLINGIRDKQSGKTILDFLKSDGFANRNFMQLIHDDSLTFKEDIQKAQVSGQGDSLHEHIANLAGSPAIKKGILQTVKVVDELVKVMGRHKPENIVIEMARENQTTQKGQKNSRERMKRIEEGIKELGSQILKEHPVENTQLQNEKLYLYYLQNGRDMYVDQELDINRLSDYDVDHIVPQSFLKDDSIDNKVLTRSDKARGKSDNVPSEEVVKKMKNYWRQLLNAKLITQRKFDNLTKAERGGLSELDKAGFIKRQLVETRQITKHVAQILDSRMNTKYDENDKLIREVKVITLKSKLVSDFRKDFQFYKVREINNYHHAHDAYLNAVVGTALIKKYPKLESEFVYGDYKVYDVRKMIAKSEQEIGKATAKYFFYSNIMNFFKTEITLANGEIRKRPLIETNGETGEIVWDKGRDFATVRKVLSMPQVNIVKKTEVQTGGFSKESILPKRNSDKLIARKKDWDPKKYGGFDSPTVAYSVLVVAKVEKGKSKKLKSVKELLGITIMERSSFEKNPIDFLEAKGYKEVKKDLIIKLPKYSLFELENGRKRMLASAGELQKGNELALPSKYVNFLYLASHYEKLKGSPEDNEQKQLFVEQHKHYLDEIIEQISEFSKRVILADANLDKVLSAYNKHRDKPIREQAENIIHLFTLTNLGAPAAFKYFDTTIDRKRYTSTKEVLDATLIHQSITGLYETRIDLSQLGGDGGGGSEAAAKPAPGGGRDIMKDIKVRLMTDSPDDSQDLMIGAIESNLFADQISWKSDQPVWLNQWPLKQEKLQALQQLVTEQLQLGHLEESNSPWNTPVFVIKKKSGKWRLLQDLRAVNATMHDMGALQPGLPSPVAVPKGWEIIIIDLQDCFFNIKLHPEDCKRFAFSVPSPNFKRPYQRFQWKVLPQGMKNSPTLCQKFVDKAILTVRDKYQDSYIVHYMDDILLAHPSRSIVDEILTSMIQALNKHGLVVSTEKIQKYDNLKYLGTHIQGDSVSYQKLQIRTDKLRTLNDFQKLLGNINWIRPFLKLTTGELKPLFEILNGDSNPISTRKLTPEACKALQLMNERLSTARVKRLDLSQPWSLCILKTEYTPTACLWQDGVVEWIHLPHISPKVITPYDIFCTQLIIKGRHRSKELFSKDPDYIVVPYTKVQFDLLLQEKEDWPISLLGFLGEVHFHLPKDPLLTFTLQTAIIFPHMTSTTPLEKGIVIFTDGSANGRSVTYIQGREPIIKENTQNTAQQAEIVAVITAFEEVSQPFNLYTDSKYVTGLFPEIETATLSPRTKIYTELKHLQRLIHKRQEKFYIGHIRGHTGLPGPLAQGNAYADSLTRILTAGKRTADGSEFEKRTADGSEFESPKKKAKVE

SEQ ID NO: 3238 - protein, 2046 aa, synthetic construct
MPAAKRVKLDGGDKKYSIGLDIGTNSVGWAVITDEYKVPSKKFKVLGNTDRHSIKKNLIGALLFDSGETAEATRLKRTARRRYTRRKNRICYLQEIFSNEMAKVDDSFFHRLEESFLVEEDKKHERHPIFGNIVDEVAYHEKYPTIYHLRKKLVDSTDKADLRLIYLALAHMIKFRGHFLIEGDLNPDNSDVDKLFIQLVQTYNQLFEENPINASGVDAKAILSARLSKSRRLENLIAQLPGEKKNGLFGNLIALSLGLTPNFKSNFDLAEDAKLQLSKDTYDDDLDNLLAQIGDQYADLFLAAKNLSDAILLSDILRVNTEITKAPLSASMIKRYDEHHQDLTLLKALVRQQLPEKYKEIFFDQSKNGYAGYIDGGASQEEFYKFIKPILEKMDGTEELLVKLNREDLLRKQRTFDNGSIPHQIHLGELHAILRRQEDFYPFLKDNREKIEKILTFRIPYYVGPLARGNSRFAWMTRKSEETITPWNFEEVVDKGASAQSFIERMTNFDKNLPNEKVLPKHSLLYEYFTVYNELTKVKYVTEGMRKPAFLSGEQKKAIVDLLFKTNRKVTVKQLKEDYFKKIECFDSVEISGVEDRFNASLGTYHDLLKIIKDKDFLDNEENEDILEDIVLTLTLFEDREMIEERLKTYAHLFDDKVMKQLKRRRYTGWGRLSRKLINGIRDKQSGKTILDFLKSDGFANRNFMQLIHDDSLTFKEDIQKAQVSGQGDSLHEHIANLAGSPAIKKGILQTVKVVDELVKVMGRHKPENIVIEMARENQTTQKGQKNSRERMKRIEEGIKELGSQILKEHPVENTQLQNEKLYLYYLQNGRDMYVDQELDINRLSDYDVDHIVPQSFLKDDSIDNKVLTRSDKARGKSDNVPSEEVVKKMKNYWRQLLNAKLITQRKFDNLTKAERGGLSELDKAGFIKRQLVETRQITKHVAQILDSRMNTKYDENDKLIREVKVITLKSKLVSDFRKDFQFYKVREINNYHHAHDAYLNAVVGTALIKKYPKLESEFVYGDYKVYDVRKMIAKSEQEIGKATAKYFFYSNIMNFFKTEITLANGEIRKRPLIETNGETGEIVWDKGRDFATVRKVLSMPQVNIVKKTEVQTGGFSKESILPKRNSDKLIARKKDWDPKKYGGFDSPTVAYSVLVVAKVEKGKSKKLKSVKELLGITIMERSSFEKNPIDFLEAKGYKEVKKDLIIKLPKYSLFELENGRKRMLASAGELQKGNELALPSKYVNFLYLASHYEKLKGSPEDNEQKQLFVEQHKHYLDEIIEQISEFSKRVILADANLDKVLSAYNKHRDKPIREQAENIIHLFTLTNLGAPAAFKYFDTTIDRKRYTSTKEVLDATLIHQSITGLYETRIDLSQLGGDGGSGGSSGGSSGSETPGTSESATPESSGGSSGGSSGGGRDIMKDIKVRLMTDSPDDSQDLMIGAIESNLFADQISWKSDQPVWLNQWPLKQEKLQALQQLVTEQLQLGHLEESNSPWNTPVFVIKKKSGKWRLLQDLRAVNATMHDMGALQPGLPSPVAVPKGWEIIIIDLQDCFFNIKLHPEDCKRFAFSVPSPNFKRPYQRFQWKVLPQGMKNSPTLCQKFVDKAILTVRDKYQDSYIVHYMDDILLAHPSRSIVDEILTSMIQALNKHGLVVSTEKIQKYDNLKYLGTHIQGDSVSYQKLQIRTDKLRTLNDFQKLLGNINWIRPFLKLTTGELKPLFEILNGDSNPISTRKLTPEACKALQLMNERLSTARVKRLDLSQPWSLCILKTEYTPTACLWQDGVVEWIHLPHISPKVITPYDIFCTQLIIKGRHRSKELFSKDPDYIVVPYTKVQFDLLLQEKEDWPISLLGFLGEVHFHLPKDPLLTFTLQTAIIFPHMTSTTPLEKGIVIFTDGSANGRSVTYIQGREPIIKENTQNTAQQAEIVAVITAFEEVSQPFNLYTDSKYVTGLFPEIETATLSPRTKIYTELKHLQRLIHKRQEKFYIGHIRGHTGLPGPLAQGNAYADSLTRILTAGKRTADGSEFEKRTADGSEFESPKKKAKVE

SEQ ID NO: 3239 - protein, 2025 aa, synthetic construct
MPAAKRVKLDGGDKKYSIGLDIGTNSVGWAVITDEYKVPSKKFKVLGNTDRHSIKKNLIGALLFDSGETAEATRLKRTARRRYTRRKNRICYLQEIFSNEMAKVDDSFFHRLEESFLVEEDKKHERHPIFGNIVDEVAYHEKYPTIYHLRKKLVDSTDKADLRLIYLALAHMIKFRGHFLIEGDLNPDNSDVDKLFIQLVQTYNQLFEENPINASGVDAKAILSARLSKSRRLENLIAQLPGEKKNGLFGNLIALSLGLTPNFKSNFDLAEDAKLQLSKDTYDDDLDNLLAQIGDQYADLFLAAKNLSDAILLSDILRVNTEITKAPLSASMIKRYDEHHQDLTLLKALVRQQLPEKYKEIFFDQSKNGYAGYIDGGASQEEFYKFIKPILEKMDGTEELLVKLNREDLLRKQRTFDNGSIPHQIHLGELHAILRRQEDFYPFLKDNREKIEKILTFRIPYYVGPLARGNSRFAWMTRKSEETITPWNFEEVVDKGASAQSFIERMTNFDKNLPNEKVLPKHSLLYEYFTVYNELTKVKYVTEGMRKPAFLSGEQKKAIVDLLFKTNRKVTVKQLKEDYFKKIECFDSVEISGVEDRFNASLGTYHDLLKIIKDKDFLDNEENEDILEDIVLTLTLFEDREMIEERLKTYAHLFDDKVMKQLKRRRYTGWGRLSRKLINGIRDKQSGKTILDFLKSDGFANRNFMQLIHDDSLTFKEDIQKAQVSGQGDSLHEHIANLAGSPAIKKGILQTVKVVDELVKVMGRHKPENIVIEMARENQTTQKGQKNSRERMKRIEEGIKELGSQILKEHPVENTQLQNEKLYLYYLQNGRDMYVDQELDINRLSDYDVDHIVPQSFLKDDSIDNKVLTRSDKARGKSDNVPSEEVVKKMKNYWRQLLNAKLITQRKFDNLTKAERGGLSELDKAGFIKRQLVETRQITKHVAQILDSRMNTKYDENDKLIREVKVITLKSKLVSDFRKDFQFYKVREINNYHHAHDAYLNAVVGTALIKKYPKLESEFVYGDYKVYDVRKMIAKSEQEIGKATAKYFFYSNIMNFFKTEITLANGEIRKRPLIETNGETGEIVWDKGRDFATVRKVLSMPQVNIVKKTEVQTGGFSKESILPKRNSDKLIARKKDWDPKKYGGFDSPTVAYSVLVVAKVEKGKSKKLKSVKELLGITIMERSSFEKNPIDFLEAKGYKEVKKDLIIKLPKYSLFELENGRKRMLASAGELQKGNELALPSKYVNFLYLASHYEKLKGSPEDNEQKQLFVEQHKHYLDEIIEQISEFSKRVILADANLDKVLSAYNKHRDKPIREQAENIIHLFTLTNLGAPAAFKYFDTTIDRKRYTSTKEVLDATLIHQSITGLYETRIDLSQLGGDGGGSSGSSGSSGSSGGGRDIMKDIKVRLMTDSPDDSQDLMIGAIESNLFADQISWKSDQPVWLNQWPLKQEKLQALQQLVTEQLQLGHLEESNSPWNTPVFVIKKKSGKWRLLQDLRAVNATMHDMGALQPGLPSPVAVPKGWEIIIIDLQDCFFNIKLHPEDCKRFAFSVPSPNFKRPYQRFQWKVLPQGMKNSPTLCQKFVDKAILTVRDKYQDSYIVHYMDDILLAHPSRSIVDEILTSMIQALNKHGLVVSTEKIQKYDNLKYLGTHIQGDSVSYQKLQIRTDKLRTLNDFQKLLGNINWIRPFLKLTTGELKPLFEILNGDSNPISTRKLTPEACKALQLMNERLSTARVKRLDLSQPWSLCILKTEYTPTACLWQDGVVEWIHLPHISPKVITPYDIFCTQLIIKGRHRSKELFSKDPDYIVVPYTKVQFDLLLQEKEDWPISLLGFLGEVHFHLPKDPLLTFTLQTAIIFPHMTSTTPLEKGIVIFTDGSANGRSVTYIQGREPIIKENTQNTAQQAEIVAVITAFEEVSQPFNLYTDSKYVTGLFPEIETATLSPRTKIYTELKHLQRLIHKRQEKFYIGHIRGHTGLPGPLAQGNAYADSLTRILTAGKRTADGSEFEKRTADGSEFESPKKKAKVE

SEQ ID NO: 3240 - protein, 2022 aa, synthetic construct
MPAAKRVKLDGGDKKYSIGLDIGTNSVGWAVITDEYKVPSKKFKVLGNTDRHSIKKNLIGALLFDSGETAEATRLKRTARRRYTRRKNRICYLQEIFSNEMAKVDDSFFHRLEESFLVEEDKKHERHPIFGNIVDEVAYHEKYPTIYHLRKKLVDSTDKADLRLIYLALAHMIKFRGHFLIEGDLNPDNSDVDKLFIQLVQTYNQLFEENPINASGVDAKAILSARLSKSRRLENLIAQLPGEKKNGLFGNLIALSLGLTPNFKSNFDLAEDAKLQLSKDTYDDDLDNLLAQIGDQYADLFLAAKNLSDAILLSDILRVNTEITKAPLSASMIKRYDEHHQDLTLLKALVRQQLPEKYKEIFFDQSKNGYAGYIDGGASQEEFYKFIKPILEKMDGTEELLVKLNREDLLRKQRTFDNGSIPHQIHLGELHAILRRQEDFYPFLKDNREKIEKILTFRIPYYVGPLARGNSRFAWMTRKSEETITPWNFEEVVDKGASAQSFIERMTNFDKNLPNEKVLPKHSLLYEYFTVYNELTKVKYVTEGMRKPAFLSGEQKKAIVDLLFKTNRKVTVKQLKEDYFKKIECFDSVEISGVEDRFNASLGTYHDLLKIIKDKDFLDNEENEDILEDIVLTLTLFEDREMIEERLKTYAHLFDDKVMKQLKRRRYTGWGRLSRKLINGIRDKQSGKTILDFLKSDGFANRNFMQLIHDDSLTFKEDIQKAQVSGQGDSLHEHIANLAGSPAIKKGILQTVKVVDELVKVMGRHKPENIVIEMARENQTTQKGQKNSRERMKRIEEGIKELGSQILKEHPVENTQLQNEKLYLYYLQNGRDMYVDQELDINRLSDYDVDHIVPQSFLKDDSIDNKVLTRSDKARGKSDNVPSEEVVKKMKNYWRQLLNAKLITQRKFDNLTKAERGGLSELDKAGFIKRQLVETRQITKHVAQILDSRMNTKYDENDKLIREVKVITLKSKLVSDFRKDFQFYKVREINNYHHAHDAYLNAVVGTALIKKYPKLESEFVYGDYKVYDVRKMIAKSEQEIGKATAKYFFYSNIMNFFKTEITLANGEIRKRPLIETNGETGEIVWDKGRDFATVRKVLSMPQVNIVKKTEVQTGGFSKESILPKRNSDKLIARKKDWDPKKYGGFDSPTVAYSVLVVAKVEKGKSKKLKSVKELLGITIMERSSFEKNPIDFLEAKGYKEVKKDLIIKLPKYSLFELENGRKRMLASAGELQKGNELALPSKYVNFLYLASHYEKLKGSPEDNEQKQLFVEQHKHYLDEIIEQISEFSKRVILADANLDKVLSAYNKHRDKPIREQAENIIHLFTLTNLGAPAAFKYFDTTIDRKRYTSTKEVLDATLIHQSITGLYETRIDLSQLGGDGGGGGGGSGSSGGGRDIMKDIKVRLMTDSPDDSQDLMIGAIESNLFADQISWKSDQPVWLNQWPLKQEKLQALQQLVTEQLQLGHLEESNSPWNTPVFVIKKKSGKWRLLQDLRAVNATMHDMGALQPGLPSPVAVPKGWEIIIIDLQDCFFNIKLHPEDCKRFAFSVPSPNFKRPYQRFQWKVLPQGMKNSPTLCQKFVDKAILTVRDKYQDSYIVHYMDDILLAHPSRSIVDEILTSMIQALNKHGLVVSTEKIQKYDNLKYLGTHIQGDSVSYQKLQIRTDKLRTLNDFQKLLGNINWIRPFLKLTTGELKPLFEILNGDSNPISTRKLTPEACKALQLMNERLSTARVKRLDLSQPWSLCILKTEYTPTACLWQDGVVEWIHLPHISPKVITPYDIFCTQLIIKGRHRSKELFSKDPDYIVVPYTKVQFDLLLQEKEDWPISLLGFLGEVHFHLPKDPLLTFTLQTAIIFPHMTSTTPLEKGIVIFTDGSANGRSVTYIQGREPIIKENTQNTAQQAEIVAVITAFEEVSQPFNLYTDSKYVTGLFPEIETATLSPRTKIYTELKHLQRLIHKRQEKFYIGHIRGHTGLPGPLAQGNAYADSLTRILTAGKRTADGSEFEKRTADGSEFESPKKKAKVE

SEQ ID NO: 3241 - protein, 2022 aa, synthetic construct
MPAAKRVKLDGGDKKYSIGLDIGTNSVGWAVITDEYKVPSKKFKVLGNTDRHSIKKNLIGALLFDSGETAEATRLKRTARRRYTRRKNRICYLQEIFSNEMAKVDDSFFHRLEESFLVEEDKKHERHPIFGNIVDEVAYHEKYPTIYHLRKKLVDSTDKADLRLIYLALAHMIKFRGHFLIEGDLNPDNSDVDKLFIQLVQTYNQLFEENPINASGVDAKAILSARLSKSRRLENLIAQLPGEKKNGLFGNLIALSLGLTPNFKSNFDLAEDAKLQLSKDTYDDDLDNLLAQIGDQYADLFLAAKNLSDAILLSDILRVNTEITKAPLSASMIKRYDEHHQDLTLLKALVRQQLPEKYKEIFFDQSKNGYAGYIDGGASQEEFYKFIKPILEKMDGTEELLVKLNREDLLRKQRTFDNGSIPHQIHLGELHAILRRQEDFYPFLKDNREKIEKILTFRIPYYVGPLARGNSRFAWMTRKSEETITPWNFEEVVDKGASAQSFIERMTNFDKNLPNEKVLPKHSLLYEYFTVYNELTKVKYVTEGMRKPAFLSGEQKKAIVDLLFKTNRKVTVKQLKEDYFKKIECFDSVEISGVEDRFNASLGTYHDLLKIIKDKDFLDNEENEDILEDIVLTLTLFEDREMIEERLKTYAHLFDDKVMKQLKRRRYTGWGRLSRKLINGIRDKQSGKTILDFLKSDGFANRNFMQLIHDDSLTFKEDIQKAQVSGQGDSLHEHIANLAGSPAIKKGILQTVKVVDELVKVMGRHKPENIVIEMARENQTTQKGQKNSRERMKRIEEGIKELGSQILKEHPVENTQLQNEKLYLYYLQNGRDMYVDQELDINRLSDYDVDHIVPQSFLKDDSIDNKVLTRSDKARGKSDNVPSEEVVKKMKNYWRQLLNAKLITQRKFDNLTKAERGGLSELDKAGFIKRQLVETRQITKHVAQILDSRMNTKYDENDKLIREVKVITLKSKLVSDFRKDFQFYKVREINNYHHAHDAYLNAVVGTALIKKYPKLESEFVYGDYKVYDVRKMIAKSEQEIGKATAKYFFYSNIMNFFKTEITLANGEIRKRPLIETNGETGEIVWDKGRDFATVRKVLSMPQVNIVKKTEVQTGGFSKESILPKRNSDKLIARKKDWDPKKYGGFDSPTVAYSVLVVAKVEKGKSKKLKSVKELLGITIMERSSFEKNPIDFLEAKGYKEVKKDLIIKLPKYSLFELENGRKRMLASAGELQKGNELALPSKYVNFLYLASHYEKLKGSPEDNEQKQLFVEQHKHYLDEIIEQISEFSKRVILADANLDKVLSAYNKHRDKPIREQAENIIHLFTLTNLGAPAAFKYFDTTIDRKRYTSTKEVLDATLIHQSITGLYETRIDLSQLGGDGGGGGGSSGGSGGGRDIMKDIKVRLMTDSPDDSQDLMIGAIESNLFADQISWKSDQPVWLNQWPLKQEKLQALQQLVTEQLQLGHLEESNSPWNTPVFVIKKKSGKWRLLQDLRAVNATMHDMGALQPGLPSPVAVPKGWEIIIIDLQDCFFNIKLHPEDCKRFAFSVPSPNFKRPYQRFQWKVLPQGMKNSPTLCQKFVDKAILTVRDKYQDSYIVHYMDDILLAHPSRSIVDEILTSMIQALNKHGLVVSTEKIQKYDNLKYLGTHIQGDSVSYQKLQIRTDKLRTLNDFQKLLGNINWIRPFLKLTTGELKPLFEILNGDSNPISTRKLTPEACKALQLMNERLSTARVKRLDLSQPWSLCILKTEYTPTACLWQDGVVEWIHLPHISPKVITPYDIFCTQLIIKGRHRSKELFSKDPDYIVVPYTKVQFDLLLQEKEDWPISLLGFLGEVHFHLPKDPLLTFTLQTAIIFPHMTSTTPLEKGIVIFTDGSANGRSVTYIQGREPIIKENTQNTAQQAEIVAVITAFEEVSQPFNLYTDSKYVTGLFPEIETATLSPRTKIYTELKHLQRLIHKRQEKFYIGHIRGHTGLPGPLAQGNAYADSLTRILTAGKRTADGSEFEKRTADGSEFESPKKKAKVE

SEQ ID NO: 3242 - protein, 2019 aa, synthetic construct
MPAAKRVKLDGGDKKYSIGLDIGTNSVGWAVITDEYKVPSKKFKVLGNTDRHSIKKNLIGALLFDSGETAEATRLKRTARRRYTRRKNRICYLQEIFSNEMAKVDDSFFHRLEESFLVEEDKKHERHPIFGNIVDEVAYHEKYPTIYHLRKKLVDSTDKADLRLIYLALAHMIKFRGHFLIEGDLNPDNSDVDKLFIQLVQTYNQLFEENPINASGVDAKAILSARLSKSRRLENLIAQLPGEKKNGLFGNLIALSLGLTPNFKSNFDLAEDAKLQLSKDTYDDDLDNLLAQIGDQYADLFLAAKNLSDAILLSDILRVNTEITKAPLSASMIKRYDEHHQDLTLLKALVRQQLPEKYKEIFFDQSKNGYAGYIDGGASQEEFYKFIKPILEKMDGTEELLVKLNREDLLRKQRTFDNGSIPHQIHLGELHAILRRQEDFYPFLKDNREKIEKILTFRIPYYVGPLARGNSRFAWMTRKSEETITPWNFEEVVDKGASAQSFIERMTNFDKNLPNEKVLPKHSLLYEYFTVYNELTKVKYVTEGMRKPAFLSGEQKKAIVDLLFKTNRKVTVKQLKEDYFKKIECFDSVEISGVEDRFNASLGTYHDLLKIIKDKDFLDNEENEDILEDIVLTLTLFEDREMIEERLKTYAHLFDDKVMKQLKRRRYTGWGRLSRKLINGIRDKQSGKTILDFLKSDGFANRNFMQLIHDDSLTFKEDIQKAQVSGQGDSLHEHIANLAGSPAIKKGILQTVKVVDELVKVMGRHKPENIVIEMARENQTTQKGQKNSRERMKRIEEGIKELGSQILKEHPVENTQLQNEKLYLYYLQNGRDMYVDQELDINRLSDYDVDHIVPQSFLKDDSIDNKVLTRSDKARGKSDNVPSEEVVKKMKNYWRQLLNAKLITQRKFDNLTKAERGGLSELDKAGFIKRQLVETRQITKHVAQILDSRMNTKYDENDKLIREVKVITLKSKLVSDFRKDFQFYKVREINNYHHAHDAYLNAVVGTALIKKYPKLESEFVYGDYKVYDVRKMIAKSEQEIGKATAKYFFYSNIMNFFKTEITLANGEIRKRPLIETNGETGEIVWDKGRDFATVRKVLSMPQVNIVKKTEVQTGGFSKESILPKRNSDKLIARKKDWDPKKYGGFDSPTVAYSVLVVAKVEKGKSKKLKSVKELLGITIMERSSFEKNPIDFLEAKGYKEVKKDLIIKLPKYSLFELENGRKRMLASAGELQKGNELALPSKYVNFLYLASHYEKLKGSPEDNEQKQLFVEQHKHYLDEIIEQISEFSKRVILADANLDKVLSAYNKHRDKPIREQAENIIHLFTLTNLGAPAAFKYFDTTIDRKRYTSTKEVLDATLIHQSITGLYETRIDLSQLGGDGGGGSGSSGGGRDIMKDIKVRLMTDSPDDSQDLMIGAIESNLFADQISWKSDQPVWLNQWPLKQEKLQALQQLVTEQLQLGHLEESNSPWNTPVFVIKKKSGKWRLLQDLRAVNATMHDMGALQPGLPSPVAVPKGWEIIIIDLQDCFFNIKLHPEDCKRFAFSVPSPNFKRPYQRFQWKVLPQGMKNSPTLCQKFVDKAILTVRDKYQDSYIVHYMDDILLAHPSRSIVDEILTSMIQALNKHGLVVSTEKIQKYDNLKYLGTHIQGDSVSYQKLQIRTDKLRTLNDFQKLLGNINWIRPFLKLTTGELKPLFEILNPDSNPISTRKLTPEACKALQLMNERLSTARVKRLDLSQPWSLCILKTEYTPTACLWQDGVVEWIHLPHISPKVITPYDIFCTQLIIKGRHRSKELFSKDPDYIVVPYTKVQFDLLLQEKEDWPISLLGFLGEVHFHLPKDPLLTFTLQTAIIFPHMTSTTPLEKGIVIFTDGSANGRSVTYIQGREPIIKENTQNTAQQAEIVAVITAFEEVSQPFNLYTDSKYVTGLFPEIETATLSPRTKIYTELKHLQRLIHKRQEKFYIGHIRGHTGLPGPLAQGNAYADSLTRILTAGKRTADGSEFEKRTADGSEFESPKKKAKVE

SEQ ID NO: 3243 - protein, 2022 aa, synthetic construct
MPAAKRVKLDGGDKKYSIGLDIGTNSVGWAVITDEYKVPSKKFKVLGNTDRHSIKKNLIGALLFDSGETAEATRLKRTARRRYTRRKNRICYLQEIFSNEMAKVDDSFFHRLEESFLVEEDKKHERHPIFGNIVDEVAYHEKYPTIYHLRKKLVDSTDKADLRLIYLALAHMIKFRGHFLIEGDLNPDNSDVDKLFIQLVQTYNQLFEENPINASGVDAKAILSARLSKSRRLENLIAQLPGEKKNGLFGNLIALSLGLTPNFKSNFDLAEDAKLQLSKDTYDDDLDNLLAQIGDQYADLFLAAKNLSDAILLSDILRVNTEITKAPLSASMIKRYDEHHQDLTLLKALVRQQLPEKYKEIFFDQSKNGYAGYIDGGASQEEFYKFIKPILEKMDGTEELLVKLNREDLLRKQRTFDNGSIPHQIHLGELHAILRRQEDFYPFLKDNREKIEKILTFRIPYYVGPLARGNSRFAWMTRKSEETITPWNFEEVVDKGASAQSFIERMTNFDKNLPNEKVLPKHSLLYEYFTVYNELTKVKYVTEGMRKPAFLSGEQKKAIVDLLFKTNRKVTVKQLKEDYFKKIECFDSVEISGVEDRFNASLGTYHDLLKIIKDKDFLDNEENEDILEDIVLTLTLFEDREMIEERLKTYAHLFDDKVMKQLKRRRYTGWGRLSRKLINGIRDKQSGKTILDFLKSDGFANRNFMQLIHDDSLTFKEDIQKAQVSGQGDSLHEHIANLAGSPAIKKGILQTVKVVDELVKVMGRHKPENIVIEMARENQTTQKGQKNSRERMKRIEEGIKELGSQILKEHPVENTQLQNEKLYLYYLQNGRDMYVDQELDINRLSDYDVDHIVPQSFLKDDSIDNKVLTRSDKARGKSDNVPSEEVVKKMKNYWRQLLNAKLITQRKFDNLTKAERGGLSELDKAGFIKRQLVETRQITKHVAQILDSRMNTKYDENDKLIREVKVITLKSKLVSDFRKDFQFYKVREINNYHHAHDAYLNAVVGTALIKKYPKLESEFVYGDYKVYDVRKMIAKSEQEIGKATAKYFFYSNIMNFFKTEITLANGEIRKRPLIETNGETGEIVWDKGRDFATVRKVLSMPQVNIVKKTEVQTGGFSKESILPKRNSDKLIARKKDWDPKKYGGFDSPTVAYSVLVVAKVEKGKSKKLKSVKELLGITIMERSSFEKNPIDFLEAKGYKEVKKDLIIKLPKYSLFELENGRKRMLASAGELQKGNELALPSKYVNFLYLASHYEKLKGSPEDNEQKQLFVEQHKHYLDEIIEQISEFSKRVILADANLDKVLSAYNKHRDKPIREQAENIIHLFTLTNLGAPAAFKYFDTTIDRKRYTSTKEVLDATLIHQSITGLYETRIDLSQLGGDGGGGGGGSGSSGGGRDIMKDIKVRLMTDSPDDSQDLMIGAIESNLFADQISWKSDQPVWLNQWPLKQEKLQALQQLVTEQLQLGHLEESNSPWNTPVFVIKKKSGKWRLLQDLRAVNATMHDMGALQPGLPSPVAVPKGWEIIIIDLQDCFFNIKLHPEDCKRFAFSVPSPNFKRPYQRFQWKVLPQGMKNSPTLCQKFVDKAILTVRDKYQDSYIVHYMDDILLAHPSRSIVDEILTSMIQALNKHGLVVSTEKIQKYDNLKYLGTHIQGDSVSYQKLQIRTDKLRTLNDFQKLLGNINWIRPFLKLTTGELKPLFEILNPDSNPISTRKLTPEACKALQLMNERLSTARVKRLDLSQPWSLCILKTEYTPTACLWQDGVVEWIHLPHISPKVITPYDIFCTQLIIKGRHRSKELFSKDPDYIVVPYTKVQFDLLLQEKEDWPISLLGFLGEVHFHLPKDPLLTFTLQTAIIFPHMTSTTPLEKGIVIFTDGSANGRSVTYIQGREPIIKENTQNTAQQAEIVAVITAFEEVSQPFNLYTDSKYVTGLFPEIETATLSPRTKIYTELKHLQRLIHKRQEKFYIGHIRGHTGLPGPLAQGNAYADSLTRILTAGKRTADGSEFEKRTADGSEFESPKKKAKVE

SEQ ID NO: 3244 - protein, 2024 aa, synthetic construct
MPAAKRVKLDGGDKKYSIGLDIGTNSVGWAVITDEYKVPSKKFKVLGNTDRHSIKKNLIGALLFDSGETAEATRLKRTARRRYTRRKNRICYLQEIFSNEMAKVDDSFFHRLEESFLVEEDKKHERHPIFGNIVDEVAYHEKYPTIYHLRKKLVDSTDKADLRLIYLALAHMIKFRGHFLIEGDLNPDNSDVDKLFIQLVQTYNQLFEENPINASGVDAKAILSARLSKSRRLENLIAQLPGEKKNGLFGNLIALSLGLTPNFKSNFDLAEDAKLQLSKDTYDDDLDNLLAQIGDQYADLFLAAKNLSDAILLSDILRVNTEITKAPLSASMIKRYDEHHQDLTLLKALVRQQLPEKYKEIFFDQSKNGYAGYIDGGASQEEFYKFIKPILEKMDGTEELLVKLNREDLLRKQRTFDNGSIPHQIHLGELHAILRRQEDFYPFLKDNREKIEKILTFRIPYYVGPLARGNSRFAWMTRKSEETITPWNFEEVVDKGASAQSFIERMTNFDKNLPNEKVLPKHSLLYEYFTVYNELTKVKYVTEGMRKPAFLSGEQKKAIVDLLFKTNRKVTVKQLKEDYFKKIECFDSVEISGVEDRFNASLGTYHDLLKIIKDKDFLDNEENEDILEDIVLTLTLFEDREMIEERLKTYAHLFDDKVMKQLKRRRYTGWGRLSRKLINGIRDKQSGKTILDFLKSDGFANRNFMQLIHDDSLTFKEDIQKAQVSGQGDSLHEHIANLAGSPAIKKGILQTVKVVDELVKVMGRHKPENIVIEMARENQTTQKGQKNSRERMKRIEEGIKELGSQILKEHPVENTQLQNEKLYLYYLQNGRDMYVDQELDINRLSDYDVDHIVPQSFLKDDSIDNKVLTRSDKARGKSDNVPSEEVVKKMKNYWRQLLNAKLITQRKFDNLTKAERGGLSELDKAGFIKRQLVETRQITKHVAQILDSRMNTKYDENDKLIREVKVITLKSKLVSDFRKDFQFYKVREINNYHHAHDAYLNAVVGTALIKKYPKLESEFVYGDYKVYDVRKMIAKSEQEIGKATAKYFFYSNIMNFFKTEITLANGEIRKRPLIETNGETGEIVWDKGRDFATVRKVLSMPQVNIVKKTEVQTGGFSKESILPKRNSDKLIARKKDWDPKKYGGFDSPTVAYSVLVVAKVEKGKSKKLKSVKELLGITIMERSSFEKNPIDFLEAKGYKEVKKDLIIKLPKYSLFELENGRKRMLASAGELQKGNELALPSKYVNFLYLASHYEKLKGSPEDNEQKQLFVEQHKHYLDEIIEQISEFSKRVILADANLDKVLSAYNKHRDKPIREQAENIIHLFTLTNLGAPAAFKYFDTTIDRKRYTSTKEVLDATLIHQSITGLYETRIDLSQLGGDGGGSSEAAAKGGSGGGRDIMKDIKVRLMTDSPDDSQDLMIGAIESNLFADQISWKSDQPVWLNQWPLKQEKLQALQQLVTEQLQLGHLEESNSPWNTPVFVIKKKSGKWRLLQDLRAVNATMHDMGALQPGLPSPVAPPKGWEIIIIDLQDCFFNIKLHPEDCKRFAFSVPSPNFKRPYQRFQWKVLPQGMKNSPTLCQKFVDKAILTVRDKYQDSYIVHYMDDILLAHPSRSIVDEILTSMIQALNKHGLVVSTEKIQKYDNLKYLGTHIQGDSVSYQKLQIRTDKLRTLNDFQKLLGNINWIRPFLKLTTGELKPLFEILNPDSNPISTRKLTPEACKALQLMNERLSTARVKRLDLSQPWSLCILKTEYTPTACLWQDGVVEWIHLPHISPKVITPYDIFCTQLIIKGRHRSKELFSKDPDYIVVPYTKVQFDLLLQEKEDWPISLLGFLGEVHFHLPKDPLLTFTLQTAIIFPHMTSTTPLEKGIVIFTDGSANGRSVTYIQGREPIIKENTQNTAQQAEIVAVITAFEEVSQPFNLYTDSKYVTGLFPEIETATLSPRTKIYTELKHLQRLIHKRQEKFYIGHIRGHTGLPGPLAQGNAYADSLTRILTAGKRTADGSEFEKRTADGSEFESPKKKAKVE

SEQ ID NO: 3245 - protein, 2125 aa, synthetic construct
MPAAKRVKLDGGDKKYSIGLDIGTNSVGWAVITDEYKVPSKKFKVLGNTDRHSIKKNLIGALLFDSGETAEATRLKRTARRRYTRRKNRICYLQEIFSNEMAKVDDSFFHRLEESFLVEEDKKHERHPIFGNIVDEVAYHEKYPTIYHLRKKLVDSTDKADLRLIYLALAHMIKFRGHFLIEGDLNPDNSDVDKLFIQLVQTYNQLFEENPINASGVDAKAILSARLSKSRRLENLIAQLPGEKKNGLFGNLIALSLGLTPNFKSNFDLAEDAKLQLSKDTYDDDLDNLLAQIGDQYADLFLAAKNLSDAILLSDILRVNTEITKAPLSASMIKRYDEHHQDLTLLKALVRQQLPEKYKEIFFDQSKNGYAGYIDGGASQEEFYKFIKPILEKMDGTEELLVKLNREDLLRKQRTFDNGSIPHQIHLGELHAILRRQEDFYPFLKDNREKIEKILTFRIPYYVGPLARGNSRFAWMTRKSEETITPWNFEEVVDKGASAQSFIERMTNFDKNLPNEKVLPKHSLLYEYFTVYNELTKVKYVTEGMRKPAFLSGEQKKAIVDLLFKTNRKVTVKQLKEDYFKKIECFDSVEISGVEDRFNASLGTYHDLLKIIKDKDFLDNEENEDILEDIVLTLTLFEDREMIEERLKTYAHLFDDKVMKQLKRRRYTGWGRLSRKLINGIRDKQSGKTILDFLKSDGFANRNFMQLIHDDSLTFKEDIQKAQVSGQGDSLHEHIANLAGSPAIKKGILQTVKVVDELVKVMGRHKPENIVIEMARENQTTQKGQKNSRERMKRIEEGIKELGSQILKEHPVENTQLQNEKLYLYYLQNGRDMYVDQELDINRLSDYDVDHIVPQSFLKDDSIDNKVLTRSDKARGKSDNVPSEEVVKKMKNYWRQLLNAKLITQRKFDNLTKAERGGLSELDKAGFIKRQLVETRQITKHVAQILDSRMNTKYDENDKLIREVKVITLKSKLVSDFRKDFQFYKVREINNYHHAHDAYLNAVVGTALIKKYPKLESEFVYGDYKVYDVRKMIAKSEQEIGKATAKYFFYSNIMNFFKTEITLANGEIRKRPLIETNGETGEIVWDKGRDFATVRKVLSMPQVNIVKKTEVQTGGFSKESILPKRNSDKLIARKKDWDPKKYGGFDSPTVAYSVLVVAKVEKGKSKKLKSVKELLGITIMERSSFEKNPIDFLEAKGYKEVKKDLIIKLPKYSLFELENGRKRMLASAGELQKGNELALPSKYVNFLYLASHYEKLKGSPEDNEQKQLFVEQHKHYLDEIIEQISEFSKRVILADANLDKVLSAYNKHRDKPIREQAENIIHLFTLTNLGAPAAFKYFDTTIDRKRYTSTKEVLDATLIHQSITGLYETRIDLSQLGGDGGEAAAKEAAAKEAAAKEAAAKGGWVQEISDSRPMLHIYLNGRRFLGLLNTGADKTCIAGRDWPANWPIHQTESSLQGLGMACGVARSSQPLRWQHEDKSGIIHPFVIPTLPFTLWGRDIMKDIKVRLMTDSPDDSQDLMIGAIESNLFADQISWKSDQPVWLNQWPLKQEKLQALQQLVTEQLQLGHLEESNSPWNTPVFVIKKKSGKWRLLQDLRAVNATMHDMGALQPGLPSPVAVPKGWEIIIIDLQDCFFNIKLHPEDCKRFAFSVPSPNFKRPYQRFQWKVLPQGMKNSPTLCQKFVDKAILTVRDKYQDSYIVHYMDDILLAHPSRSIVDEILTSMIQALNKHGLVVSTEKIQKYDNLKYLGTHIQGDSVSYQKLQIRTDKLRTLNDFQKLLGNINWIRPFLKLTTGELKPLFEILNPDSNPISTRKLTPEACKALQLMNERLSTARVKRLDLSQPWSLCILKTEYTPTACLWQDGVVEWIHLPHISPKVITPYDIFCTQLIIKGRHRSKELFSKDPDYIVVPYTKVQFDLLLQEKEDWPISLLGFLGEVHFHLPKDPLLTFTLQTAIIFPHMTSTTPLEKGIVIFTDGSANGRSVTYIQGREPIIKENTQNTAQQAEIVAVITAFEEVSQPFNLYTDSKYVTGLFPEIETATLSPRTKIYTELKHLQRLIHKRQEKFYIGHIRGHTGLPGPLAQGNAYADSLTRILTAGKRTADGSEFEKRTADGSEFESPKKKAKVE

SEQ ID NO: 3246 - protein, 2116 aa, synthetic construct
MPAAKRVKLDGGDKKYSIGLDIGTNSVGWAVITDEYKVPSKKFKVLGNTDRHSIKKNLIGALLFDSGETAEATRLKRTARRRYTRRKNRICYLQEIFSNEMAKVDDSFFHRLEESFLVEEDKKHERHPIFGNIVDEVAYHEKYPTIYHLRKKLVDSTDKADLRLIYLALAHMIKFRGHFLIEGDLNPDNSDVDKLFIQLVQTYNQLFEENPINASGVDAKAILSARLSKSRRLENLIAQLPGEKKNGLFGNLIALSLGLTPNFKSNFDLAEDAKLQLSKDTYDDDLDNLLAQIGDQYADLFLAAKNLSDAILLSDILRVNTEITKAPLSASMIKRYDEHHQDLTLLKALVRQQLPEKYKEIFFDQSKNGYAGYIDGGASQEEFYKFIKPILEKMDGTEELLVKLNREDLLRKQRTFDNGSIPHQIHLGELHAILRRQEDFYPFLKDNREKIEKILTFRIPYYVGPLARGNSRFAWMTRKSEETITPWNFEEVVDKGASAQSFIERMTNFDKNLPNEKVLPKHSLLYEYFTVYNELTKVKYVTEGMRKPAFLSGEQKKAIVDLLFKTNRKVTVKQLKEDYFKKIECFDSVEISGVEDRFNASLGTYHDLLKIIKDKDFLDNEENEDILEDIVLTLTLFEDREMIEERLKTYAHLFDDKVMKQLKRRRYTGWGRLSRKLINGIRDKQSGKTILDFLKSDGFANRNFMQLIHDDSLTFKEDIQKAQVSGQGDSLHEHIANLAGSPAIKKGILQTVKVVDELVKVMGRHKPENIVIEMARENQTTQKGQKNSRERMKRIEEGIKELGSQILKEHPVENTQLQNEKLYLYYLQNGRDMYVDQELDINRLSDYDVDHIVPQSFLKDDSIDNKVLTRSDKARGKSDNVPSEEVVKKMKNYWRQLLNAKLITQRKFDNLTKAERGGLSELDKAGFIKRQLVETRQITKHVAQILDSRMNTKYDENDKLIREVKVITLKSKLVSDFRKDFQFYKVREINNYHHAHDAYLNAVVGTALIKKYPKLESEFVYGDYKVYDVRKMIAKSEQEIGKATAKYFFYSNIMNFFKTEITLANGEIRKRPLIETNGETGEIVWDKGRDFATVRKVLSMPQVNIVKKTEVQTGGFSKESILPKRNSDKLIARKKDWDPKKYGGFDSPTVAYSVLVVAKVEKGKSKKLKSVKELLGITIMERSSFEKNPIDFLEAKGYKEVKKDLIIKLPKYSLFELENGRKRMLASAGELQKGNELALPSKYVNFLYLASHYEKLKGSPEDNEQKQLFVEQHKHYLDEIIEQISEFSKRVILADANLDKVLSAYNKHRDKPIREQAENIIHLFTLTNLGAPAAFKYFDTTIDRKRYTSTKEVLDATLIHQSITGLYETRIDLSQLGGDGGGSSGGSEAAAKGGWVQEISDSRPMLHIYLNGRRFLGLLNTGADKTCIAGRDWPANWPIHQTESSLQGLGMACGVARSSQPLRWQHEDKSGIIHPFVIPTLPFTLWGRDIMKDIKVRLMTDSPDDSQDLMIGAIESNLFADQISWKSDQPVWLNQWPLKQEKLQALQQLVTEQLQLGHLEESNSPWNTPVFVIKKKSGKWRLLQDLRAVNATMHDMGALQPGLPSPVAVPKGWEIIIIDLQDCFFNIKLHPEDCKRFAFSVPSPNFKRPYQRFQWKVLPQGMKNSPTLCQKFVDKAILTVRDKYQDSYIVHYMDDILLAHPSRSIVDEILTSMIQALNKHGLVVSTEKIQKYDNLKYLGTHIQGDSVSYQKLQIRTDKLRTLNDFQKLLGNINWIRPFLKLTTGELKPLFEILNPDSNPISTRKLTPEACKALQLMNERLSTARVKRLDLSQPWSLCILKTEYTPTACLWQDGVVEWIHLPHISPKVITPYDIFCTQLIIKGRHRSKELFSKDPDYIVVPYTKVQFDLLLQEKEDWPISLLGFLGEVHFHLPKDPLLTFTLQTAIIFPHMTSTTPLEKGIVIFTDGSANGRSVTYIQGREPIIKENTQNTAQQAEIVAVITAFEEVSQPFNLYTDSKYVTGLFPEIETATLSPRTKIYTELKHLQRLIHKRQEKFYIGHIRGHTGLPGPLAQGNAYADSLTRILTAGKRTADGSEFEKRTADGSEFESPKKKAKVE

SEQ ID NO: 3247 - protein, 2114 aa, synthetic construct
MPAAKRVKLDGGDKKYSIGLDIGTNSVGWAVITDEYKVPSKKFKVLGNTDRHSIKKNLIGALLFDSGETAEATRLKRTARRRYTRRKNRICYLQEIFSNEMAKVDDSFFHRLEESFLVEEDKKHERHPIFGNIVDEVAYHEKYPTIYHLRKKLVDSTDKADLRLIYLALAHMIKFRGHFLIEGDLNPDNSDVDKLFIQLVQTYNQLFEENPINASGVDAKAILSARLSKSRRLENLIAQLPGEKKNGLFGNLIALSLGLTPNFKSNFDLAEDAKLQLSKDTYDDDLDNLLAQIGDQYADLFLAAKNLSDAILLSDILRVNTEITKAPLSASMIKRYDEHHQDLTLLKALVRQQLPEKYKEIFFDQSKNGYAGYIDGGASQEEFYKFIKPILEKMDGTEELLVKLNREDLLRKQRTFDNGSIPHQIHLGELHAILRRQEDFYPFLKDNREKIEKILTFRIPYYVGPLARGNSRFAWMTRKSEETITPWNFEEVVDKGASAQSFIERMTNFDKNLPNEKVLPKHSLLYEYFTVYNELTKVKYVTEGMRKPAFLSGEQKKAIVDLLFKTNRKVTVKQLKEDYFKKIECFDSVEISGVEDRFNASLGTYHDLLKIIKDKDFLDNEENEDILEDIVLTLTLFEDREMIEERLKTYAHLFDDKVMKQLKRRRYTGWGRLSRKLINGIRDKQSGKTILDFLKSDGFANRNFMQLIHDDSLTFKEDIQKAQVSGQGDSLHEHIANLAGSPAIKKGILQTVKVVDELVKVMGRHKPENIVIEMARENQTTQKGQKNSRERMKRIEEGIKELGSQILKEHPVENTQLQNEKLYLYYLQNGRDMYVDQELDINRLSDYDVDHIVPQSFLKDDSIDNKVLTRSDKARGKSDNVPSEEVVKKMKNYWRQLLNAKLITQRKFDNLTKAERGGLSELDKAGFIKRQLVETRQITKHVAQILDSRMNTKYDENDKLIREVKVITLKSKLVSDFRKDFQFYKVREINNYHHAHDAYLNAVVGTALIKKYPKLESEFVYGDYKVYDVRKMIAKSEQEIGKATAKYFFYSNIMNFFKTEITLANGEIRKRPLIETNGETGEIVWDKGRDFATVRKVLSMPQVNIVKKTEVQTGGFSKESILPKRNSDKLIARKKDWDPKKYGGFDSPTVAYSVLVVAKVEKGKSKKLKSVKELLGITIMERSSFEKNPIDFLEAKGYKEVKKDLIIKLPKYSLFELENGRKRMLASAGELQKGNELALPSKYVNFLYLASHYEKLKGSPEDNEQKQLFVEQHKHYLDEIIEQISEFSKRVILADANLDKVLSAYNKHRDKPIREQAENIIHLFTLTNLGAPAAFKYFDTTIDRKRYTSTKEVLDATLIHQSITGLYETRIDLSQLGGDGGGGGGGSGSSGGWVQEISDSRPMLHIYLNGRRFLGLLNTGADKTCIAGRDWPANWPIHQTESSLQGLGMACGVARSSQPLRWQHEDKSGIIHPFVIPTLPFTLWGRDIMKDIKVRLMTDSPDDSQDLMIGAIESNLFADQISWKSDQPVWLNQWPLKQEKLQALQQLVTEQLQLGHLEESNSPWNTPVFVIKKKSGKWRLLQDLRAVNATMHDMGALQPGLPSPVAVPKGWEIIIIDLQDCFFNIKLHPEDCKRFAFSVPSPNFKRPYQRFQWKVLPQGMKNSPTLCQKFVDKAILTVRDKYQDSYIVHYMDDILLAHPSRSIVDEILTSMIQALNKHGLVVSTEKIQKYDNLKYLGTHIQGDSVSYQKLQIRTDKLRTLNDFQKLLGNINWIRPFLKLTTGELKPLFEILNPDSNPISTRKLTPEACKALQLMNERLSTARVKRLDLSQPWSLCILKTEYTPTACLWQDGVVEWIHLPHISPKVITPYDIFCTQLIIKGRHRSKELFSKDPDYIVVPYTKVQFDLLLQEKEDWPISLLGFLGEVHFHLPKDPLLTFTLQTAIIFPHMTSTTPLEKGIVIFTDGSANGRSVTYIQGREPIIKENTQNTAQQAEIVAVITAFEEVSQPFNLYTDSKYVTGLFPEIETATLSPRTKIYTELKHLQRLIHKRQEKFYIGHIRGHTGLPGPLAQGNAYADSLTRILTAGKRTADGSEFEKRTADGSEFESPKKKAKVE

SEQ ID NO: 3248 - protein, 2116 aa, synthetic construct
MPAAKRVKLDGGDKKYSIGLDIGTNSVGWAVITDEYKVPSKKFKVLGNTDRHSIKKNLIGALLFDSGETAEATRLKRTARRRYTRRKNRICYLQEIFSNEMAKVDDSFFHRLEESFLVEEDKKHERHPIFGNIVDEVAYHEKYPTIYHLRKKLVDSTDKADLRLIYLALAHMIKFRGHFLIEGDLNPDNSDVDKLFIQLVQTYNQLFEENPINASGVDAKAILSARLSKSRRLENLIAQLPGEKKNGLFGNLIALSLGLTPNFKSNFDLAEDAKLQLSKDTYDDDLDNLLAQIGDQYADLFLAAKNLSDAILLSDILRVNTEITKAPLSASMIKRYDEHHQDLTLLKALVRQQLPEKYKEIFFDQSKNGYAGYIDGGASQEEFYKFIKPILEKMDGTEELLVKLNREDLLRKQRTFDNGSIPHQIHLGELHAILRRQEDFYPFLKDNREKIEKILTFRIPYYVGPLARGNSRFAWMTRKSEETITPWNFEEVVDKGASAQSFIERMTNFDKNLPNEKVLPKHSLLYEYFTVYNELTKVKYVTEGMRKPAFLSGEQKKAIVDLLFKTNRKVTVKQLKEDYFKKIECFDSVEISGVEDRFNASLGTYHDLLKIIKDKDFLDNEENEDILEDIVLTLTLFEDREMIEERLKTYAHLFDDKVMKQLKRRRYTGWGRLSRKLINGIRDKQSGKTILDFLKSDGFANRNFMQLIHDDSLTFKEDIQKAQVSGQGDSLHEHIANLAGSPAIKKGILQTVKVVDELVKVMGRHKPENIVIEMARENQTTQKGQKNSRERMKRIEEGIKELGSQILKEHPVENTQLQNEKLYLYYLQNGRDMYVDQELDINRLSDYDVDHIVPQSFLKDDSIDNKVLTRSDKARGKSDNVPSEEVVKKMKNYWRQLLNAKLITQRKFDNLTKAERGGLSELDKAGFIKRQLVETRQITKHVAQILDSRMNTKYDENDKLIREVKVITLKSKLVSDFRKDFQFYKVREINNYHHAHDAYLNAVVGTALIKKYPKLESEFVYGDYKVYDVRKMIAKSEQEIGKATAKYFFYSNIMNFFKTEITLANGEIRKRPLIETNGETGEIVWDKGRDFATVRKVLSMPQVNIVKKTEVQTGGFSKESILPKRNSDKLIARKKDWDPKKYGGFDSPTVAYSVLVVAKVEKGKSKKLKSVKELLGITIMERSSFEKNPIDFLEAKGYKEVKKDLIIKLPKYSLFELENGRKRMLASAGELQKGNELALPSKYVNFLYLASHYEKLKGSPEDNEQKQLFVEQHKHYLDEIIEQISEFSKRVILADANLDKVLSAYNKHRDKPIREQAENIIHLFTLTNLGAPAAFKYFDTTIDRKRYTSTKEVLDATLIHQSITGLYETRIDLSQLGGDGGGGGEAAAKGSSGGWVQEISDSRPMLHIYLNGRRFLGLLNTGADKTCIAGRDWPANWPIHQTESSLQGLGMACGVARSSQPLRWQHEDKSGIIHPFVIPTLPFTLWGRDIMKDIKVRLMTDSPDDSQDLMIGAIESNLFADQISWKSDQPVWLNQWPLKQEKLQALQQLVTEQLQLGHLEESNSPWNTPVFVIKKKSGKWRLLQDLRAVNATMHDMGALQPGLPSPVAPPKGWEIIIIDLQDCFFNIKLHPEDCKRFAFSVPSPNFKRPYQRFQWKVLPQGMKNSPTLCQKFVDKAILTVRDKYQDSYIVHYMDDILLAHPSRSIVDEILTSMIQALNKHGLVVSTEKIQKYDNLKYLGTHIQGDSVSYQKLQIRTDKLRTLNDFQKLLGNINWIRPFLKLTTGELKPLFEILNPDSNPISTRKLTPEACKALQLMNERLSTARVKRLDLSQPWSLCILKTEYTPTACLWQDGVVEWIHLPHISPKVITPYDIFCTQLIIKGRHRSKELFSKDPDYIVVPYTKVQFDLLLQEKEDWPISLLGFLGEVHFHLPKDPLLTFTLQTAIIFPHMTSTTPLEKGIVIFTDGSANGRSVTYIQGREPIIKENTQNTAQQAEIVAVITAFEEVSQPFNLYTDSKYVTGLFPEIETATLSPRTKIYTELKHLQRLIHKRQEKFYIGHIRGHTGLPGPLAQGNAYADSLTRILTAGKRTADGSEFEKRTADGSEFESPKKKAKVE

SEQ ID NO: 3249 - protein, 2116 aa, synthetic construct
MPAAKRVKLDGGDKKYSIGLDIGTNSVGWAVITDEYKVPSKKFKVLGNTDRHSIKKNLIGALLFDSGETAEATRLKRTARRRYTRRKNRICYLQEIFSNEMAKVDDSFFHRLEESFLVEEDKKHERHPIFGNIVDEVAYHEKYPTIYHLRKKLVDSTDKADLRLIYLALAHMIKFRGHFLIEGDLNPDNSDVDKLFIQLVQTYNQLFEENPINASGVDAKAILSARLSKSRRLENLIAQLPGEKKNGLFGNLIALSLGLTPNFKSNFDLAEDAKLQLSKDTYDDDLDNLLAQIGDQYADLFLAAKNLSDAILLSDILRVNTEITKAPLSASMIKRYDEHHQDLTLLKALVRQQLPEKYKEIFFDQSKNGYAGYIDGGASQEEFYKFIKPILEKMDGTEELLVKLNREDLLRKQRTFDNGSIPHQIHLGELHAILRRQEDFYPFLKDNREKIEKILTFRIPYYVGPLARGNSRFAWMTRKSEETITPWNFEEVVDKGASAQSFIERMTNFDKNLPNEKVLPKHSLLYEYFTVYNELTKVKYVTEGMRKPAFLSGEQKKAIVDLLFKTNRKVTVKQLKEDYFKKIECFDSVEISGVEDRFNASLGTYHDLLKIIKDKDFLDNEENEDILEDIVLTLTLFEDREMIEERLKTYAHLFDDKVMKQLKRRRYTGWGRLSRKLINGIRDKQSGKTILDFLKSDGFANRNFMQLIHDDSLTFKEDIQKAQVSGQGDSLHEHIANLAGSPAIKKGILQTVKVVDELVKVMGRHKPENIVIEMARENQTTQKGQKNSRERMKRIEEGIKELGSQILKEHPVENTQLQNEKLYLYYLQNGRDMYVDQELDINRLSDYDVDHIVPQSFLKDDSIDNKVLTRSDKARGKSDNVPSEEVVKKMKNYWRQLLNAKLITQRKFDNLTKAERGGLSELDKAGFIKRQLVETRQITKHVAQILDSRMNTKYDENDKLIREVKVITLKSKLVSDFRKDFQFYKVREINNYHHAHDAYLNAVVGTALIKKYPKLESEFVYGDYKVYDVRKMIAKSEQEIGKATAKYFFYSNIMNFFKTEITLANGEIRKRPLIETNGETGEIVWDKGRDFATVRKVLSMPQVNIVKKTEVQTGGFSKESILPKRNSDKLIARKKDWDPKKYGGFDSPTVAYSVLVVAKVEKGKSKKLKSVKELLGITIMERSSFEKNPIDFLEAKGYKEVKKDLIIKLPKYSLFELENGRKRMLASAGELQKGNELALPSKYVNFLYLASHYEKLKGSPEDNEQKQLFVEQHKHYLDEIIEQISEFSKRVILADANLDKVLSAYNKHRDKPIREQAENIIHLFTLTNLGAPAAFKYFDTTIDRKRYTSTKEVLDATLIHQSITGLYETRIDLSQLGGDGGEAAAKGGGGSSGGWVQEISDSRPMLHIYLNGRRFLGLLNTGADKTCIAGRDWPANWPIHQTESSLQGLGMACGVARSSQPLRWQHEDKSGIIHPFVIPTLPFTLWGRDIMKDIKVRLMTDSPDDSQDLMIGAIESNLFADQISWKSDQPVWLNQWPLKQEKLQALQQLVTEQLQLGHLEESNSPWNTPVFVIKKKSGKWRLLQDLRAVNATMHDMGALQPGLPSPVAPPKGWEIIIIDLQDCFFNIKLHPEDCKRFAFSVPSPNFKRPYQRFQWKVLPQGMKNSPTLCQKFVDKAILTVRDKYQDSYIVHYMDDILLAHPSRSIVDEILTSMIQALNKHGLVVSTEKIQKYDNLKYLGTHIQGDSVSYQKLQIRTDKLRTLNDFQKLLGNINWIRPFLKLTTGELKPLFEILNPDSNPISTRKLTPEACKALQLMNERLSTARVKRLDLSQPWSLCILKTEYTPTACLWQDGVVEWIHLPHISPKVITPYDIFCTQLIIKGRHRSKELFSKDPDYIVVPYTKVQFDLLLQEKEDWPISLLGFLGEVHFHLPKDPLLTFTLQTAIIFPHMTSTTPLEKGIVIFTDGSANGRSVTYIQGREPIIKENTQNTAQQAEIVAVITAFEEVSQPFNLYTDSKYVTGLFPEIETATLSPRTKIYTELKHLQRLIHKRQEKFYIGHIRGHTGLPGPLAQGNAYADSLTRILTAGKRTADGSEFEKRTADGSEFESPKKKAKVE

SEQ ID NO: 3250 - protein, 2116 aa, synthetic construct
MPAAKRVKLDGGDKKYSIGLDIGTNSVGWAVITDEYKVPSKKFKVLGNTDRHSIKKNLIGALLFDSGETAEATRLKRTARRRYTRRKNRICYLQEIFSNEMAKVDDSFFHRLEESFLVEEDKKHERHPIFGNIVDEVAYHEKYPTIYHLRKKLVDSTDKADLRLIYLALAHMIKFRGHFLIEGDLNPDNSDVDKLFIQLVQTYNQLFEENPINASGVDAKAILSARLSKSRRLENLIAQLPGEKKNGLFGNLIALSLGLTPNFKSNFDLAEDAKLQLSKDTYDDDLDNLLAQIGDQYADLFLAAKNLSDAILLSDILRVNTEITKAPLSASMIKRYDEHHQDLTLLKALVRQQLPEKYKEIFFDQSKNGYAGYIDGGASQEEFYKFIKPILEKMDGTEELLVKLNREDLLRKQRTFDNGSIPHQIHLGELHAILRRQEDFYPFLKDNREKIEKILTFRIPYYVGPLARGNSRFAWMTRKSEETITPWNFEEVVDKGASAQSFIERMTNFDKNLPNEKVLPKHSLLYEYFTVYNELTKVKYVTEGMRKPAFLSGEQKKAIVDLLFKTNRKVTVKQLKEDYFKKIECFDSVEISGVEDRFNASLGTYHDLLKIIKDKDFLDNEENEDILEDIVLTLTLFEDREMIEERLKTYAHLFDDKVMKQLKRRRYTGWGRLSRKLINGIRDKQSGKTILDFLKSDGFANRNFMQLIHDDSLTFKEDIQKAQVSGQGDSLHEHIANLAGSPAIKKGILQTVKVVDELVKVMGRHKPENIVIEMARENQTTQKGQKNSRERMKRIEEGIKELGSQILKEHPVENTQLQNEKLYLYYLQNGRDMYVDQELDINRLSDYDVDHIVPQSFLKDDSIDNKVLTRSDKARGKSDNVPSEEVVKKMKNYWRQLLNAKLITQRKFDNLTKAERGGLSELDKAGFIKRQLVETRQITKHVAQILDSRMNTKYDENDKLIREVKVITLKSKLVSDFRKDFQFYKVREINNYHHAHDAYLNAVVGTALIKKYPKLESEFVYGDYKVYDVRKMIAKSEQEIGKATAKYFFYSNIMNFFKTEITLANGEIRKRPLIETNGETGEIVWDKGRDFATVRKVLSMPQVNIVKKTEVQTGGFSKESILPKRNSDKLIARKKDWDPKKYGGFDSPTVAYSVLVVAKVEKGKSKKLKSVKELLGITIMERSSFEKNPIDFLEAKGYKEVKKDLIIKLPKYSLFELENGRKRMLASAGELQKGNELALPSKYVNFLYLASHYEKLKGSPEDNEQKQLFVEQHKHYLDEIIEQISEFSKRVILADANLDKVLSAYNKHRDKPIREQAENIIHLFTLTNLGAPAAFKYFDTTIDRKRYTSTKEVLDATLIHQSITGLYETRIDLSQLGGDGGEAAAKGSSGGSGGVQEISDSRPMLHIYLNGRRFLGLLDTGADKTCIAGRDWPANWPIHQTESSLQGLGMACGVARSSQPLRWQHEDKSGIIHPFVIPTLPFTLWGRDIMKDIKVRLMTDSPDDSQDLMIGAIESNLFADQISWKSDQPVWLNQWPLKQEKLQALQQLVTEQLQLGHLEESNSPWNTPVFVIKKKSGKWRLLQDLRAVNATMHDMGALQPGLPSPPAVPKGWEIIIIDLQDCFFNIKLHPEDCKRFAFSVPSPNFKRPYQRFQWKVLPQGMKNSPTLCQKFVDKAILTVRDKYQDSYIVHYMDDILLAHPSRSIVDEILTSMIQALNKHGLVVSTEKIQKYDNLKYLGTHIQGDSVSYQKLQIRTDKLRTLNDFQKLLGNINWIRPFLKLTTGELKPLFEILNPDSNPISTRKLTPEACKALQLMNERLSTARVKRLDLSQPWSLCILKTEYTPTACLWQDGVVEWIHLPHISPKVITPYDIFCTQLIIKGRHRSKELFSKDPDYIVVPYTKVQFDLLLQEKEDWPISLLGFLGEVHFHLPKDPLLTFTLQTAIIFPHMTSTTPLEKGIVIFTDGSANGRSVTYIQGREPIIKENTQNTAQQAEIVAVITAFEEVSQPFNLYTDSKYVTGLFPEIETATLSPRTKIYTELKHLQRLIHKRQEKFYIGHIRGHTGLPGPLAQGNAYADSLTRILTAAGKRTADGSEFEKRTADGSEFESPKKKAKVE

SEQ ID NO: 3251 - protein, 2116 aa, synthetic construct
MPAAKRVKLDGGDKKYSIGLDIGTNSVGWAVITDEYKVPSKKFKVLGNTDRHSIKKNLIGALLFDSGETAEATRLKRTARRRYTRRKNRICYLQEIFSNEMAKVDDSFFHRLEESFLVEEDKKHERHPIFGNIVDEVAYHEKYPTIYHLRKKLVDSTDKADLRLIYLALAHMIKFRGHFLIEGDLNPDNSDVDKLFIQLVQTYNQLFEENPINASGVDAKAILSARLSKSRRLENLIAQLPGEKKNGLFGNLIALSLGLTPNFKSNFDLAEDAKLQLSKDTYDDDLDNLLAQIGDQYADLFLAAKNLSDAILLSDILRVNTEITKAPLSASMIKRYDEHHQDLTLLKALVRQQLPEKYKEIFFDQSKNGYAGYIDGGASQEEFYKFIKPILEKMDGTEELLVKLNREDLLRKQRTFDNGSIPHQIHLGELHAILRRQEDFYPFLKDNREKIEKILTFRIPYYVGPLARGNSRFAWMTRKSEETITPWNFEEVVDKGASAQSFIERMTNFDKNLPNEKVLPKHSLLYEYFTVYNELTKVKYVTEGMRKPAFLSGEQKKAIVDLLFKTNRKVTVKQLKEDYFKKIECFDSVEISGVEDRFNASLGTYHDLLKIIKDKDFLDNEENEDILEDIVLTLTLFEDREMIEERLKTYAHLFDDKVMKQLKRRRYTGWGRLSRKLINGIRDKQSGKTILDFLKSDGFANRNFMQLIHDDSLTFKEDIQKAQVSGQGDSLHEHIANLAGSPAIKKGILQTVKVVDELVKVMGRHKPENIVIEMARENQTTQKGQKNSRERMKRIEEGIKELGSQILKEHPVENTQLQNEKLYLYYLQNGRDMYVDQELDINRLSDYDVDHIVPQSFLKDDSIDNKVLTRSDKARGKSDNVPSEEVVKKMKNYWRQLLNAKLITQRKFDNLTKAERGGLSELDKAGFIKRQLVETRQITKHVAQILDSRMNTKYDENDKLIREVKVITLKSKLVSDFRKDFQFYKVREINNYHHAHDAYLNAVVGTALIKKYPKLESEFVYGDYKVYDVRKMIAKSEQEIGKATAKYFFYSNIMNFFKTEITLANGEIRKRPLIETNGETGEIVWDKGRDFATVRKVLSMPQVNIVKKTEVQTGGFSKESILPKRNSDKLIARKKDWDPKKYGGFDSPTVAYSVLVVAKVEKGKSKKLKSVKELLGITIMERSSFEKNPIDFLEAKGYKEVKKDLIIKLPKYSLFELENGRKRMLASAGELQKGNELALPSKYVNFLYLASHYEKLKGSPEDNEQKQLFVEQHKHYLDEIIEQISEFSKRVILADANLDKVLSAYNKHRDKPIREQAENIIHLFTLTNLGAPAAFKYFDTTIDRKRYTSTKEVLDATLIHQSITGLYETRIDLSQLGGDGGPAPEAAAKGGSGGVQEISDSRPMLHIYLNGRRFLGLLDTGADKTCIAGRDWPANWPIHQTESSLQGLGMACGVARSSQPLRWQHEDKSGIIHPFVIPTLPFTLWGRDIMKDIKVRLMTDSPDDSQDLMIGAIESNLFADQISWKSDQPVWLNQWPLKQEKLQALQQLVTEQLQLGHLEESNSPWNTPVFVIKKKSGKWRLLQDLRAVNATMHDMGALQPGLPSPPAVPKGWEIIIIDLQDCFFNIKLHPEDCKRFAFSVPSPNFKRPYQRFQWKVLPQGMKNSPTLCQKFVDKAILTVRDKYQDSYIVHYMDDILLAHPSRSIVDEILTSMIQALNKHGLVVSTEKIQKYDNLKYLGTHIQGDSVSYQKLQIRTDKLRTLNDFQKLLGNINWIRPFLKLTTGELKPLFEILNPDSNPISTRKLTPEACKALQLMNERLSTARVKRLDLSQPWSLCILKTEYTPTACLWQDGVVEWIHLPHISPKVITPYDIFCTQLIIKGRHRSKELFSKDPDYIVVPYTKVQFDLLLQEKEDWPISLLGFLGEVHFHLPKDPLLTFTLQTAIIFPHMTSTTPLEKGIVIFTDGSANGRSVTYIQGREPIIKENTQNTAQQAEIVAVITAFEEVSQPFNLYTDSKYVTGLFPEIETATLSPRTKIYTELKHLQRLIHKRQEKFYIGHIRGHTGLPGPLAQGNAYADSLTRILTAAGKRTADGSEFEKRTADGSEFESPKKKAKVE

SEQ ID NO: 3252 - protein, 2116 aa, synthetic construct
MPAAKRVKLDGGDKKYSIGLDIGTNSVGWAVITDEYKVPSKKFKVLGNTDRHSIKKNLIGALLFDSGETAEATRLKRTARRRYTRRKNRICYLQEIFSNEMAKVDDSFFHRLEESFLVEEDKKHERHPIFGNIVDEVAYHEKYPTIYHLRKKLVDSTDKADLRLIYLALAHMIKFRGHFLIEGDLNPDNSDVDKLFIQLVQTYNQLFEENPINASGVDAKAILSARLSKSRRLENLIAQLPGEKKNGLFGNLIALSLGLTPNFKSNFDLAEDAKLQLSKDTYDDDLDNLLAQIGDQYADLFLAAKNLSDAILLSDILRVNTEITKAPLSASMIKRYDEHHQDLTLLKALVRQQLPEKYKEIFFDQSKNGYAGYIDGGASQEEFYKFIKPILEKMDGTEELLVKLNREDLLRKQRTFDNGSIPHQIHLGELHAILRRQEDFYPFLKDNREKIEKILTFRIPYYVGPLARGNSRFAWMTRKSEETITPWNFEEVVDKGASAQSFIERMTNFDKNLPNEKVLPKHSLLYEYFTVYNELTKVKYVTEGMRKPAFLSGEQKKAIVDLLFKTNRKVTVKQLKEDYFKKIECFDSVEISGVEDRFNASLGTYHDLLKIIKDKDFLDNEENEDILEDIVLTLTLFEDREMIEERLKTYAHLFDDKVMKQLKRRRYTGWGRLSRKLINGIRDKQSGKTILDFLKSDGFANRNFMQLIHDDSLTFKEDIQKAQVSGQGDSLHEHIANLAGSPAIKKGILQTVKVVDELVKVMGRHKPENIVIEMARENQTTQKGQKNSRERMKRIEEGIKELGSQILKEHPVENTQLQNEKLYLYYLQNGRDMYVDQELDINRLSDYDVDHIVPQSFLKDDSIDNKVLTRSDKARGKSDNVPSEEVVKKMKNYWRQLLNAKLITQRKFDNLTKAERGGLSELDKAGFIKRQLVETRQITKHVAQILDSRMNTKYDENDKLIREVKVITLKSKLVSDFRKDFQFYKVREINNYHHAHDAYLNAVVGTALIKKYPKLESEFVYGDYKVYDVRKMIAKSEQEIGKATAKYFFYSNIMNFFKTEITLANGEIRKRPLIETNGETGEIVWDKGRDFATVRKVLSMPQVNIVKKTEVQTGGFSKESILPKRNSDKLIARKKDWDPKKYGGFDSPTVAYSVLVVAKVEKGKSKKLKSVKELLGITIMERSSFEKNPIDFLEAKGYKEVKKDLIIKLPKYSLFELENGRKRMLASAGELQKGNELALPSKYVNFLYLASHYEKLKGSPEDNEQKQLFVEQHKHYLDEIIEQISEFSKRVILADANLDKVLSAYNKHRDKPIREQAENIIHLFTLTNLGAPAAFKYFDTTIDRKRYTSTKEVLDATLIHQSITGLYETRIDLSQLGGDGGGGGGSSEAAAKGGVQEISDSRPMLHIYLNGRRFLGLLDTGADKTCIAGRDWPANWPIHQTESSLQGLGMACGVARSSQPLRWQHEDKSGIIHPFVIPTLPFTLWGRDIMKDIKVRLMTDSPDDSQDLMIGAIESNLFADQISWKSDQPVWLNQWPLKQEKLQALQQLVTEQLQLGHLEESNSPWNTPVFVIKKKSGKWRLLQDLRAVNATMHDMGALQPGLPSPVAVPKGWEIIIIDLQDCFFNIKLHPEDCKRFAFSVPSPNFKRPYQRFQWKVLPQGMKNSPTLCQKFVDKAILTVRDKYQDSYIVHYMDDILLAHPSRSIVDEILTSMIQALNKHGLVVSTEKIQKYDNLKYLGTHIQGDSVSYQKLQIRTDKLRTLNDFQKLLGNINWIRPFLKLTTGELKPLFEILNPDSNPISTRKLTPEACKALQLMNERLSTARVKRLDLSQPWSLCILKTEYTPTACLWQDGVVEWIHLPHISPKVITPYDIFCTQLIIKGRHRSKELFSKDPDYIVVPYTKVQFDLLLQEKEDWPISLLGFLGEVHFHLPKDPLLTFTLQTAIIFPHMTSTTPLEKGIVIFTDGSANGRSVTYIQGREPIIKENTQNTAQQAEIVAVITAFEEVSQPFNLYTDSKYVTGLFPEIETATLSPRTKIYTELKHLQRLIHKRQEKFYIGHIRGHTGLPGPLAQGNAYADSLTRILTAAGKRTADGSEFEKRTADGSEFESPKKKAKVE

SEQ ID NO: 3253 - protein, 2114 aa, synthetic construct
MPAAKRVKLDGGDKKYSIGLDIGTNSVGWAVITDEYKVPSKKFKVLGNTDRHSIKKNLIGALLFDSGETAEATRLKRTARRRYTRRKNRICYLQEIFSNEMAKVDDSFFHRLEESFLVEEDKKHERHPIFGNIVDEVAYHEKYPTIYHLRKKLVDSTDKADLRLIYLALAHMIKFRGHFLIEGDLNPDNSDVDKLFIQLVQTYNQLFEENPINASGVDAKAILSARLSKSRRLENLIAQLPGEKKNGLFGNLIALSLGLTPNFKSNFDLAEDAKLQLSKDTYDDDLDNLLAQIGDQYADLFLAAKNLSDAILLSDILRVNTEITKAPLSASMIKRYDEHHQDLTLLKALVRQQLPEKYKEIFFDQSKNGYAGYIDGGASQEEFYKFIKPILEKMDGTEELLVKLNREDLLRKQRTFDNGSIPHQIHLGELHAILRRQEDFYPFLKDNREKIEKILTFRIPYYVGPLARGNSRFAWMTRKSEETITPWNFEEVVDKGASAQSFIERMTNFDKNLPNEKVLPKHSLLYEYFTVYNELTKVKYVTEGMRKPAFLSGEQKKAIVDLLFKTNRKVTVKQLKEDYFKKIECFDSVEISGVEDRFNASLGTYHDLLKIIKDKDFLDNEENEDILEDIVLTLTLFEDREMIEERLKTYAHLFDDKVMKQLKRRRYTGWGRLSRKLINGIRDKQSGKTILDFLKSDGFANRNFMQLIHDDSLTFKEDIQKAQVSGQGDSLHEHIANLAGSPAIKKGILQTVKVVDELVKVMGRHKPENIVIEMARENQTTQKGQKNSRERMKRIEEGIKELGSQILKEHPVENTQLQNEKLYLYYLQNGRDMYVDQELDINRLSDYDVDHIVPQSFLKDDSIDNKVLTRSDKARGKSDNVPSEEVVKKMKNYWRQLLNAKLITQRKFDNLTKAERGGLSELDKAGFIKRQLVETRQITKHVAQILDSRMNTKYDENDKLIREVKVITLKSKLVSDFRKDFQFYKVREINNYHHAHDAYLNAVVGTALIKKYPKLESEFVYGDYKVYDVRKMIAKSEQEIGKATAKYFFYSNIMNFFKTEITLANGEIRKRPLIETNGETGEIVWDKGRDFATVRKVLSMPQVNIVKKTEVQTGGFSKESILPKRNSDKLIARKKDWDPKKYGGFDSPTVAYSVLVVAKVEKGKSKKLKSVKELLGITIMERSSFEKNPIDFLEAKGYKEVKKDLIIKLPKYSLFELENGRKRMLASAGELQKGNELALPSKYVNFLYLASHYEKLKGSPEDNEQKQLFVEQHKHYLDEIIEQISEFSKRVILADANLDKVLSAYNKHRDKPIREQAENIIHLFTLTNLGAPAAFKYFDTTIDRKRYTSTKEVLDATLIHQSITGLYETRIDLSQLGGDGGGGGGGSGSSGGVQEISDSRPMLHIYLNGRRFLGLLDTGADKTCIAGRDWPANWPIHQTESSLQGLGMACGVARSSQPLRWQHEDKSGIIHPFVIPTLPFTLWGRDIMKDIKVRLMTDSPDDSQDLMIGAIESNLFADQISWKSDQPVWLNQWPLKQEKLQALQQLVTEQLQLGHLEESNSPWNTPVFVIKKKSGKWRLLQDLRAVNATMHDMGALQPGLPSPVAVPKGWEIIIIDLQDCFFNIKLHPEDCKRFAFSVPSPNFKRPYQRFQWKVLPQGMKNSPTLCQKFVDKAILTVRDKYQDSYIVHYMDDILLAHPSRSIVDEILTSMIQALNKHGLVVSTEKIQKYDNLKYLGTHIQGDSVSYQKLQIRTDKLRTLNDFQKLLGNINWIRPFLKLTTGELKPLFEILNPDSNPISTRKLTPEACKALQLMNERLSTARVKRLDLSQPWSLCILKTEYTPTACLWQDGVVEWIHLPHISPKVITPYDIFCTQLIIKGRHRSKELFSKDPDYIVVPYTKVQFDLLLQEKEDWPISLLGFLGEVHFHLPKDPLLTFTLQTAIIFPHMTSTTPLEKGIVIFTDGSANGRSVTYIQGREPIIKENTQNTAQQAEIVAVITAFEEVSQPFNLYTDSKYVTGLFPEIETATLSPRTKIYTELKHLQRLIHKRQEKFYIGHIRGHTGLPGPLAQGNAYADSLTRILTAAGKRTADGSEFEKRTADGSEFESPKKKAKVE

SEQ ID NO: 3254 - protein, 2125 aa, synthetic construct
MPAAKRVKLDGGDKKYSIGLDIGTNSVGWAVITDEYKVPSKKFKVLGNTDRHSIKKNLIGALLFDSGETAEATRLKRTARRRYTRRKNRICYLQEIFSNEMAKVDDSFFHRLEESFLVEEDKKHERHPIFGNIVDEVAYHEKYPTIYHLRKKLVDSTDKADLRLIYLALAHMIKFRGHFLIEGDLNPDNSDVDKLFIQLVQTYNQLFEENPINASGVDAKAILSARLSKSRRLENLIAQLPGEKKNGLFGNLIALSLGLTPNFKSNFDLAEDAKLQLSKDTYDDDLDNLLAQIGDQYADLFLAAKNLSDAILLSDILRVNTEITKAPLSASMIKRYDEHHQDLTLLKALVRQQLPEKYKEIFFDQSKNGYAGYIDGGASQEEFYKFIKPILEKMDGTEELLVKLNREDLLRKQRTFDNGSIPHQIHLGELHAILRRQEDFYPFLKDNREKIEKILTFRIPYYVGPLARGNSRFAWMTRKSEETITPWNFEEVVDKGASAQSFIERMTNFDKNLPNEKVLPKHSLLYEYFTVYNELTKVKYVTEGMRKPAFLSGEQKKAIVDLLFKTNRKVTVKQLKEDYFKKIECFDSVEISGVEDRFNASLGTYHDLLKIIKDKDFLDNEENEDILEDIVLTLTLFEDREMIEERLKTYAHLFDDKVMKQLKRRRYTGWGRLSRKLINGIRDKQSGKTILDFLKSDGFANRNFMQLIHDDSLTFKEDIQKAQVSGQGDSLHEHIANLAGSPAIKKGILQTVKVVDELVKVMGRHKPENIVIEMARENQTTQKGQKNSRERMKRIEEGIKELGSQILKEHPVENTQLQNEKLYLYYLQNGRDMYVDQELDINRLSDYDVDHIVPQSFLKDDSIDNKVLTRSDKARGKSDNVPSEEVVKKMKNYWRQLLNAKLITQRKFDNLTKAERGGLSELDKAGFIKRQLVETRQITKHVAQILDSRMNTKYDENDKLIREVKVITLKSKLVSDFRKDFQFYKVREINNYHHAHDAYLNAVVGTALIKKYPKLESEFVYGDYKVYDVRKMIAKSEQEIGKATAKYFFYSNIMNFFKTEITLANGEIRKRPLIETNGETGEIVWDKGRDFATVRKVLSMPQVNIVKKTEVQTGGFSKESILPKRNSDKLIARKKDWDPKKYGGFDSPTVAYSVLVVAKVEKGKSKKLKSVKELLGITIMERSSFEKNPIDFLEAKGYKEVKKDLIIKLPKYSLFELENGRKRMLASAGELQKGNELALPSKYVNFLYLASHYEKLKGSPEDNEQKQLFVEQHKHYLDEIIEQISEFSKRVILADANLDKVLSAYNKHRDKPIREQAENIIHLFTLTNLGAPAAFKYFDTTIDRKRYTSTKEVLDATLIHQSITGLYETRIDLSQLGGDGGGGGGSGGGGSGGGGSGGGGSGGVQEISDSRPMLHIYLNGRRFLGLLDTGADKTCIAGRDWPANWPIHQTESSLQGLGMACGVARSSQPLRWQHEDKSGIIHPFVIPTLPFTLWGRDIMKDIKVRLMTDSPDDSQDLMIGAIESNLFADQISWKSDQPVWLNQWPLKQEKLQALQQLVTEQLQLGHLEESNSPWNTPVFVIKKKSGKWRLLQDLRAVNATMHDMGALQPGLPSPVAVPKGWEIIIIDLQDCFFNIKLHPEDCKRFAFSVPSPNFKRPYQRFQWKVLPQGMKNSPTLCQKFVDKAILTVRDKYQDSYIVHYMDDILLAHPSRSIVDEILTSMIQALNKHGLVVSTEKIQKYDNLKYLGTHIQGDSVSYQKLQIRTDKLRTLNDFQKLLGNINWIRPFLKLTTGELKPLFEILNPDSNPISTRKLTPEACKALQLMNERLSTARVKRLDLSQPWSLCILKTEYTPTACLWQDGVVEWIHLPHISPKVITPYDIFCTQLIIKGRHRSKELFSKDPDYIVVPYTKVQFDLLLQEKEDWPISLLGFLGEVHFHLPKDPLLTFTLQTAIIFPHMTSTTPLEKGIVIFTDGSANGRSVTYIQGREPIIKENTQNTAQQAEIVAVITAFEEVSQPFNLYTDSKYVTGLFPEIETATLSPRTKIYTELKHLQRLIHKRQEKFYIGHIRGHTGLPGPLAQGNAYADSLTRILTAAGKRTADGSEFEKRTADGSEFESPKKKAKVE

SEQ ID NO: 3255 - protein, 2116 aa, synthetic construct
MPAAKRVKLDGGDKKYSIGLDIGTNSVGWAVITDEYKVPSKKFKVLGNTDRHSIKKNLIGALLFDSGETAEATRLKRTARRRYTRRKNRICYLQEIFSNEMAKVDDSFFHRLEESFLVEEDKKHERHPIFGNIVDEVAYHEKYPTIYHLRKKLVDSTDKADLRLIYLALAHMIKFRGHFLIEGDLNPDNSDVDKLFIQLVQTYNQLFEENPINASGVDAKAILSARLSKSRRLENLIAQLPGEKKNGLFGNLIALSLGLTPNFKSNFDLAEDAKLQLSKDTYDDDLDNLLAQIGDQYADLFLAAKNLSDAILLSDILRVNTEITKAPLSASMIKRYDEHHQDLTLLKALVRQQLPEKYKEIFFDQSKNGYAGYIDGGASQEEFYKFIKPILEKMDGTEELLVKLNREDLLRKQRTFDNGSIPHQIHLGELHAILRRQEDFYPFLKDNREKIEKILTFRIPYYVGPLARGNSRFAWMTRKSEETITPWNFEEVVDKGASAQSFIERMTNFDKNLPNEKVLPKHSLLYEYFTVYNELTKVKYVTEGMRKPAFLSGEQKKAIVDLLFKTNRKVTVKQLKEDYFKKIECFDSVEISGVEDRFNASLGTYHDLLKIIKDKDFLDNEENEDILEDIVLTLTLFEDREMIEERLKTYAHLFDDKVMKQLKRRRYTGWGRLSRKLINGIRDKQSGKTILDFLKSDGFANRNFMQLIHDDSLTFKEDIQKAQVSGQGDSLHEHIANLAGSPAIKKGILQTVKVVDELVKVMGRHKPENIVIEMARENQTTQKGQKNSRERMKRIEEGIKELGSQILKEHPVENTQLQNEKLYLYYLQNGRDMYVDQELDINRLSDYDVDHIVPQSFLKDDSIDNKVLTRSDKARGKSDNVPSEEVVKKMKNYWRQLLNAKLITQRKFDNLTKAERGGLSELDKAGFIKRQLVETRQITKHVAQILDSRMNTKYDENDKLIREVKVITLKSKLVSDFRKDFQFYKVREINNYHHAHDAYLNAVVGTALIKKYPKLESEFVYGDYKVYDVRKMIAKSEQEIGKATAKYFFYSNIMNFFKTEITLANGEIRKRPLIETNGETGEIVWDKGRDFATVRKVLSMPQVNIVKKTEVQTGGFSKESILPKRNSDKLIARKKDWDPKKYGGFDSPTVAYSVLVVAKVEKGKSKKLKSVKELLGITIMERSSFEKNPIDFLEAKGYKEVKKDLIIKLPKYSLFELENGRKRMLASAGELQKGNELALPSKYVNFLYLASHYEKLKGSPEDNEQKQLFVEQHKHYLDEIIEQISEFSKRVILADANLDKVLSAYNKHRDKPIREQAENIIHLFTLTNLGAPAAFKYFDTTIDRKRYTSTKEVLDATLIHQSITGLYETRIDLSQLGGDGGPAPEAAAKGGGGGVQEISDSRPMLHIYLNGRRFLGLLDTGADKTCIAGRDWPANWPIHQTESSLQGLGMACGVARSSQPLRWQHEDKSGIIHPFVIPTLPFTLWGRDIMKDIKVRLMTDSPDDSQDLMIGAIESNLFADQISWKSDQPVWLNQWPLKQEKLQALQQLVTEQLQLGHLEESNSPWNTPVFVIKKKSGKWRLLQDLRAVNATMHDMGALQPGLPSPVAVPKGWEIIIIDLQDCFFNIKLHPEDCKRFAFSVPSPNFKRPYQRFQWKVLPQGMKNSPTLCQKFVDKAILTVRDKYQDSYIVHYMDDILLAHPSRSIVDEILTSMIQALNKHGLVVSTEKIQKYDNLKYLGTHIQGDSVSYQKLQIRTDKLRTLNDFQKLLGNINWIRPFLKLTTGELKPLFEILNPDSNPISTRKLTPEACKALQLMNERLSTARVKRLDLSQPWSLCILKTEYTPTACLWQDGVVEWIHLPHISPKVITPYDIFCTQLIIKGRHRSKELFSKDPDYIVVPYTKVQFDLLLQEKEDWPISLLGFLGEVHFHLPKDPLLTFTLQTAIIFPHMTSTTPLEKGIVIFTDGSANGRSVTYIQGREPIIKENTQNTAQQAEIVAVITAFEEVSQPFNLYTDSKYVTGLFPEIETATLSPRTKIYTELKHLQRLIHKRQEKFYIGHIRGHTGLPGPLAQGNAYADSLTRILTAAGKRTADGSEFEKRTADGSEFESPKKKAKVE

SEQ ID NO: 3256 - protein, 2112 aa, synthetic construct
MPAAKRVKLDGGDKKYSIGLDIGTNSVGWAVITDEYKVPSKKFKVLGNTDRHSIKKNLIGALLFDSGETAEATRLKRTARRRYTRRKNRICYLQEIFSNEMAKVDDSFFHRLEESFLVEEDKKHERHPIFGNIVDEVAYHEKYPTIYHLRKKLVDSTDKADLRLIYLALAHMIKFRGHFLIEGDLNPDNSDVDKLFIQLVQTYNQLFEENPINASGVDAKAILSARLSKSRRLENLIAQLPGEKKNGLFGNLIALSLGLTPNFKSNFDLAEDAKLQLSKDTYDDDLDNLLAQIGDQYADLFLAAKNLSDAILLSDILRVNTEITKAPLSASMIKRYDEHHQDLTLLKALVRQQLPEKYKEIFFDQSKNGYAGYIDGGASQEEFYKFIKPILEKMDGTEELLVKLNREDLLRKQRTFDNGSIPHQIHLGELHAILRRQEDFYPFLKDNREKIEKILTFRIPYYVGPLARGNSRFAWMTRKSEETITPWNFEEVVDKGASAQSFIERMTNFDKNLPNEKVLPKHSLLYEYFTVYNELTKVKYVTEGMRKPAFLSGEQKKAIVDLLFKTNRKVTVKQLKEDYFKKIECFDSVEISGVEDRFNASLGTYHDLLKIIKDKDFLDNEENEDILEDIVLTLTLFEDREMIEERLKTYAHLFDDKVMKQLKRRRYTGWGRLSRKLINGIRDKQSGKTILDFLKSDGFANRNFMQLIHDDSLTFKEDIQKAQVSGQGDSLHEHIANLAGSPAIKKGILQTVKVVDELVKVMGRHKPENIVIEMARENQTTQKGQKNSRERMKRIEEGIKELGSQILKEHPVENTQLQNEKLYLYYLQNGRDMYVDQELDINRLSDYDVDHIVPQSFLKDDSIDNKVLTRSDKARGKSDNVPSEEVVKKMKNYWRQLLNAKLITQRKFDNLTKAERGGLSELDKAGFIKRQLVETRQITKHVAQILDSRMNTKYDENDKLIREVKVITLKSKLVSDFRKDFQFYKVREINNYHHAHDAYLNAVVGTALIKKYPKLESEFVYGDYKVYDVRKMIAKSEQEIGKATAKYFFYSNIMNFFKTEITLANGEIRKRPLIETNGETGEIVWDKGRDFATVRKVLSMPQVNIVKKTEVQTGGFSKESILPKRNSDKLIARKKDWDPKKYGGFDSPTVAYSVLVVAKVEKGKSKKLKSVKELLGITIMERSSFEKNPIDFLEAKGYKEVKKDLIIKLPKYSLFELENGRKRMLASAGELQKGNELALPSKYVNFLYLASHYEKLKGSPEDNEQKQLFVEQHKHYLDEIIEQISEFSKRVILADANLDKVLSAYNKHRDKPIREQAENIIHLFTLTNLGAPAAFKYFDTTIDRKRYTSTKEVLDATLIHQSITGLYETRIDLSQLGGDGGPAPAPAPGGVQEISDSRPMLHIYLNGRRFLGLLDTGADKTCIAGRDWPANWPIHQTESSLQGLGMACGVARSSQPLRWQHEDKSGIIHPFVIPTLPFTLWGRDIMKDIKVRLMTDSPDDSQDLMIGAIESNLFADQISWKSDQPVWLNQWPLKQEKLQALQQLVTEQLQLGHLEESNSPWNTPVFVIKKKSGKWRLLQDLRAVNATMHDMGALQPGLPSPVAVPKGWEIIIIDLQDCFFNIKLHPEDCKRFAFSVPSPNFKRPYQRFQWKVLPQGMKNSPTLCQKFVDKAILTVRDKYQDSYIVHYMDDILLAHPSRSIVDEILTSMIQALNKHGLVVSTEKIQKYDNLKYLGTHIQGDSVSYQKLQIRTDKLRTLNDFQKLLGNINWIRPFLKLTTGELKPLFEILNPDSNPISTRKLTPEACKALQLMNERLSTARVKRLDLSQPWSLCILKTEYTPTACLWQDGVVEWIHLPHISPKVITPYDIFCTQLIIKGRHRSKELFSKDPDYIVVPYTKVQFDLLLQEKEDWPISLLGFLGEVHFHLPKDPLLTFTLQTAIIFPHMTSTTPLEKGIVIFTDGSANGRSVTYIQGREPIIKENTQNTAQQAEIVAVITAFEEVSQPFNLYTDSKYVTGLFPEIETATLSPRTKIYTELKHLQRLIHKRQEKFYIGHIRGHTGLPGPLAQGNAYADSLTRILTAAGKRTADGSEFEKRTADGSEFESPKKKAKVE

SEQ ID NO: 3257 - protein, 2116 aa, synthetic construct
MPAAKRVKLDGGDKKYSIGLDIGTNSVGWAVITDEYKVPSKKFKVLGNTDRHSIKKNLIGALLFDSGETAEATRLKRTARRRYTRRKNRICYLQEIFSNEMAKVDDSFFHRLEESFLVEEDKKHERHPIFGNIVDEVAYHEKYPTIYHLRKKLVDSTDKADLRLIYLALAHMIKFRGHFLIEGDLNPDNSDVDKLFIQLVQTYNQLFEENPINASGVDAKAILSARLSKSRRLENLIAQLPGEKKNGLFGNLIALSLGLTPNFKSNFDLAEDAKLQLSKDTYDDDLDNLLAQIGDQYADLFLAAKNLSDAILLSDILRVNTEITKAPLSASMIKRYDEHHQDLTLLKALVRQQLPEKYKEIFFDQSKNGYAGYIDGGASQEEFYKFIKPILEKMDGTEELLVKLNREDLLRKQRTFDNGSIPHQIHLGELHAILRRQEDFYPFLKDNREKIEKILTFRIPYYVGPLARGNSRFAWMTRKSEETITPWNFEEVVDKGASAQSFIERMTNFDKNLPNEKVLPKHSLLYEYFTVYNELTKVKYVTEGMRKPAFLSGEQKKAIVDLLFKTNRKVTVKQLKEDYFKKIECFDSVEISGVEDRFNASLGTYHDLLKIIKDKDFLDNEENEDILEDIVLTLTLFEDREMIEERLKTYAHLFDDKVMKQLKRRRYTGWGRLSRKLINGIRDKQSGKTILDFLKSDGFANRNFMQLIHDDSLTFKEDIQKAQVSGQGDSLHEHIANLAGSPAIKKGILQTVKVVDELVKVMGRHKPENIVIEMARENQTTQKGQKNSRERMKRIEEGIKELGSQILKEHPVENTQLQNEKLYLYYLQNGRDMYVDQELDINRLSDYDVDHIVPQSFLKDDSIDNKVLTRSDKARGKSDNVPSEEVVKKMKNYWRQLLNAKLITQRKFDNLTKAERGGLSELDKAGFIKRQLVETRQITKHVAQILDSRMNTKYDENDKLIREVKVITLKSKLVSDFRKDFQFYKVREINNYHHAHDAYLNAVVGTALIKKYPKLESEFVYGDYKVYDVRKMIAKSEQEIGKATAKYFFYSNIMNFFKTEITLANGEIRKRPLIETNGETGEIVWDKGRDFATVRKVLSMPQVNIVKKTEVQTGGFSKESILPKRNSDKLIARKKDWDPKKYGGFDSPTVAYSVLVVAKVEKGKSKKLKSVKELLGITIMERSSFEKNPIDFLEAKGYKEVKKDLIIKLPKYSLFELENGRKRMLASAGELQKGNELALPSKYVNFLYLASHYEKLKGSPEDNEQKQLFVEQHKHYLDEIIEQISEFSKRVILADANLDKVLSAYNKHRDKPIREQAENIIHLFTLTNLGAPAAFKYFDTTIDRKRYTSTKEVLDATLIHQSITGLYETRIDLSQLGGDGGEAAAKPAPGGGGGVQEISDSRPMLHIYLNGRRFLGLLDTGADKTCIAGRDWPANWPIHQTESSLQGLGMACGVARSSQPLRWQHEDKSGIIHPFVIPTLPFTLWGRDIMKDIKVRLMTDSPDDSQDLMIGAIESNLFADQISWKSDQPVWLNQWPLKQEKLQALQQLVTEQLQLGHLEESNSPWNTPVFVIKKKSGKWRLLQDLRAVNATMHDMGALQPGLPSPVAVPKGWEIIIIDLQDCFFNIKLHPEDCKRFAFSVPSPNFKRPYQRFQWKVLPQGMKNSPTLCQKFVDKAILTVRDKYQDSYIVHYMDDILLAHPSRSIVDEILTSMIQALNKHGLVVSTEKIQKYDNLKYLGTHIQGDSVSYQKLQIRTDKLRTLNDFQKLLGNINWIRPFLKLTTGELKPLFEILNPDSNPISTRKLTPEACKALQLMNERLSTARVKRLDLSQPWSLCILKTEYTPTACLWQDGVVEWIHLPHISPKVITPYDIFCTQLIIKGRHRSKELFSKDPDYIVVPYTKVQFDLLLQEKEDWPISLLGFLGEVHFHLPKDPLLTFTLQTAIIFPHMTSTTPLEKGIVIFTDGSANGRSVTYIQGREPIIKENTQNTAQQAEIVAVITAFEEVSQPFNLYTDSKYVTGLFPEIETATLSPRTKIYTELKHLQRLIHKRQEKFYIGHIRGHTGLPGPLAQGNAYADSLTRILTAAGKRTADGSEFEKRTADGSEFESPKKKAKVE

SEQ ID NO: 3258 - protein, 2116 aa, synthetic construct
MPAAKRVKLDGGDKKYSIGLDIGTNSVGWAVITDEYKVPSKKFKVLGNTDRHSIKKNLIGALLFDSGETAEATRLKRTARRRYTRRKNRICYLQEIFSNEMAKVDDSFFHRLEESFLVEEDKKHERHPIFGNIVDEVAYHEKYPTIYHLRKKLVDSTDKADLRLIYLALAHMIKFRGHFLIEGDLNPDNSDVDKLFIQLVQTYNQLFEENPINASGVDAKAILSARLSKSRRLENLIAQLPGEKKNGLFGNLIALSLGLTPNFKSNFDLAEDAKLQLSKDTYDDDLDNLLAQIGDQYADLFLAAKNLSDAILLSDILRVNTEITKAPLSASMIKRYDEHHQDLTLLKALVRQQLPEKYKEIFFDQSKNGYAGYIDGGASQEEFYKFIKPILEKMDGTEELLVKLNREDLLRKQRTFDNGSIPHQIHLGELHAILRRQEDFYPFLKDNREKIEKILTFRIPYYVGPLARGNSRFAWMTRKSEETITPWNFEEVVDKGASAQSFIERMTNFDKNLPNEKVLPKHSLLYEYFTVYNELTKVKYVTEGMRKPAFLSGEQKKAIVDLLFKTNRKVTVKQLKEDYFKKIECFDSVEISGVEDRFNASLGTYHDLLKIIKDKDFLDNEENEDILEDIVLTLTLFEDREMIEERLKTYAHLFDDKVMKQLKRRRYTGWGRLSRKLINGIRDKQSGKTILDFLKSDGFANRNFMQLIHDDSLTFKEDIQKAQVSGQGDSLHEHIANLAGSPAIKKGILQTVKVVDELVKVMGRHKPENIVIEMARENQTTQKGQKNSRERMKRIEEGIKELGSQILKEHPVENTQLQNEKLYLYYLQNGRDMYVDQELDINRLSDYDVDHIVPQSFLKDDSIDNKVLTRSDKARGKSDNVPSEEVVKKMKNYWRQLLNAKLITQRKFDNLTKAERGGLSELDKAGFIKRQLVETRQITKHVAQILDSRMNTKYDENDKLIREVKVITLKSKLVSDFRKDFQFYKVREINNYHHAHDAYLNAVVGTALIKKYPKLESEFVYGDYKVYDVRKMIAKSEQEIGKATAKYFFYSNIMNFFKTEITLANGEIRKRPLIETNGETGEIVWDKGRDFATVRKVLSMPQVNIVKKTEVQTGGFSKESILPKRNSDKLIARKKDWDPKKYGGFDSPTVAYSVLVVAKVEKGKSKKLKSVKELLGITIMERSSFEKNPIDFLEAKGYKEVKKDLIIKLPKYSLFELENGRKRMLASAGELQKGNELALPSKYVNFLYLASHYEKLKGSPEDNEQKQLFVEQHKHYLDEIIEQISEFSKRVILADANLDKVLSAYNKHRDKPIREQAENIIHLFTLTNLGAPAAFKYFDTTIDRKRYTSTKEVLDATLIHQSITGLYETRIDLSQLGGDGGPAPGGSEAAAKGGVQEISDSRPMLHIYLNGRRFLGLLDTGADKTCIAGRDWPANWPIHQTESSLQGLGMACGVARSSQPLRWQHEDKSGIIHPFVIPTLPFTLWGRDIMKDIKVRLMTDSPDDSQDLMIGAIESNLFADQISWKSDQPVWLNQWPLKQEKLQALQQLVTEQLQLGHLEESNSPWNTPVFVIKKKSGKWRLLQDLRAVNATMHDMGALQPGLPSPVAVPKGWEIIIIDLQDCFFNIKLHPEDCKRFAFSVPSPNFKRPYQRFQWKVLPQGMKNSPTLCQKFVDKAILTVRDKYQDSYIVHYMDDILLAHPSRSIVDEILTSMIQALNKHGLVVSTEKIQKYDNLKYLGTHIQGDSVSYQKLQIRTDKLRTLNDFQKLLGNINWIRPFLKLTTGELKPLFEILNPDSNPISTRKLTPEACKALQLMNERLSTARVKRLDLSQPWSLCILKTEYTPTACLWQDGVVEWIHLPHISPKVITPYDIFCTQLIIKGRHRSKELFSKDPDYIVVPYTKVQFDLLLQEKEDWPISLLGFLGEVHFHLPKDPLLTFTLQTAIIFPHMTSTTPLEKGIVIFTDGSANGRSVTYIQGREPIIKENTQNTAQQAEIVAVITAFEEVSQPFNLYTDSKYVTGLFPEIETATLSPRTKIYTELKHLQRLIHKRQEKFYIGHIRGHTGLPGPLAQGNAYADSLTRILTAAGKRTADGSEFEKRTADGSEFESPKKKAKVE

SEQ ID NO: 3259 - protein, 2123 aa, synthetic construct
MPAAKRVKLDGGDKKYSIGLDIGTNSVGWAVITDEYKVPSKKFKVLGNTDRHSIKKNLIGALLFDSGETAEATRLKRTARRRYTRRKNRICYLQEIFSNEMAKVDDSFFHRLEESFLVEEDKKHERHPIFGNIVDEVAYHEKYPTIYHLRKKLVDSTDKADLRLIYLALAHMIKFRGHFLIEGDLNPDNSDVDKLFIQLVQTYNQLFEENPINASGVDAKAILSARLSKSRRLENLIAQLPGEKKNGLFGNLIALSLGLTPNFKSNFDLAEDAKLQLSKDTYDDDLDNLLAQIGDQYADLFLAAKNLSDAILLSDILRVNTEITKAPLSASMIKRYDEHHQDLTLLKALVRQQLPEKYKEIFFDQSKNGYAGYIDGGASQEEFYKFIKPILEKMDGTEELLVKLNREDLLRKQRTFDNGSIPHQIHLGELHAILRRQEDFYPFLKDNREKIEKILTFRIPYYVGPLARGNSRFAWMTRKSEETITPWNFEEVVDKGASAQSFIERMTNFDKNLPNEKVLPKHSLLYEYFTVYNELTKVKYVTEGMRKPAFLSGEQKKAIVDLLFKTNRKVTVKQLKEDYFKKIECFDSVEISGVEDRFNASLGTYHDLLKIIKDKDFLDNEENEDILEDIVLTLTLFEDREMIEERLKTYAHLFDDKVMKQLKRRRYTGWGRLSRKLINGIRDKQSGKTILDFLKSDGFANRNFMQLIHDDSLTFKEDIQKAQVSGQGDSLHEHIANLAGSPAIKKGILQTVKVVDELVKVMGRHKPENIVIEMARENQTTQKGQKNSRERMKRIEEGIKELGSQILKEHPVENTQLQNEKLYLYYLQNGRDMYVDQELDINRLSDYDVDHIVPQSFLKDDSIDNKVLTRSDKARGKSDNVPSEEVVKKMKNYWRQLLNAKLITQRKFDNLTKAERGGLSELDKAGFIKRQLVETRQITKHVAQILDSRMNTKYDENDKLIREVKVITLKSKLVSDFRKDFQFYKVREINNYHHAHDAYLNAVVGTALIKKYPKLESEFVYGDYKVYDVRKMIAKSEQEIGKATAKYFFYSNIMNFFKTEITLANGEIRKRPLIETNGETGEIVWDKGRDFATVRKVLSMPQVNIVKKTEVQTGGFSKESILPKRNSDKLIARKKDWDPKKYGGFDSPTVAYSVLVVAKVEKGKSKKLKSVKELLGITIMERSSFEKNPIDFLEAKGYKEVKKDLIIKLPKYSLFELENGRKRMLASAGELQKGNELALPSKYVNFLYLASHYEKLKGSPEDNEQKQLFVEQHKHYLDEIIEQISEFSKRVILADANLDKVLSAYNKHRDKPIREQAENIIHLFTLTNLGAPAAFKYFDTTIDRKRYTSTKEVLDATLIHQSITGLYETRIDLSQLGGDGGGSSGSSGSSGSSGSSGSSGGVQEISDSRPMLHIYLNGRRFLGLLDTGADKTCIAGRDWPANWPIHQTESSLQGLGMACGVARSSQPLRWQHEDKSGIIHPFVIPTLPFTLWGRDIMKDIKVRLMTDSPDDSQDLMIGAIESNLFADQISWKSDQPVWLNQWPLKQEKLQALQQLVTEQLQLGHLEESNSPWNTPVFVIKKKSGKWRLLQDLRAVNATMHDMGALQPGLPSPVAVPKGWEIIIIDLQDCFFNIKLHPEDCKRFAFSVPSPNFKRPYQRFQWKVLPQGMKNSPTLCQKFVDKAILTVRDKYQDSYIVHYMDDILLAHPSRSIVDEILTSMIQALNKHGLVVSTEKIQKYDNLKYLGTHIQGDSVSYQKLQIRTDKLRTLNDFQKLLGNINWIRPFLKLTTGELKPLFEILNPDSNPISTRKLTPEACKALQLMNERLSTARVKRLDLSQPWSLCILKTEYTPTACLWQDGVVEWIHLPHISPKVITPYDIFCTQLIIKGRHRSKELFSKDPDYIVVPYTKVQFDLLLQEKEDWPISLLGFLGEVHFHLPKDPLLTFTLQTAIIFPHMTSTTPLEKGIVIFTDGSANGRSVTYIQGREPIIKENTQNTAQQAEIVAVITAFEEVSQPFNLYTDSKYVTGLFPEIETATLSPRTKIYTELKHLQRLIHKRQEKFYIGHIRGHTGLPGPLAQGNAYADSLTRILTAAGKRTADGSEFEKRTADGSEFESPKKKAKVE

SEQ ID NO: 3260 - protein, 2125 aa, synthetic construct; identical to SEQ ID NO: 3157

SEQ ID NO: 3261 - protein, 2116 aa, synthetic construct
MPAAKRVKLDGGDKKYSIGLDIGTNSVGWAVITDEYKVPSKKFKVLGNTDRHSIKKNLIGALLFDSGETAEATRLKRTARRRYTRRKNRICYLQEIFSNEMAKVDDSFFHRLEESFLVEEDKKHERHPIFGNIVDEVAYHEKYPTIYHLRKKLVDSTDKADLRLIYLALAHMIKFRGHFLIEGDLNPDNSDVDKLFIQLVQTYNQLFEENPINASGVDAKAILSARLSKSRRLENLIAQLPGEKKNGLFGNLIALSLGLTPNFKSNFDLAEDAKLQLSKDTYDDDLDNLLAQIGDQYADLFLAAKNLSDAILLSDILRVNTEITKAPLSASMIKRYDEHHQDLTLLKALVRQQLPEKYKEIFFDQSKNGYAGYIDGGASQEEFYKFIKPILEKMDGTEELLVKLNREDLLRKQRTFDNGSIPHQIHLGELHAILRRQEDFYPFLKDNREKIEKILTFRIPYYVGPLARGNSRFAWMTRKSEETITPWNFEEVVDKGASAQSFIERMTNFDKNLPNEKVLPKHSLLYEYFTVYNELTKVKYVTEGMRKPAFLSGEQKKAIVDLLFKTNRKVTVKQLKEDYFKKIECFDSVEISGVEDRFNASLGTYHDLLKIIKDKDFLDNEENEDILEDIVLTLTLFEDREMIEERLKTYAHLFDDKVMKQLKRRRYTGWGRLSRKLINGIRDKQSGKTILDFLKSDGFANRNFMQLIHDDSLTFKEDIQKAQVSGQGDSLHEHIANLAGSPAIKKGILQTVKVVDELVKVMGRHKPENIVIEMARENQTTQKGQKNSRERMKRIEEGIKELGSQILKEHPVENTQLQNEKLYLYYLQNGRDMYVDQELDINRLSDYDVDHIVPQSFLKDDSIDNKVLTRSDKARGKSDNVPSEEVVKKMKNYWRQLLNAKLITQRKFDNLTKAERGGLSELDKAGFIKRQLVETRQITKHVAQILDSRMNTKYDENDKLIREVKVITLKSKLVSDFRKDFQFYKVREINNYHHAHDAYLNAVVGTALIKKYPKLESEFVYGDYKVYDVRKMIAKSEQEIGKATAKYFFYSNIMNFFKTEITLANGEIRKRPLIETNGETGEIVWDKGRDFATVRKVLSMPQVNIVKKTEVQTGGFSKESILPKRNSDKLIARKKDWDPKKYGGFDSPTVAYSVLVVAKVEKGKSKKLKSVKELLGITIMERSSFEKNPIDFLEAKGYKEVKKDLIIKLPKYSLFELENGRKRMLASAGELQKGNELALPSKYVNFLYLASHYEKLKGSPEDNEQKQLFVEQHKHYLDEIIEQISEFSKRVILADANLDKVLSAYNKHRDKPIREQAENIIHLFTLTNLGAPAAFKYFDTTIDRKRYTSTKEVLDATLIHQSITGLYETRIDLSQLGGDGGGGSGSSEAAAKGGVQEISDSRPMLHIYLNGRRFLGLLDTGADKTCIAGRDWPANWPIHQTESSLQGLGMACGVARSSQPLRWQHEDKSGIIHPFVIPTLPFTLWGRDIMKDIKVRLMTDSPDDSQDLMIGAIESNLFADQISWKSDQPVWLNQWPLKQEKLQALQQLVTEQLQLGHLEESNSPWNTPVFVIKKKSGKWRLLQDLRAVNATMHDMGALQPGLPSPVAVPKGWEIIIIDLQDCFFNIKLHPEDCKRFAFSVPSPNFKRPYQRFQWKVLPQGMKNSPTLCQKFVDKAILTVRDKYQDSYIVHYMDDILLAHPSRSIVDEILTSMIQALNKHGLVVSTEKIQKYDNLKYLGTHIQGDSVSYQKLQIRTDKLRTLNDFQKLLGNINWIRPFLKLTTGELKPLFEILNGDSNPISTRKLTPEACKALQLMNERLSTARVKRLDLSQPWSLCILKTEYTPTACLWQDGVVEWIHLPHISPKVITPYDIFCTQLIIKGRHRSKELFSKDPDYIVVPYTKVQFDLLLQEKEDWPISLLGFLGEVHFHLPKDPLLTFTLQTAIIFPHMTSTTPLEKGIVIFTDGSANGRSVTYIQGREPIIKENTQNTAQQAEIVAVITAFEEVSQPFNLYTDSKYVTGLFPEIETATLSPRTKIYTELKHLQRLIHKRQEKFYIGHIRGHTGLPGPLAQGNAYADSLTRILTAAGKRTADGSEFEKRTADGSEFESPKKKAKVE

SEQ ID NO: 3262 - protein, 2114 aa, synthetic construct
MPAAKRVKLDGGDKKYSIGLDIGTNSVGWAVITDEYKVPSKKFKVLGNTDRHSIKKNLIGALLFDSGETAEATRLKRTARRRYTRRKNRICYLQEIFSNEMAKVDDSFFHRLEESFLVEEDKKHERHPIFGNIVDEVAYHEKYPTIYHLRKKLVDSTDKADLRLIYLALAHMIKFRGHFLIEGDLNPDNSDVDKLFIQLVQTYNQLFEENPINASGVDAKAILSARLSKSRRLENLIAQLPGEKKNGLFGNLIALSLGLTPNFKSNFDLAEDAKLQLSKDTYDDDLDNLLAQIGDQYADLFLAAKNLSDAILLSDILRVNTEITKAPLSASMIKRYDEHHQDLTLLKALVRQQLPEKYKEIFFDQSKNGYAGYIDGGASQEEFYKFIKPILEKMDGTEELLVKLNREDLLRKQRTFDNGSIPHQIHLGELHAILRRQEDFYPFLKDNREKIEKILTFRIPYYVGPLARGNSRFAWMTRKSEETITPWNFEEVVDKGASAQSFIERMTNFDKNLPNEKVLPKHSLLYEYFTVYNELTKVKYVTEGMRKPAFLSGEQKKAIVDLLFKTNRKVTVKQLKEDYFKKIECFDSVEISGVEDRFNASLGTYHDLLKIIKDKDFLDNEENEDILEDIVLTLTLFEDREMIEERLKTYAHLFDDKVMKQLKRRRYTGWGRLSRKLINGIRDKQSGKTILDFLKSDGFANRNFMQLIHDDSLTFKEDIQKAQVSGQGDSLHEHIANLAGSPAIKKGILQTVKVVDELVKVMGRHKPENIVIEMARENQTTQKGQKNSRERMKRIEEGIKELGSQILKEHPVENTQLQNEKLYLYYLQNGRDMYVDQELDINRLSDYDVDHIVPQSFLKDDSIDNKVLTRSDKARGKSDNVPSEEVVKKMKNYWRQLLNAKLITQRKFDNLTKAERGGLSELDKAGFIKRQLVETRQITKHVAQILDSRMNTKYDENDKLIREVKVITLKSKLVSDFRKDFQFYKVREINNYHHAHDAYLNAVVGTALIKKYPKLESEFVYGDYKVYDVRKMIAKSEQEIGKATAKYFFYSNIMNFFKTEITLANGEIRKRPLIETNGETGEIVWDKGRDFATVRKVLSMPQVNIVKKTEVQTGGFSKESILPKRNSDKLIARKKDWDPKKYGGFDSPTVAYSVLVVAKVEKGKSKKLKSVKELLGITIMERSSFEKNPIDFLEAKGYKEVKKDLIIKLPKYSLFELENGRKRMLASAGELQKGNELALPSKYVNFLYLASHYEKLKGSPEDNEQKQLFVEQHKHYLDEIIEQISEFSKRVILADANLDKVLSAYNKHRDKPIREQAENIIHLFTLTNLGAPAAFKYFDTTIDRKRYTSTKEVLDATLIHQSITGLYETRIDLSQLGGDGGPAPAPAPAPGGVQEISDSRPMLHIYLNGRRFLGLLDTGADKTCIAGRDWPANWPIHQTESSLQGLGMACGVARSSQPLRWQHEDKSGIIHPFVIPTLPFTLWGRDIMKDIKVRLMTDSPDDSQDLMIGAIESNLFADQISWKSDQPVWLNQWPLKQEKLQALQQLVTEQLQLGHLEESNSPWNTPVFVIKKKSGKWRLLQDLRAVNATMHDMGALQPGLPSPVAVPKGWEIIIIDLQDCFFNIKLHPEDCKRFAFSVPSPNFKRPYQRFQWKVLPQGMKNSPTLCQKFVDKAILTVRDKYQDSYIVHYMDDILLAHPSRSIVDEILTSMIQALNKHGLVVSTEKIQKYDNLKYLGTHIQGDSVSYQKLQIRTDKLRTLNDFQKLLGNINWIRPFLKLTTGELKPLFEILNGDSNPISTRKLTPEACKALQLMNERLSTARVKRLDLSQPWSLCILKTEYTPTACLWQDGVVEWIHLPHISPKVITPYDIFCTQLIIKGRHRSKELFSKDPDYIVVPYTKVQFDLLLQEKEDWPISLLGFLGEVHFHLPKDPLLTFTLQTAIIFPHMTSTTPLEKGIVIFTDGSANGRSVTYIQGREPIIKENTQNTAQQAEIVAVITAFEEVSQPFNLYTDSKYVTGLFPEIETATLSPRTKIYTELKHLQRLIHKRQEKFYIGHIRGHTGLPGPLAQGNAYADSLTRILTAAGKRTADGSEFEKRTADGSEFESPKKKAKVE

SEQ ID NO: 3263 - protein, 2116 aa, synthetic construct; identical to SEQ ID NO: 3146

SEQ ID NO: 3264 - protein, 2114 aa, synthetic construct
MPAAKRVKLDGGDKKYSIGLDIGTNSVGWAVITDEYKVPSKKFKVLGNTDRHSIKKNLIGALLFDSGETAEATRLKRTARRRYTRRKNRICYLQEIFSNEMAKVDDSFFHRLEESFLVEEDKKHERHPIFGNIVDEVAYHEKYPTIYHLRKKLVDSTDKADLRLIYLALAHMIKFRGHFLIEGDLNPDNSDVDKLFIQLVQTYNQLFEENPINASGVDAKAILSARLSKSRRLENLIAQLPGEKKNGLFGNLIALSLGLTPNFKSNFDLAEDAKLQLSKDTYDDDLDNLLAQIGDQYADLFLAAKNLSDAILLSDILRVNTEITKAPLSASMIKRYDEHHQDLTLLKALVRQQLPEKYKEIFFDQSKNGYAGYIDGGASQEEFYKFIKPILEKMDGTEELLVKLNREDLLRKQRTFDNGSIPHQIHLGELHAILRRQEDFYPFLKDNREKIEKILTFRIPYYVGPLARGNSRFAWMTRKSEETITPWNFEEVVDKGASAQSFIERMTNFDKNLPNEKVLPKHSLLYEYFTVYNELTKVKYVTEGMRKPAFLSGEQKKAIVDLLFKTNRKVTVKQLKEDYFKKIECFDSVEISGVEDRFNASLGTYHDLLKIIKDKDFLDNEENEDILEDIVLTLTLFEDREMIEERLKTYAHLFDDKVMKQLKRRRYTGWGRLSRKLINGIRDKQSGKTILDFLKSDGFANRNFMQLIHDDSLTFKEDIQKAQVSGQGDSLHEHIANLAGSPAIKKGILQTVKVVDELVKVMGRHKPENIVIEMARENQTTQKGQKNSRERMKRIEEGIKELGSQILKEHPVENTQLQNEKLYLYYLQNGRDMYVDQELDINRLSDYDVDHIVPQSFLKDDSIDNKVLTRSDKARGKSDNVPSEEVVKKMKNYWRQLLNAKLITQRKFDNLTKAERGGLSELDKAGFIKRQLVETRQITKHVAQILDSRMNTKYDENDKLIREVKVITLKSKLVSDFRKDFQFYKVREINNYHHAHDAYLNAVVGTALIKKYPKLESEFVYGDYKVYDVRKMIAKSEQEIGKATAKYFFYSNIMNFFKTEITLANGEIRKRPLIETNGETGEIVWDKGRDFATVRKVLSMPQVNIVKKTEVQTGGFSKESILPKRNSDKLIARKKDWDPKKYGGFDSPTVAYSVLVVAKVEKGKSKKLKSVKELLGITIMERSSFEKNPIDFLEAKGYKEVKKDLIIKLPKYSLFELENGRKRMLASAGELQKGNELALPSKYVNFLYLASHYEKLKGSPEDNEQKQLFVEQHKHYLDEIIEQISEFSKRVILADANLDKVLSAYNKHRDKPIREQAENIIHLFTLTNLGAPAAFKYFDTTIDRKRYTSTKEVLDATLIHQSITGLYETRIDLSQLGGDGGGSSPAPGGGGGVQEISDSRPMLHIYLNGRRFLGLLDTGADKTCIAGRDWPANWPIHQTESSLQGLGMACGVARSSQPLRWQHEDKSGIIHPFVIPTLPFTLWGRDIMKDIKVRLMTDSPDDSQDLMIGAIESNLFADQISWKSDQPVWLNQWPLKQEKLQALQQLVTEQLQLGHLEESNSPWNTPVFVIKKKSGKWRLLQDLRAVNATMHDMGALQPGLPSPVAVPKGWEIIIIDLQDCFFNIKLHPEDCKRFAFSVPSPNFKRPYQRFQWKVLPQGMKNSPTLCQKFVDKAILTVRDKYQDSYIVHYMDDILLAHPSRSIVDEILTSMIQALNKHGLVVSTEKIQKYDNLKYLGTHIQGDSVSYQKLQIRTDKLRTLNDFQKLLGNINWIRPFLKLTTGELKPLFEILNGDSNPISTRKLTPEACKALQLMNERLSTARVKRLDLSQPWSLCILKTEYTPTACLWQDGVVEWIHLPHISPKVITPYDIFCTQLIIKGRHRSKELFSKDPDYIVVPYTKVQFDLLLQEKEDWPISLLGFLGEVHFHLPKDPLLTFTLQTAIIFPHMTSTTPLEKGIVIFTDGSANGRSVTYIQGREPIIKENTQNTAQQAEIVAVITAFEEVSQPFNLYTDSKYVTGLFPEIETATLSPRTKIYTELKHLQRLIHKRQEKFYIGHIRGHTGLPGPLAQGNAYADSLTRILTAAGKRTADGSEFEKRTADGSEFESPKKKAKVE

SEQ ID NO: 3265 - protein, 2116 aa, synthetic construct
MPAAKRVKLDGGDKKYSIGLDIGTNSVGWAVITDEYKVPSKKFKVLGNTDRHSIKKNLIGALLFDSGETAEATRLKRTARRRYTRRKNRICYLQEIFSNEMAKVDDSFFHRLEESFLVEEDKKHERHPIFGNIVDEVAYHEKYPTIYHLRKKLVDSTDKADLRLIYLALAHMIKFRGHFLIEGDLNPDNSDVDKLFIQLVQTYNQLFEENPINASGVDAKAILSARLSKSRRLENLIAQLPGEKKNGLFGNLIALSLGLTPNFKSNFDLAEDAKLQLSKDTYDDDLDNLLAQIGDQYADLFLAAKNLSDAILLSDILRVNTEITKAPLSASMIKRYDEHHQDLTLLKALVRQQLPEKYKEIFFDQSKNGYAGYIDGGASQEEFYKFIKPILEKMDGTEELLVKLNREDLLRKQRTFDNGSIPHQIHLGELHAILRRQEDFYPFLKDNREKIEKILTFRIPYYVGPLARGNSRFAWMTRKSEETITPWNFEEVVDKGASAQSFIERMTNFDKNLPNEKVLPKHSLLYEYFTVYNELTKVKYVTEGMRKPAFLSGEQKKAIVDLLFKTNRKVTVKQLKEDYFKKIECFDSVEISGVEDRFNASLGTYHDLLKIIKDKDFLDNEENEDILEDIVLTLTLFEDREMIEERLKTYAHLFDDKVMKQLKRRRYTGWGRLSRKLINGIRDKQSGKTILDFLKSDGFANRNFMQLIHDDSLTFKEDIQKAQVSGQGDSLHEHIANLAGSPAIKKGILQTVKVVDELVKVMGRHKPENIVIEMARENQTTQKGQKNSRERMKRIEEGIKELGSQILKEHPVENTQLQNEKLYLYYLQNGRDMYVDQELDINRLSDYDVDHIVPQSFLKDDSIDNKVLTRSDKARGKSDNVPSEEVVKKMKNYWRQLLNAKLITQRKFDNLTKAERGGLSELDKAGFIKRQLVETRQITKHVAQILDSRMNTKYDENDKLIREVKVITLKSKLVSDFRKDFQFYKVREINNYHHAHDAYLNAVVGTALIKKYPKLESEFVYGDYKVYDVRKMIAKSEQEIGKATAKYFFYSNIMNFFKTEITLANGEIRKRPLIETNGETGEIVWDKGRDFATVRKVLSMPQVNIVKKTEVQTGGFSKESILPKRNSDKLIARKKDWDPKKYGGFDSPTVAYSVLVVAKVEKGKSKKLKSVKELLGITIMERSSFEKNPIDFLEAKGYKEVKKDLIIKLPKYSLFELENGRKRMLASAGELQKGNELALPSKYVNFLYLASHYEKLKGSPEDNEQKQLFVEQHKHYLDEIIEQISEFSKRVILADANLDKVLSAYNKHRDKPIREQAENIIHLFTLTNLGAPAAFKYFDTTIDRKRYTSTKEVLDATLIHQSITGLYETRIDLSQLGGDGGGSSEAAAKPAPGGVQEISDSRPMLHIYLNGRRFLGLLDTGADKTCIAGRDWPANWPIHQTESSLQGLGMACGVARSSQPLRWQHEDKSGIIHPFVIPTLPFTLWGRDIMKDIKVRLMTDSPDDSQDLMIGAIESNLFADQISWKSDQPVWLNQWPLKQEKLQALQQLVTEQLQLGHLEESNSPWNTPVFVIKKKSGKWRLLQDLRAVNATMHDMGALQPGLPSPVAVPKGWEIIIIDLQDCFFNIKLHPEDCKRFAFSVPSPNFKRPYQRFQWKVLPQGMKNSPTLCQKFVDKAILTVRDKYQDSYIVHYMDDILLAHPSRSIVDEILTSMIQALNKHGLVVSTEKIQKYDNLKYLGTHIQGDSVSYQKLQIRTDKLRTLNDFQKLLGNINWIRPFLKLTTGELKPLFEILNGDSNPISTRKLTPEACKALQLMNERLSTARVKRLDLSQPWSLCILKTEYTPTACLWQDGVVEWIHLPHISPKVITPYDIFCTQLIIKGRHRSKELFSKDPDYIVVPYTKVQFDLLLQEKEDWPISLLGFLGEVHFHLPKDPLLTFTLQTAIIFPHMTSTTPLEKGIVIFTDGSANGRSVTYIQGREPIIKENTQNTAQQAEIVAVITAFEEVSQPFNLYTDSKYVTGLFPEIETATLSPRTKIYTELKHLQRLIHKRQEKFYIGHIRGHTGLPGPLAQGNAYADSLTRILTAAGKRTADGSEFEKRTADGSEFESPKKKAKVE

SEQ ID NO: 3266 - protein, 2120 aa, synthetic construct
MPAAKRVKLDGGDKKYSIGLDIGTNSVGWAVITDEYKVPSKKFKVLGNTDRHSIKKNLIGALLFDSGETAEATRLKRTARRRYTRRKNRICYLQEIFSNEMAKVDDSFFHRLEESFLVEEDKKHERHPIFGNIVDEVAYHEKYPTIYHLRKKLVDSTDKADLRLIYLALAHMIKFRGHFLIEGDLNPDNSDVDKLFIQLVQTYNQLFEENPINASGVDAKAILSARLSKSRRLENLIAQLPGEKKNGLFGNLIALSLGLTPNFKSNFDLAEDAKLQLSKDTYDDDLDNLLAQIGDQYADLFLAAKNLSDAILLSDILRVNTEITKAPLSASMIKRYDEHHQDLTLLKALVRQQLPEKYKEIFFDQSKNGYAGYIDGGASQEEFYKFIKPILEKMDGTEELLVKLNREDLLRKQRTFDNGSIPHQIHLGELHAILRRQEDFYPFLKDNREKIEKILTFRIPYYVGPLARGNSRFAWMTRKSEETITPWNFEEVVDKGASAQSFIERMTNFDKNLPNEKVLPKHSLLYEYFTVYNELTKVKYVTEGMRKPAFLSGEQKKAIVDLLFKTNRKVTVKQLKEDYFKKIECFDSVEISGVEDRFNASLGTYHDLLKIIKDKDFLDNEENEDILEDIVLTLTLFEDREMIEERLKTYAHLFDDKVMKQLKRRRYTGWGRLSRKLINGIRDKQSGKTILDFLKSDGFANRNFMQLIHDDSLTFKEDIQKAQVSGQGDSLHEHIANLAGSPAIKKGILQTVKVVDELVKVMGRHKPENIVIEMARENQTTQKGQKNSRERMKRIEEGIKELGSQILKEHPVENTQLQNEKLYLYYLQNGRDMYVDQELDINRLSDYDVDHIVPQSFLKDDSIDNKVLTRSDKARGKSDNVPSEEVVKKMKNYWRQLLNAKLITQRKFDNLTKAERGGLSELDKAGFIKRQLVETRQITKHVAQILDSRMNTKYDENDKLIREVKVITLKSKLVSDFRKDFQFYKVREINNYHHAHDAYLNAVVGTALIKKYPKLESEFVYGDYKVYDVRKMIAKSEQEIGKATAKYFFYSNIMNFFKTEITLANGEIRKRPLIETNGETGEIVWDKGRDFATVRKVLSMPQVNIVKKTEVQTGGFSKESILPKRNSDKLIARKKDWDPKKYGGFDSPTVAYSVLVVAKVEKGKSKKLKSVKELLGITIMERSSFEKNPIDFLEAKGYKEVKKDLIIKLPKYSLFELENGRKRMLASAGELQKGNELALPSKYVNFLYLASHYEKLKGSPEDNEQKQLFVEQHKHYLDEIIEQISEFSKRVILADANLDKVLSAYNKHRDKPIREQAENIIHLFTLTNLGAPAAFKYFDTTIDRKRYTSTKEVLDATLIHQSITGLYETRIDLSQLGGDGGGGSGGSGGSGGSGGSGGWVQEISDSRPMLHIYLNGRRFLGLLNTGADKTCIAGRDWPANWPIHQTESSLQGLGMACGVARSSQPLRWQHEDKSGIIHPFVIPTLPFTLWGRDIMKDIKVRLMTDSPDDSQDLMIGAIESNLFADQISWKSDQPVWLNQWPLKQEKLQALQQLVTEQLQLGHLEESNSPWNTPVFVIKKKSGKWRLLQDLRAVNATMHDMGALQPGLPSPVAVPKGWEIIIIDLQDCFFNIKLHPEDCKRFAFSVPSPNFKRPYQRFQWKVLPQGMKNSPTLCQKFVDKAILTVRDKYQDSYIVHYMDDILLAHPSRSIVDEILTSMIQALNKHGLVVSTEKIQKYDNLKYLGTHIQGDSVSYQKLQIRTDKLRTLNDFQKLLGNINWIRPFLKLTTGELKPLFEILNGDSNPISTRKLTPEACKALQLMNERLSTARVKRLDLSQPWSLCILKTEYTPTACLWQDGVVEWIHLPHISPKVITPYDIFCTQLIIKGRHRSKELFSKDPDYIVVPYTKVQFDLLLQEKEDWPISLLGFLGEVHFHLPKDPLLTFTLQTAIIFPHMTSTTPLEKGIVIFTDGSANGRSVTYIQGREPIIKENTQNTAQQAEIVAVITAFEEVSQPFNLYTDSKYVTGLFPEIETATLSPRTKIYTELKHLQRLIHKRQEKFYIGHIRGHTGLPGPLAQGNAYADSLTRILTAGKRTADGSEFEKRTADGSEFESPKKKAKVE

SEQ ID NO: 3267 - protein, 2151 aa, synthetic construct
MPAAKRVKLDGGDKKYSIGLDIGTNSVGWAVITDEYKVPSKKFKVLGNTDRHSIKKNLIGALLFDSGETAEATRLKRTARRRYTRRKNRICYLQEIFSNEMAKVDDSFFHRLEESFLVEEDKKHERHPIFGNIVDEVAYHEKYPTIYHLRKKLVDSTDKADLRLIYLALAHMIKFRGHFLIEGDLNPDNSDVDKLFIQLVQTYNQLFEENPINASGVDAKAILSARLSKSRRLENLIAQLPGEKKNGLFGNLIALSLGLTPNFKSNFDLAEDAKLQLSKDTYDDDLDNLLAQIGDQYADLFLAAKNLSDAILLSDILRVNTEITKAPLSASMIKRYDEHHQDLTLLKALVRQQLPEKYKEIFFDQSKNGYAGYIDGGASQEEFYKFIKPILEKMDGTEELLVKLNREDLLRKQRTFDNGSIPHQIHLGELHAILRRQEDFYPFLKDNREKIEKILTFRIPYYVGPLARGNSRFAWMTRKSEETITPWNFEEVVDKGASAQSFIERMTNFDKNLPNEKVLPKHSLLYEYFTVYNELTKVKYVTEGMRKPAFLSGEQKKAIVDLLFKTNRKVTVKQLKEDYFKKIECFDSVEISGVEDRFNASLGTYHDLLKIIKDKDFLDNEENEDILEDIVLTLTLFEDREMIEERLKTYAHLFDDKVMKQLKRRRYTGWGRLSRKLINGIRDKQSGKTILDFLKSDGFANRNFMQLIHDDSLTFKEDIQKAQVSGQGDSLHEHIANLAGSPAIKKGILQTVKVVDELVKVMGRHKPENIVIEMARENQTTQKGQKNSRERMKRIEEGIKELGSQILKEHPVENTQLQNEKLYLYYLQNGRDMYVDQELDINRLSDYDVDHIVPQSFLKDDSIDNKVLTRSDKARGKSDNVPSEEVVKKMKNYWRQLLNAKLITQRKFDNLTKAERGGLSELDKAGFIKRQLVETRQITKHVAQILDSRMNTKYDENDKLIREVKVITLKSKLVSDFRKDFQFYKVREINNYHHAHDAYLNAVVGTALIKKYPKLESEFVYGDYKVYDVRKMIAKSEQEIGKATAKYFFYSNIMNFFKTEITLANGEIRKRPLIETNGETGEIVWDKGRDFATVRKVLSMPQVNIVKKTEVQTGGFSKESILPKRNSDKLIARKKDWDPKKYGGFDSPTVAYSVLVVAKVEKGKSKKLKSVKELLGITIMERSSFEKNPIDFLEAKGYKEVKKDLIIKLPKYSLFELENGRKRMLASAGELQKGNELALPSKYVNFLYLASHYEKLKGSPEDNEQKQLFVEQHKHYLDEIIEQISEFSKRVILADANLDKVLSAYNKHRDKPIREQAENIIHLFTLTNLGAPAAFKYFDTTIDRKRYTSTKEVLDATLIHQSITGLYETRIDLSQLGGDGGAEAAAKEAAAKEAAAKEAAAKALEAEAAAKEAAAKEAAAKEAAAKAGGWVQEISDSRPMLHIYLNGRRFLGLLNTGADKTCIAGRDWPANWPIHQTESSLQGLGMACGVARSSQPLRWQHEDKSGIIHPFVIPTLPFTLWGRDIMKDIKVRLMTDSPDDSQDLMIGAIESNLFADQISWKSDQPVWLNQWPLKQEKLQALQQLVTEQLQLGHLEESNSPWNTPVFVIKKKSGKWRLLQDLRAVNATMHDMGALQPGLPSPVAVPKGWEIIIIDLQDCFFNIKLHPEDCKRFAFSVPSPNFKRPYQRFQWKVLPQGMKNSPTLCQKFVDKAILTVRDKYQDSYIVHYMDDILLAHPSRSIVDEILTSMIQALNKHGLVVSTEKIQKYDNLKYLGTHIQGDSVSYQKLQIRTDKLRTLNDFQKLLGNINWIRPFLKLTTGELKPLFEILNGDSNPISTRKLTPEACKALQLMNERLSTARVKRLDLSQPWSLCILKTEYTPTACLWQDGVVEWIHLPHISPKVITPYDIFCTQLIIKGRHRSKELFSKDPDYIVVPYTKVQFDLLLQEKEDWPISLLGFLGEVHFHLPKDPLLTFTLQTAIIFPHMTSTTPLEKGIVIFTDGSANGRSVTYIQGREPIIKENTQNTAQQAEIVAVITAFEEVSQPFNLYTDSKYVTGLFPEIETATLSPRTKIYTELKHLQRLIHKRQEKFYIGHIRGHTGLPGPLAQGNAYADSLTRILTAGKRTADGSEFEKRTADGSEFESPKKKAKVE

SEQ ID NO: 3268 - protein, 2135 aa, synthetic construct; identical to SEQ ID NO: 3172

SEQ ID NO: 3269 - protein, 2114 aa, synthetic construct
MPAAKRVKLDGGDKKYSIGLDIGTNSVGWAVITDEYKVPSKKFKVLGNTDRHSIKKNLIGALLFDSGETAEATRLKRTARRRYTRRKNRICYLQEIFSNEMAKVDDSFFHRLEESFLVEEDKKHERHPIFGNIVDEVAYHEKYPTIYHLRKKLVDSTDKADLRLIYLALAHMIKFRGHFLIEGDLNPDNSDVDKLFIQLVQTYNQLFEENPINASGVDAKAILSARLSKSRRLENLIAQLPGEKKNGLFGNLIALSLGLTPNFKSNFDLAEDAKLQLSKDTYDDDLDNLLAQIGDQYADLFLAAKNLSDAILLSDILRVNTEITKAPLSASMIKRYDEHHQDLTLLKALVRQQLPEKYKEIFFDQSKNGYAGYIDGGASQEEFYKFIKPILEKMDGTEELLVKLNREDLLRKQRTFDNGSIPHQIHLGELHAILRRQEDFYPFLKDNREKIEKILTFRIPYYVGPLARGNSRFAWMTRKSEETITPWNFEEVVDKGASAQSFIERMTNFDKNLPNEKVLPKHSLLYEYFTVYNELTKVKYVTEGMRKPAFLSGEQKKAIVDLLFKTNRKVTVKQLKEDYFKKIECFDSVEISGVEDRFNASLGTYHDLLKIIKDKDFLDNEENEDILEDIVLTLTLFEDREMIEERLKTYAHLFDDKVMKQLKRRRYTGWGRLSRKLINGIRDKQSGKTILDFLKSDGFANRNFMQLIHDDSLTFKEDIQKAQVSGQGDSLHEHIANLAGSPAIKKGILQTVKVVDELVKVMGRHKPENIVIEMARENQTTQKGQKNSRERMKRIEEGIKELGSQILKEHPVENTQLQNEKLYLYYLQNGRDMYVDQELDINRLSDYDVDHIVPQSFLKDDSIDNKVLTRSDKARGKSDNVPSEEVVKKMKNYWRQLLNAKLITQRKFDNLTKAERGGLSELDKAGFIKRQLVETRQITKHVAQILDSRMNTKYDENDKLIREVKVITLKSKLVSDFRKDFQFYKVREINNYHHAHDAYLNAVVGTALIKKYPKLESEFVYGDYKVYDVRKMIAKSEQEIGKATAKYFFYSNIMNFFKTEITLANGEIRKRPLIETNGETGEIVWDKGRDFATVRKVLSMPQVNIVKKTEVQTGGFSKESILPKRNSDKLIARKKDWDPKKYGGFDSPTVAYSVLVVAKVEKGKSKKLKSVKELLGITIMERSSFEKNPIDFLEAKGYKEVKKDLIIKLPKYSLFELENGRKRMLASAGELQKGNELALPSKYVNFLYLASHYEKLKGSPEDNEQKQLFVEQHKHYLDEIIEQISEFSKRVILADANLDKVLSAYNKHRDKPIREQAENIIHLFTLTNLGAPAAFKYFDTTIDRKRYTSTKEVLDATLIHQSITGLYETRIDLSQLGGDGGGGSGGGGSSGGWVQEISDSRPMLHIYLNGRRFLGLLNTGADKTCIAGRDWPANWPIHQTESSLQGLGMACGVARSSQPLRWQHEDKSGIIHPFVIPTLPFTLWGRDIMKDIKVRLMTDSPDDSQDLMIGAIESNLFADQISWKSDQPVWLNQWPLKQEKLQALQQLVTEQLQLGHLEESNSPWNTPVFVIKKKSGKWRLLQDLRAVNATMHDMGALQPGLPSPVAVPKGWEIIIIDLQDCFFNIKLHPEDCKRFAFSVPSPNFKRPYQRFQWKVLPQGMKNSPTLCQKFVDKAILTVRDKYQDSYIVHYMDDILLAHPSRSIVDEILTSMIQALNKHGLVVSTEKIQKYDNLKYLGTHIQGDSVSYQKLQIRTDKLRTLNDFQKLLGNINWIRPFLKLTTGELKPLFEILNGDSNPISTRKLTPEACKALQLMNERLSTARVKRLDLSQPWSLCILKTEYTPTACLWQDGVVEWIHLPHISPKVITPYDIFCTQLIIKGRHRSKELFSKDPDYIVVPYTKVQFDLLLQEKEDWPISLLGFLGEVHFHLPKDPLLTFTLQTAIIFPHMTSTTPLEKGIVIFTDGSANGRSVTYIQGREPIIKENTQNTAQQAEIVAVITAFEEVSQPFNLYTDSKYVTGLFPEIETATLSPRTKIYTELKHLQRLIHKRQEKFYIGHIRGHTGLPGPLAQGNAYADSLTRILTAGKRTADGSEFEKRTADGSEFESPKKKAKVE

SEQ ID NO: 3270 - protein, 2116 aa, synthetic construct; identical to SEQ ID NO: 3181

SEQ ID NO: 3271 - protein, 2116 aa, synthetic construct
MPAAKRVKLDGGDKKYSIGLDIGTNSVGWAVITDEYKVPSKKFKVLGNTDRHSIKKNLIGALLFDSGETAEATRLKRTARRRYTRRKNRICYLQEIFSNEMAKVDDSFFHRLEESFLVEEDKKHERHPIFGNIVDEVAYHEKYPTIYHLRKKLVDSTDKADLRLIYLALAHMIKFRGHFLIEGDLNPDNSDVDKLFIQLVQTYNQLFEENPINASGVDAKAILSARLSKSRRLENLIAQLPGEKKNGLFGNLIALSLGLTPNFKSNFDLAEDAKLQLSKDTYDDDLDNLLAQIGDQYADLFLAAKNLSDAILLSDILRVNTEITKAPLSASMIKRYDEHHQDLTLLKALVRQQLPEKYKEIFFDQSKNGYAGYIDGGASQEEFYKFIKPILEKMDGTEELLVKLNREDLLRKQRTFDNGSIPHQIHLGELHAILRRQEDFYPFLKDNREKIEKILTFRIPYYVGPLARGNSRFAWMTRKSEETITPWNFEEVVDKGASAQSFIERMTNFDKNLPNEKVLPKHSLLYEYFTVYNELTKVKYVTEGMRKPAFLSGEQKKAIVDLLFKTNRKVTVKQLKEDYFKKIECFDSVEISGVEDRFNASLGTYHDLLKIIKDKDFLDNEENEDILEDIVLTLTLFEDREMIEERLKTYAHLFDDKVMKQLKRRRYTGWGRLSRKLINGIRDKQSGKTILDFLKSDGFANRNFMQLIHDDSLTFKEDIQKAQVSGQGDSLHEHIANLAGSPAIKKGILQTVKVVDELVKVMGRHKPENIVIEMARENQTTQKGQKNSRERMKRIEEGIKELGSQILKEHPVENTQLQNEKLYLYYLQNGRDMYVDQELDINRLSDYDVDHIVPQSFLKDDSIDNKVLTRSDKARGKSDNVPSEEVVKKMKNYWRQLLNAKLITQRKFDNLTKAERGGLSELDKAGFIKRQLVETRQITKHVAQILDSRMNTKYDENDKLIREVKVITLKSKLVSDFRKDFQFYKVREINNYHHAHDAYLNAVVGTALIKKYPKLESEFVYGDYKVYDVRKMIAKSEQEIGKATAKYFFYSNIMNFFKTEITLANGEIRKRPLIETNGETGEIVWDKGRDFATVRKVLSMPQVNIVKKTEVQTGGFSKESILPKRNSDKLIARKKDWDPKKYGGFDSPTVAYSVLVVAKVEKGKSKKLKSVKELLGITIMERSSFEKNPIDFLEAKGYKEVKKDLIIKLPKYSLFELENGRKRMLASAGELQKGNELALPSKYVNFLYLASHYEKLKGSPEDNEQKQLFVEQHKHYLDEIIEQISEFSKRVILADANLDKVLSAYNKHRDKPIREQAENIIHLFTLTNLGAPAAFKYFDTTIDRKRYTSTKEVLDATLIHQSITGLYETRIDLSQLGGDGGEAAAKGSSGGGGGWVQEISDSRPMLHIYLNGRRFLGLLNTGADKTCIAGRDWPANWPIHQTESSLQGLGMACGVARSSQPLRWQHEDKSGIIHPFVIPTLPFTLWGRDIMKDIKVRLMTDSPDDSQDLMIGAIESNLFADQISWKSDQPVWLNQWPLKQEKLQALQQLVTEQLQLGHLEESNSPWNTPVFVIKKKSGKWRLLQDLRAVNATMHDMGALQPGLPSPVAVPKGWEIIIIDLQDCFFNIKLHPEDCKRFAFSVPSPNFKRPYQRFQWKVLPQGMKNSPTLCQKFVDKAILTVRDKYQDSYIVHYMDDILLAHPSRSIVDEILTSMIQALNKHGLVVSTEKIQKYDNLKYLGTHIQGDSVSYQKLQIRTDKLRTLNDFQKLLGNINWIRPFLKLTTGELKPLFEILNGDSNPISTRKLTPEACKALQLMNERLSTARVKRLDLSQPWSLCILKTEYTPTACLWQDGVVEWIHLPHISPKVITPYDIFCTQLIIKGRHRSKELFSKDPDYIVVPYTKVQFDLLLQEKEDWPISLLGFLGEVHFHLPKDPLLTFTLQTAIIFPHMTSTTPLEKGIVIFTDGSANGRSVTYIQGREPIIKENTQNTAQQAEIVAVITAFEEVSQPFNLYTDSKYVTGLFPEIETATLSPRTKIYTELKHLQRLIHKRQEKFYIGHIRGHTGLPGPLAQGNAYADSLTRILTAGKRTADGSEFEKRTADGSEFESPKKKAKVE

SEQ ID NO: 3272 - protein, 2114 aa, synthetic construct
MPAAKRVKLDGGDKKYSIGLDIGTNSVGWAVITDEYKVPSKKFKVLGNTDRHSIKKNLIGALLFDSGETAEATRLKRTARRRYTRRKNRICYLQEIFSNEMAKVDDSFFHRLEESFLVEEDKKHERHPIFGNIVDEVAYHEKYPTIYHLRKKLVDSTDKADLRLIYLALAHMIKFRGHFLIEGDLNPDNSDVDKLFIQLVQTYNQLFEENPINASGVDAKAILSARLSKSRRLENLIAQLPGEKKNGLFGNLIALSLGLTPNFKSNFDLAEDAKLQLSKDTYDDDLDNLLAQIGDQYADLFLAAKNLSDAILLSDILRVNTEITKAPLSASMIKRYDEHHQDLTLLKALVRQQLPEKYKEIFFDQSKNGYAGYIDGGASQEEFYKFIKPILEKMDGTEELLVKLNREDLLRKQRTFDNGSIPHQIHLGELHAILRRQEDFYPFLKDNREKIEKILTFRIPYYVGPLARGNSRFAWMTRKSEETITPWNFEEVVDKGASAQSFIERMTNFDKNLPNEKVLPKHSLLYEYFTVYNELTKVKYVTEGMRKPAFLSGEQKKAIVDLLFKTNRKVTVKQLKEDYFKKIECFDSVEISGVEDRFNASLGTYHDLLKIIKDKDFLDNEENEDILEDIVLTLTLFEDREMIEERLKTYAHLFDDKVMKQLKRRRYTGWGRLSRKLINGIRDKQSGKTILDFLKSDGFANRNFMQLIHDDSLTFKEDIQKAQVSGQGDSLHEHIANLAGSPAIKKGILQTVKVVDELVKVMGRHKPENIVIEMARENQTTQKGQKNSRERMKRIEEGIKELGSQILKEHPVENTQLQNEKLYLYYLQNGRDMYVDQELDINRLSDYDVDHIVPQSFLKDDSIDNKVLTRSDKARGKSDNVPSEEVVKKMKNYWRQLLNAKLITQRKFDNLTKAERGGLSELDKAGFIKRQLVETRQITKHVAQILDSRMNTKYDENDKLIREVKVITLKSKLVSDFRKDFQFYKVREINNYHHAHDAYLNAVVGTALIKKYPKLESEFVYGDYKVYDVRKMIAKSEQEIGKATAKYFFYSNIMNFFKTEITLANGEIRKRPLIETNGETGEIVWDKGRDFATVRKVLSMPQVNIVKKTEVQTGGFSKESILPKRNSDKLIARKKDWDPKKYGGFDSPTVAYSVLVVAKVEKGKSKKLKSVKELLGITIMERSSFEKNPIDFLEAKGYKEVKKDLIIKLPKYSLFELENGRKRMLASAGELQKGNELALPSKYVNFLYLASHYEKLKGSPEDNEQKQLFVEQHKHYLDEIIEQISEFSKRVILADANLDKVLSAYNKHRDKPIREQAENIIHLFTLTNLGAPAAFKYFDTTIDRKRYTSTKEVLDATLIHQSITGLYETRIDLSQLGGDGGGGGGGSGSSGGWVQEISDSRPMLHIYLNGRRFLGLLNTGADKTCIAGRDWPANWPIHQTESSLQGLGMACGVARSSQPLRWQHEDKSGIIHPFVIPTLPFTLWGRDIMKDIKVRLMTDSPDDSQDLMIGAIESNLFADQISWKSDQPVWLNQWPLKQEKLQALQQLVTEQLQLGHLEESNSPWNTPVFVIKKKSGKWRLLQDLRAVNATMHDMGALQPGLPSPVAVPKGWEIIIIDLQDCFFNIKLHPEDCKRFAFSVPSPNFKRPYQRFQWKVLPQGMKNSPTLCQKFVDKAILTVRDKYQDSYIVHYMDDILLAHPSRSIVDEILTSMIQALNKHGLVVSTEKIQKYDNLKYLGTHIQGDSVSYQKLQIRTDKLRTLNDFQKLLGNINWIRPFLKLTTGELKPLFEILNGDSNPISTRKLTPEACKALQLMNERLSTARVKRLDLSQPWSLCILKTEYTPTACLWQDGVVEWIHLPHISPKVITPYDIFCTQLIIKGRHRSKELFSKDPDYIVVPYTKVQFDLLLQEKEDWPISLLGFLGEVHFHLPKDPLLTFTLQTAIIFPHMTSTTPLEKGIVIFTDGSANGRSVTYIQGREPIIKENTQNTAQQAEIVAVITAFEEVSQPFNLYTDSKYVTGLFPEIETATLSPRTKIYTELKHLQRLIHKRQEKFYIGHIRGHTGLPGPLAQGNAYADSLTRILTAGKRTADGSEFEKRTADGSEFESPKKKAKVE

SEQ ID NO: 3273 - protein, 2116 aa, synthetic construct
MPAAKRVKLDGGDKKYSIGLDIGTNSVGWAVITDEYKVPSKKFKVLGNTDRHSIKKNLIGALLFDSGETAEATRLKRTARRRYTRRKNRICYLQEIFSNEMAKVDDSFFHRLEESFLVEEDKKHERHPIFGNIVDEVAYHEKYPTIYHLRKKLVDSTDKADLRLIYLALAHMIKFRGHFLIEGDLNPDNSDVDKLFIQLVQTYNQLFEENPINASGVDAKAILSARLSKSRRLENLIAQLPGEKKNGLFGNLIALSLGLTPNFKSNFDLAEDAKLQLSKDTYDDDLDNLLAQIGDQYADLFLAAKNLSDAILLSDILRVNTEITKAPLSASMIKRYDEHHQDLTLLKALVRQQLPEKYKEIFFDQSKNGYAGYIDGGASQEEFYKFIKPILEKMDGTEELLVKLNREDLLRKQRTFDNGSIPHQIHLGELHAILRRQEDFYPFLKDNREKIEKILTFRIPYYVGPLARGNSRFAWMTRKSEETITPWNFEEVVDKGASAQSFIERMTNFDKNLPNEKVLPKHSLLYEYFTVYNELTKVKYVTEGMRKPAFLSGEQKKAIVDLLFKTNRKVTVKQLKEDYFKKIECFDSVEISGVEDRFNASLGTYHDLLKIIKDKDFLDNEENEDILEDIVLTLTLFEDREMIEERLKTYAHLFDDKVMKQLKRRRYTGWGRLSRKLINGIRDKQSGKTILDFLKSDGFANRNFMQLIHDDSLTFKEDIQKAQVSGQGDSLHEHIANLAGSPAIKKGILQTVKVVDELVKVMGRHKPENIVIEMARENQTTQKGQKNSRERMKRIEEGIKELGSQILKEHPVENTQLQNEKLYLYYLQNGRDMYVDQELDINRLSDYDVDHIVPQSFLKDDSIDNKVLTRSDKARGKSDNVPSEEVVKKMKNYWRQLLNAKLITQRKFDNLTKAERGGLSELDKAGFIKRQLVETRQITKHVAQILDSRMNTKYDENDKLIREVKVITLKSKLVSDFRKDFQFYKVREINNYHHAHDAYLNAVVGTALIKKYPKLESEFVYGDYKVYDVRKMIAKSEQEIGKATAKYFFYSNIMNFFKTEITLANGEIRKRPLIETNGETGEIVWDKGRDFATVRKVLSMPQVNIVKKTEVQTGGFSKESILPKRNSDKLIARKKDWDPKKYGGFDSPTVAYSVLVVAKVEKGKSKKLKSVKELLGITIMERSSFEKNPIDFLEAKGYKEVKKDLIIKLPKYSLFELENGRKRMLASAGELQKGNELALPSKYVNFLYLASHYEKLKGSPEDNEQKQLFVEQHKHYLDEIIEQISEFSKRVILADANLDKVLSAYNKHRDKPIREQAENIIHLFTLTNLGAPAAFKYFDTTIDRKRYTSTKEVLDATLIHQSITGLYETRIDLSQLGGDGGEAAAKGGGPAPGGWVQEISDSRPMLHIYLNGRRFLGLLNTGADKTCIAGRDWPANWPIHQTESSLQGLGMACGVARSSQPLRWQHEDKSGIIHPFVIPTLPFTLWGRDIMKDIKVRLMTDSPDDSQDLMIGAIESNLFADQISWKSDQPVWLNQWPLKQEKLQALQQLVTEQLQLGHLEESNSPWNTPVFVIKKKSGKWRLLQDLRAVNATMHDMGALQPGLPSPVAVPKGWEIIIIDLQDCFFNIKLHPEDCKRFAFSVPSPNFKRPYQRFQWKVLPQGMKNSPTLCQKFVDKAILTVRDKYQDSYIVHYMDDILLAHPSRSIVDEILTSMIQALNKHGLVVSTEKIQKYDNLKYLGTHIQGDSVSYQKLQIRTDKLRTLNDFQKLLGNINWIRPFLKLTTGELKPLFEILNGDSNPISTRKLTPEACKALQLMNERLSTARVKRLDLSQPWSLCILKTEYTPTACLWQDGVVEWIHLPHISPKVITPYDIFCTQLIIKGRHRSKELFSKDPDYIVVPYTKVQFDLLLQEKEDWPISLLGFLGEVHFHLPKDPLLTFTLQTAIIFPHMTSTTPLEKGIVIFTDGSANGRSVTYIQGREPIIKENTQNTAQQAEIVAVITAFEEVSQPFNLYTDSKYVTGLFPEIETATLSPRTKIYTELKHLQRLIHKRQEKFYIGHIRGHTGLPGPLAQGNAYADSLTRILTAGKRTADGSEFEKRTADGSEFESPKKKAKVE

SEQ ID NO: 3274 - protein, 2116 aa, synthetic construct
MPAAKRVKLDGGDKKYSIGLDIGTNSVGWAVITDEYKVPSKKFKVLGNTDRHSIKKNLIGALLFDSGETAEATRLKRTARRRYTRRKNRICYLQEIFSNEMAKVDDSFFHRLEESFLVEEDKKHERHPIFGNIVDEVAYHEKYPTIYHLRKKLVDSTDKADLRLIYLALAHMIKFRGHFLIEGDLNPDNSDVDKLFIQLVQTYNQLFEENPINASGVDAKAILSARLSKSRRLENLIAQLPGEKKNGLFGNLIALSLGLTPNFKSNFDLAEDAKLQLSKDTYDDDLDNLLAQIGDQYADLFLAAKNLSDAILLSDILRVNTEITKAPLSASMIKRYDEHHQDLTLLKALVRQQLPEKYKEIFFDQSKNGYAGYIDGGASQEEFYKFIKPILEKMDGTEELLVKLNREDLLRKQRTFDNGSIPHQIHLGELHAILRRQEDFYPFLKDNREKIEKILTFRIPYYVGPLARGNSRFAWMTRKSEETITPWNFEEVVDKGASAQSFIERMTNFDKNLPNEKVLPKHSLLYEYFTVYNELTKVKYVTEGMRKPAFLSGEQKKAIVDLLFKTNRKVTVKQLKEDYFKKIECFDSVEISGVEDRFNASLGTYHDLLKIIKDKDFLDNEENEDILEDIVLTLTLFEDREMIEERLKTYAHLFDDKVMKQLKRRRYTGWGRLSRKLINGIRDKQSGKTILDFLKSDGFANRNFMQLIHDDSLTFKEDIQKAQVSGQGDSLHEHIANLAGSPAIKKGILQTVKVVDELVKVMGRHKPENIVIEMARENQTTQKGQKNSRERMKRIEEGIKELGSQILKEHPVENTQLQNEKLYLYYLQNGRDMYVDQELDINRLSDYDVDHIVPQSFLKDDSIDNKVLTRSDKARGKSDNVPSEEVVKKMKNYWRQLLNAKLITQRKFDNLTKAERGGLSELDKAGFIKRQLVETRQITKHVAQILDSRMNTKYDENDKLIREVKVITLKSKLVSDFRKDFQFYKVREINNYHHAHDAYLNAVVGTALIKKYPKLESEFVYGDYKVYDVRKMIAKSEQEIGKATAKYFFYSNIMNFFKTEITLANGEIRKRPLIETNGETGEIVWDKGRDFATVRKVLSMPQVNIVKKTEVQTGGFSKESILPKRNSDKLIARKKDWDPKKYGGFDSPTVAYSVLVVAKVEKGKSKKLKSVKELLGITIMERSSFEKNPIDFLEAKGYKEVKKDLIIKLPKYSLFELENGRKRMLASAGELQKGNELALPSKYVNFLYLASHYEKLKGSPEDNEQKQLFVEQHKHYLDEIIEQISEFSKRVILADANLDKVLSAYNKHRDKPIREQAENIIHLFTLTNLGAPAAFKYFDTTIDRKRYTSTKEVLDATLIHQSITGLYETRIDLSQLGGDGGPAPEAAAKGGGGGWVQEISDSRPMLHIYLNGRRFLGLLNTGADKTCIAGRDWPANWPIHQTESSLQGLGMACGVARSSQPLRWQHEDKSGIIHPFVIPTLPFTLWGRDIMKDIKVRLMTDSPDDSQDLMIGAIESNLFADQISWKSDQPVWLNQWPLKQEKLQALQQLVTEQLQLGHLEESNSPWNTPVFVIKKKSGKWRLLQDLRAVNATMHDMGALQPGLPSPVAVPKGWEIIIIDLQDCFFNIKLHPEDCKRFAFSVPSPNFKRPYQRFQWKVLPQGMKNSPTLCQKFVDKAILTVRDKYQDSYIVHYMDDILLAHPSRSIVDEILTSMIQALNKHGLVVSTEKIQKYDNLKYLGTHIQGDSVSYQKLQIRTDKLRTLNDFQKLLGNINWIRPFLKLTTGELKPLFEILNGDSNPISTRKLTPEACKALQLMNERLSTARVKRLDLSQPWSLCILKTEYTPTACLWQDGVVEWIHLPHISPKVITPYDIFCTQLIIKGRHRSKELFSKDPDYIVVPYTKVQFDLLLQEKEDWPISLLGFLGEVHFHLPKDPLLTFTLQTAIIFPHMTSTTPLEKGIVIFTDGSANGRSVTYIQGREPIIKENTQNTAQQAEIVAVITAFEEVSQPFNLYTDSKYVTGLFPEIETATLSPRTKIYTELKHLQRLIHKRQEKFYIGHIRGHTGLPGPLAQGNAYADSLTRILTAGKRTADGSEFEKRTADGSEFESPKKKAKVE

SEQ ID NO: 3275 - protein, 2114 aa, synthetic construct
MPAAKRVKLDGGDKKYSIGLDIGTNSVGWAVITDEYKVPSKKFKVLGNTDRHSIKKNLIGALLFDSGETAEATRLKRTARRRYTRRKNRICYLQEIFSNEMAKVDDSFFHRLEESFLVEEDKKHERHPIFGNIVDEVAYHEKYPTIYHLRKKLVDSTDKADLRLIYLALAHMIKFRGHFLIEGDLNPDNSDVDKLFIQLVQTYNQLFEENPINASGVDAKAILSARLSKSRRLENLIAQLPGEKKNGLFGNLIALSLGLTPNFKSNFDLAEDAKLQLSKDTYDDDLDNLLAQIGDQYADLFLAAKNLSDAILLSDILRVNTEITKAPLSASMIKRYDEHHQDLTLLKALVRQQLPEKYKEIFFDQSKNGYAGYIDGGASQEEFYKFIKPILEKMDGTEELLVKLNREDLLRKQRTFDNGSIPHQIHLGELHAILRRQEDFYPFLKDNREKIEKILTFRIPYYVGPLARGNSRFAWMTRKSEETITPWNFEEVVDKGASAQSFIERMTNFDKNLPNEKVLPKHSLLYEYFTVYNELTKVKYVTEGMRKPAFLSGEQKKAIVDLLFKTNRKVTVKQLKEDYFKKIECFDSVEISGVEDRFNASLGTYHDLLKIIKDKDFLDNEENEDILEDIVLTLTLFEDREMIEERLKTYAHLFDDKVMKQLKRRRYTGWGRLSRKLINGIRDKQSGKTILDFLKSDGFANRNFMQLIHDDSLTFKEDIQKAQVSGQGDSLHEHIANLAGSPAIKKGILQTVKVVDELVKVMGRHKPENIVIEMARENQTTQKGQKNSRERMKRIEEGIKELGSQILKEHPVENTQLQNEKLYLYYLQNGRDMYVDQELDINRLSDYDVDHIVPQSFLKDDSIDNKVLTRSDKARGKSDNVPSEEVVKKMKNYWRQLLNAKLITQRKFDNLTKAERGGLSELDKAGFIKRQLVETRQITKHVAQILDSRMNTKYDENDKLIREVKVITLKSKLVSDFRKDFQFYKVREINNYHHAHDAYLNAVVGTALIKKYPKLESEFVYGDYKVYDVRKMIAKSEQEIGKATAKYFFYSNIMNFFKTEITLANGEIRKRPLIETNGETGEIVWDKGRDFATVRKVLSMPQVNIVKKTEVQTGGFSKESILPKRNSDKLIARKKDWDPKKYGGFDSPTVAYSVLVVAKVEKGKSKKLKSVKELLGITIMERSSFEKNPIDFLEAKGYKEVKKDLIIKLPKYSLFELENGRKRMLASAGELQKGNELALPSKYVNFLYLASHYEKLKGSPEDNEQKQLFVEQHKHYLDEIIEQISEFSKRVILADANLDKVLSAYNKHRDKPIREQAENIIHLFTLTNLGAPAAFKYFDTTIDRKRYTSTKEVLDATLIHQSITGLYETRIDLSQLGGDGGGGGPAPGGSGGWVQEISDSRPMLHIYLNGRRFLGLLNTGADKTCIAGRDWPANWPIHQTESSLQGLGMACGVARSSQPLRWQHEDKSGIIHPFVIPTLPFTLWGRDIMKDIKVRLMTDSPDDSQDLMIGAIESNLFADQISWKSDQPVWLNQWPLKQEKLQALQQLVTEQLQLGHLEESNSPWNTPVFVIKKKSGKWRLLQDLRAVNATMHDMGALQPGLPSPVAVPKGWEIIIIDLQDCFFNIKLHPEDCKRFAFSVPSPNFKRPYQRFQWKVLPQGMKNSPTLCQKFVDKAILTVRDKYQDSYIVHYMDDILLAHPSRSIVDEILTSMIQALNKHGLVVSTEKIQKYDNLKYLGTHIQGDSVSYQKLQIRTDKLRTLNDFQKLLGNINWIRPFLKLTTGELKPLFEILNGDSNPISTRKLTPEACKALQLMNERLSTARVKRLDLSQPWSLCILKTEYTPTACLWQDGVVEWIHLPHISPKVITPYDIFCTQLIIKGRHRSKELFSKDPDYIVVPYTKVQFDLLLQEKEDWPISLLGFLGEVHFHLPKDPLLTFTLQTAIIFPHMTSTTPLEKGIVIFTDGSANGRSVTYIQGREPIIKENTQNTAQQAEIVAVITAFEEVSQPFNLYTDSKYVTGLFPEIETATLSPRTKIYTELKHLQRLIHKRQEKFYIGHIRGHTGLPGPLAQGNAYADSLTRILTAGKRTADGSEFEKRTADGSEFESPKKKAKVE

SEQ ID NO: 3276 - protein, 2114 aa, synthetic construct
MPAAKRVKLDGGDKKYSIGLDIGTNSVGWAVITDEYKVPSKKFKVLGNTDRHSIKKNLIGALLFDSGETAEATRLKRTARRRYTRRKNRICYLQEIFSNEMAKVDDSFFHRLEESFLVEEDKKHERHPIFGNIVDEVAYHEKYPTIYHLRKKLVDSTDKADLRLIYLALAHMIKFRGHFLIEGDLNPDNSDVDKLFIQLVQTYNQLFEENPINASGVDAKAILSARLSKSRRLENLIAQLPGEKKNGLFGNLIALSLGLTPNFKSNFDLAEDAKLQLSKDTYDDDLDNLLAQIGDQYADLFLAAKNLSDAILLSDILRVNTEITKAPLSASMIKRYDEHHQDLTLLKALVRQQLPEKYKEIFFDQSKNGYAGYIDGGASQEEFYKFIKPILEKMDGTEELLVKLNREDLLRKQRTFDNGSIPHQIHLGELHAILRRQEDFYPFLKDNREKIEKILTFRIPYYVGPLARGNSRFAWMTRKSEETITPWNFEEVVDKGASAQSFIERMTNFDKNLPNEKVLPKHSLLYEYFTVYNELTKVKYVTEGMRKPAFLSGEQKKAIVDLLFKTNRKVTVKQLKEDYFKKIECFDSVEISGVEDRFNASLGTYHDLLKIIKDKDFLDNEENEDILEDIVLTLTLFEDREMIEERLKTYAHLFDDKVMKQLKRRRYTGWGRLSRKLINGIRDKQSGKTILDFLKSDGFANRNFMQLIHDDSLTFKEDIQKAQVSGQGDSLHEHIANLAGSPAIKKGILQTVKVVDELVKVMGRHKPENIVIEMARENQTTQKGQKNSRERMKRIEEGIKELGSQILKEHPVENTQLQNEKLYLYYLQNGRDMYVDQELDINRLSDYDVDHIVPQSFLKDDSIDNKVLTRSDKARGKSDNVPSEEVVKKMKNYWRQLLNAKLITQRKFDNLTKAERGGLSELDKAGFIKRQLVETRQITKHVAQILDSRMNTKYDENDKLIREVKVITLKSKLVSDFRKDFQFYKVREINNYHHAHDAYLNAVVGTALIKKYPKLESEFVYGDYKVYDVRKMIAKSEQEIGKATAKYFFYSNIMNFFKTEITLANGEIRKRPLIETNGETGEIVWDKGRDFATVRKVLSMPQVNIVKKTEVQTGGFSKESILPKRNSDKLIARKKDWDPKKYGGFDSPTVAYSVLVVAKVEKGKSKKLKSVKELLGITIMERSSFEKNPIDFLEAKGYKEVKKDLIIKLPKYSLFELENGRKRMLASAGELQKGNELALPSKYVNFLYLASHYEKLKGSPEDNEQKQLFVEQHKHYLDEIIEQISEFSKRVILADANLDKVLSAYNKHRDKPIREQAENIIHLFTLTNLGAPAAFKYFDTTIDRKRYTSTKEVLDATLIHQSITGLYETRIDLSQLGGDGGGGSGGGPAPGGWVQEISDSRPMLHIYLNGRRFLGLLNTGADKTCIAGRDWPANWPIHQTESSLQGLGMACGVARSSQPLRWQHEDKSGIIHPFVIPTLPFTLWGRDIMKDIKVRLMTDSPDDSQDLMIGAIESNLFADQISWKSDQPVWLNQWPLKQEKLQALQQLVTEQLQLGHLEESNSPWNTPVFVIKKKSGKWRLLQDLRAVNATMHDMGALQPGLPSPVAVPKGWEIIIIDLQDCFFNIKLHPEDCKRFAFSVPSPNFKRPYQRFQWKVLPQGMKNSPTLCQKFVDKAILTVRDKYQDSYIVHYMDDILLAHPSRSIVDEILTSMIQALNKHGLVVSTEKIQKYDNLKYLGTHIQGDSVSYQKLQIRTDKLRTLNDFQKLLGNINWIRPFLKLTTGELKPLFEILNGDSNPISTRKLTPEACKALQLMNERLSTARVKRLDLSQPWSLCILKTEYTPTACLWQDGVVEWIHLPHISPKVITPYDIFCTQLIIKGRHRSKELFSKDPDYIVVPYTKVQFDLLLQEKEDWPISLLGFLGEVHFHLPKDPLLTFTLQTAIIFPHMTSTTPLEKGIVIFTDGSANGRSVTYIQGREPIIKENTQNTAQQAEIVAVITAFEEVSQPFNLYTDSKYVTGLFPEIETATLSPRTKIYTELKHLQRLIHKRQEKFYIGHIRGHTGLPGPLAQGNAYADSLTRILTAGKRTADGSEFEKRTADGSEFESPKKKAKVE

SEQ ID NO: 3277 - protein, 2135 aa, synthetic construct; identical to SEQ ID NO: 3173

SEQ ID NO: 3278 - protein, 2110 aa, synthetic construct
MPAAKRVKLDGGDKKYSIGLDIGTNSVGWAVITDEYKVPSKKFKVLGNTDRHSIKKNLIGALLFDSGETAEATRLKRTARRRYTRRKNRICYLQEIFSNEMAKVDDSFFHRLEESFLVEEDKKHERHPIFGNIVDEVAYHEKYPTIYHLRKKLVDSTDKADLRLIYLALAHMIKFRGHFLIEGDLNPDNSDVDKLFIQLVQTYNQLFEENPINASGVDAKAILSARLSKSRRLENLIAQLPGEKKNGLFGNLIALSLGLTPNFKSNFDLAEDAKLQLSKDTYDDDLDNLLAQIGDQYADLFLAAKNLSDAILLSDILRVNTEITKAPLSASMIKRYDEHHQDLTLLKALVRQQLPEKYKEIFFDQSKNGYAGYIDGGASQEEFYKFIKPILEKMDGTEELLVKLNREDLLRKQRTFDNGSIPHQIHLGELHAILRRQEDFYPFLKDNREKIEKILTFRIPYYVGPLARGNSRFAWMTRKSEETITPWNFEEVVDKGASAQSFIERMTNFDKNLPNEKVLPKHSLLYEYFTVYNELTKVKYVTEGMRKPAFLSGEQKKAIVDLLFKTNRKVTVKQLKEDYFKKIECFDSVEISGVEDRFNASLGTYHDLLKIIKDKDFLDNEENEDILEDIVLTLTLFEDREMIEERLKTYAHLFDDKVMKQLKRRRYTGWGRLSRKLINGIRDKQSGKTILDFLKSDGFANRNFMQLIHDDSLTFKEDIQKAQVSGQGDSLHEHIANLAGSPAIKKGILQTVKVVDELVKVMGRHKPENIVIEMARENQTTQKGQKNSRERMKRIEEGIKELGSQILKEHPVENTQLQNEKLYLYYLQNGRDMYVDQELDINRLSDYDVDHIVPQSFLKDDSIDNKVLTRSDKARGKSDNVPSEEVVKKMKNYWRQLLNAKLITQRKFDNLTKAERGGLSELDKAGFIKRQLVETRQITKHVAQILDSRMNTKYDENDKLIREVKVITLKSKLVSDFRKDFQFYKVREINNYHHAHDAYLNAVVGTALIKKYPKLESEFVYGDYKVYDVRKMIAKSEQEIGKATAKYFFYSNIMNFFKTEITLANGEIRKRPLIETNGETGEIVWDKGRDFATVRKVLSMPQVNIVKKTEVQTGGFSKESILPKRNSDKLIARKKDWDPKKYGGFDSPTVAYSVLVVAKVEKGKSKKLKSVKELLGITIMERSSFEKNPIDFLEAKGYKEVKKDLIIKLPKYSLFELENGRKRMLASAGELQKGNELALPSKYVNFLYLASHYEKLKGSPEDNEQKQLFVEQHKHYLDEIIEQISEFSKRVILADANLDKVLSAYNKHRDKPIREQAENIIHLFTLTNLGAPAAFKYFDTTIDRKRYTSTKEVLDATLIHQSITGLYETRIDLSQLGGDGGEAAAKGGWVQEISDSRPMLHIYLNGRRFLGLLNTGADKTCIAGRDWPANWPIHQTESSLQGLGMACGVARSSQPLRWQHEDKSGIIHPFVIPTLPFTLWGRDIMKDIKVRLMTDSPDDSQDLMIGAIESNLFADQISWKSDQPVWLNQWPLKQEKLQALQQLVTEQLQLGHLEESNSPWNTPVFVIKKKSGKWRLLQDLRAVNATMHDMGALQPGLPSPVAVPKGWEIIIIDLQDCFFNIKLHPEDCKRFAFSVPSPNFKRPYQRFQWKVLPQGMKNSPTLCQKFVDKAILTVRDKYQDSYIVHYMDDILLAHPSRSIVDEILTSMIQALNKHGLVVSTEKIQKYDNLKYLGTHIQGDSVSYQKLQIRTDKLRTLNDFQKLLGNINWIRPFLKLTTGELKPLFEILNGDSNPISTRKLTPEACKALQLMNERLSTARVKRLDLSQPWSLCILKTEYTPTACLWQDGVVEWIHLPHISPKVITPYDIFCTQLIIKGRHRSKELFSKDPDYIVVPYTKVQFDLLLQEKEDWPISLLGFLGEVHFHLPKDPLLTFTLQTAIIFPHMTSTTPLEKGIVIFTDGSANGRSVTYIQGREPIIKENTQNTAQQAEIVAVITAFEEVSQPFNLYTDSKYVTGLFPEIETATLSPRTKIYTELKHLQRLIHKRQEKFYIGHIRGHTGLPGPLAQGNAYADSLTRILTAGKRTADGSEFEKRTADGSEFESPKKKAKVE

SEQ ID NO: 3279 - protein, 2116 aa, synthetic construct
MPAAKRVKLDGGDKKYSIGLDIGTNSVGWAVITDEYKVPSKKFKVLGNTDRHSIKKNLIGALLFDSGETAEATRLKRTARRRYTRRKNRICYLQEIFSNEMAKVDDSFFHRLEESFLVEEDKKHERHPIFGNIVDEVAYHEKYPTIYHLRKKLVDSTDKADLRLIYLALAHMIKFRGHFLIEGDLNPDNSDVDKLFIQLVQTYNQLFEENPINASGVDAKAILSARLSKSRRLENLIAQLPGEKKNGLFGNLIALSLGLTPNFKSNFDLAEDAKLQLSKDTYDDDLDNLLAQIGDQYADLFLAAKNLSDAILLSDILRVNTEITKAPLSASMIKRYDEHHQDLTLLKALVRQQLPEKYKEIFFDQSKNGYAGYIDGGASQEEFYKFIKPILEKMDGTEELLVKLNREDLLRKQRTFDNGSIPHQIHLGELHAILRRQEDFYPFLKDNREKIEKILTFRIPYYVGPLARGNSRFAWMTRKSEETITPWNFEEVVDKGASAQSFIERMTNFDKNLPNEKVLPKHSLLYEYFTVYNELTKVKYVTEGMRKPAFLSGEQKKAIVDLLFKTNRKVTVKQLKEDYFKKIECFDSVEISGVEDRFNASLGTYHDLLKIIKDKDFLDNEENEDILEDIVLTLTLFEDREMIEERLKTYAHLFDDKVMKQLKRRRYTGWGRLSRKLINGIRDKQSGKTILDFLKSDGFANRNFMQLIHDDSLTFKEDIQKAQVSGQGDSLHEHIANLAGSPAIKKGILQTVKVVDELVKVMGRHKPENIVIEMARENQTTQKGQKNSRERMKRIEEGIKELGSQILKEHPVENTQLQNEKLYLYYLQNGRDMYVDQELDINRLSDYDVDHIVPQSFLKDDSIDNKVLTRSDKARGKSDNVPSEEVVKKMKNYWRQLLNAKLITQRKFDNLTKAERGGLSELDKAGFIKRQLVETRQITKHVAQILDSRMNTKYDENDKLIREVKVITLKSKLVSDFRKDFQFYKVREINNYHHAHDAYLNAVVGTALIKKYPKLESEFVYGDYKVYDVRKMIAKSEQEIGKATAKYFFYSNIMNFFKTEITLANGEIRKRPLIETNGETGEIVWDKGRDFATVRKVLSMPQVNIVKKTEVQTGGFSKESILPKRNSDKLIARKKDWDPKKYGGFDSPTVAYSVLVVAKVEKGKSKKLKSVKELLGITIMERSSFEKNPIDFLEAKGYKEVKKDLIIKLPKYSLFELENGRKRMLASAGELQKGNELALPSKYVNFLYLASHYEKLKGSPEDNEQKQLFVEQHKHYLDEIIEQISEFSKRVILADANLDKVLSAYNKHRDKPIREQAENIIHLFTLTNLGAPAAFKYFDTTIDRKRYTSTKEVLDATLIHQSITGLYETRIDLSQLGGDGGGGGGGSEAAAKGGWVQEISDSRPMLHIYLNGRRFLGLLNTGADKTCIAGRDWPANWPIHQTESSLQGLGMACGVARSSQPLRWQHEDKSGIIHPFVIPTLPFTLWGRDIMKDIKVRLMTDSPDDSQDLMIGAIESNLFADQISWKSDQPVWLNQWPLKQEKLQALQQLVTEQLQLGHLEESNSPWNTPVFVIKKKSGKWRLLQDLRAVNATMHDMGALQPGLPSPVAVPKGWEIIIIDLQDCFFNIKLHPEDCKRFAFSVPSPNFKRPYQRFQWKVLPQGMKNSPTLCQKFVDKAILTVRDKYQDSYIVHYMDDILLAHPSRSIVDEILTSMIQALNKHGLVVSTEKIQKYDNLKYLGTHIQGDSVSYQKLQIRTDKLRTLNDFQKLLGNINWIRPFLKLTTGELKPLFEILNGDSNPISTRKLTPEACKALQLMNERLSTARVKRLDLSQPWSLCILKTEYTPTACLWQDGVVEWIHLPHISPKVITPYDIFCTQLIIKGRHRSKELFSKDPDYIVVPYTKVQFDLLLQEKEDWPISLLGFLGEVHFHLPKDPLLTFTLQTAIIFPHMTSTTPLEKGIVIFTDGSANGRSVTYIQGREPIIKENTQNTAQQAEIVAVITAFEEVSQPFNLYTDSKYVTGLFPEIETATLSPRTKIYTELKHLQRLIHKRQEKFYIGHIRGHTGLPGPLAQGNAYADSLTRILTAGKRTADGSEFEKRTADGSEFESPKKKAKVE

SEQ ID NO: 3280 - protein, 2125 aa, synthetic construct; identical to SEQ ID NO: 3193

SEQ ID NO: 3281 - protein, 2120 aa, synthetic construct
MPAAKRVKLDGGDKKYSIGLDIGTNSVGWAVITDEYKVPSKKFKVLGNTDRHSIKKNLIGALLFDSGETAEATRLKRTARRRYTRRKNRICYLQEIFSNEMAKVDDSFFHRLEESFLVEEDKKHERHPIFGNIVDEVAYHEKYPTIYHLRKKLVDSTDKADLRLIYLALAHMIKFRGHFLIEGDLNPDNSDVDKLFIQLVQTYNQLFEENPINASGVDAKAILSARLSKSRRLENLIAQLPGEKKNGLFGNLIALSLGLTPNFKSNFDLAEDAKLQLSKDTYDDDLDNLLAQIGDQYADLFLAAKNLSDAILLSDILRVNTEITKAPLSASMIKRYDEHHQDLTLLKALVRQQLPEKYKEIFFDQSKNGYAGYIDGGASQEEFYKFIKPILEKMDGTEELLVKLNREDLLRKQRTFDNGSIPHQIHLGELHAILRRQEDFYPFLKDNREKIEKILTFRIPYYVGPLARGNSRFAWMTRKSEETITPWNFEEVVDKGASAQSFIERMTNFDKNLPNEKVLPKHSLLYEYFTVYNELTKVKYVTEGMRKPAFLSGEQKKAIVDLLFKTNRKVTVKQLKEDYFKKIECFDSVEISGVEDRFNASLGTYHDLLKIIKDKDFLDNEENEDILEDIVLTLTLFEDREMIEERLKTYAHLFDDKVMKQLKRRRYTGWGRLSRKLINGIRDKQSGKTILDFLKSDGFANRNFMQLIHDDSLTFKEDIQKAQVSGQGDSLHEHIANLAGSPAIKKGILQTVKVVDELVKVMGRHKPENIVIEMARENQTTQKGQKNSRERMKRIEEGIKELGSQILKEHPVENTQLQNEKLYLYYLQNGRDMYVDQELDINRLSDYDVDHIVPQSFLKDDSIDNKVLTRSDKARGKSDNVPSEEVVKKMKNYWRQLLNAKLITQRKFDNLTKAERGGLSELDKAGFIKRQLVETRQITKHVAQILDSRMNTKYDENDKLIREVKVITLKSKLVSDFRKDFQFYKVREINNYHHAHDAYLNAVVGTALIKKYPKLESEFVYGDYKVYDVRKMIAKSEQEIGKATAKYFFYSNIMNFFKTEITLANGEIRKRPLIETNGETGEIVWDKGRDFATVRKVLSMPQVNIVKKTEVQTGGFSKESILPKRNSDKLIARKKDWDPKKYGGFDSPTVAYSVLVVAKVEKGKSKKLKSVKELLGITIMERSSFEKNPIDFLEAKGYKEVKKDLIIKLPKYSLFELENGRKRMLASAGELQKGNELALPSKYVNFLYLASHYEKLKGSPEDNEQKQLFVEQHKHYLDEIIEQISEFSKRVILADANLDKVLSAYNKHRDKPIREQAENIIHLFTLTNLGAPAAFKYFDTTIDRKRYTSTKEVLDATLIHQSITGLYETRIDLSQLGGDGGGSSGSSGSSGSSGSSGGWVQEISDSRPMLHIYLNGRRFLGLLNTGADKTCIAGRDWPANWPIHQTESSLQGLGMACGVARSSQPLRWQHEDKSGIIHPFVIPTLPFTLWGRDIMKDIKVRLMTDSPDDSQDLMIGAIESNLFADQISWKSDQPVWLNQWPLKQEKLQALQQLVTEQLQLGHLEESNSPWNTPVFVIKKKSGKWRLLQDLRAVNATMHDMGALQPGLPSPVAVPKGWEIIIIDLQDCFFNIKLHPEDCKRFAFSVPSPNFKRPYQRFQWKVLPQGMKNSPTLCQKFVDKAILTVRDKYQDSYIVHYMDDILLAHPSRSIVDEILTSMIQALNKHGLVVSTEKIQKYDNLKYLGTHIQGDSVSYQKLQIRTDKLRTLNDFQKLLGNINWIRPFLKLTTGELKPLFEILNGDSNPISTRKLTPEACKALQLMNERLSTARVKRLDLSQPWSLCILKTEYTPTACLWQDGVVEWIHLPHISPKVITPYDIFCTQLIIKGRHRSKELFSKDPDYIVVPYTKVQFDLLLQEKEDWPISLLGFLGEVHFHLPKDPLLTFTLQTAIIFPHMTSTTPLEKGIVIFTDGSANGRSVTYIQGREPIIKENTQNTAQQAEIVAVITAFEEVSQPFNLYTDSKYVTGLFPEIETATLSPRTKIYTELKHLQRLIHKRQEKFYIGHIRGHTGLPGPLAQGNAYADSLTRILTAGKRTADGSEFEKRTADGSEFESPKKKAKVE

SEQ ID NO: 3282 - protein, 2123 aa, synthetic construct
MPAAKRVKLDGGDKKYSIGLDIGTNSVGWAVITDEYKVPSKKFKVLGNTDRHSIKKNLIGALLFDSGETAEATRLKRTARRRYTRRKNRICYLQEIFSNEMAKVDDSFFHRLEESFLVEEDKKHERHPIFGNIVDEVAYHEKYPTIYHLRKKLVDSTDKADLRLIYLALAHMIKFRGHFLIEGDLNPDNSDVDKLFIQLVQTYNQLFEENPINASGVDAKAILSARLSKSRRLENLIAQLPGEKKNGLFGNLIALSLGLTPNFKSNFDLAEDAKLQLSKDTYDDDLDNLLAQIGDQYADLFLAAKNLSDAILLSDILRVNTEITKAPLSASMIKRYDEHHQDLTLLKALVRQQLPEKYKEIFFDQSKNGYAGYIDGGASQEEFYKFIKPILEKMDGTEELLVKLNREDLLRKQRTFDNGSIPHQIHLGELHAILRRQEDFYPFLKDNREKIEKILTFRIPYYVGPLARGNSRFAWMTRKSEETITPWNFEEVVDKGASAQSFIERMTNFDKNLPNEKVLPKHSLLYEYFTVYNELTKVKYVTEGMRKPAFLSGEQKKAIVDLLFKTNRKVTVKQLKEDYFKKIECFDSVEISGVEDRFNASLGTYHDLLKIIKDKDFLDNEENEDILEDIVLTLTLFEDREMIEERLKTYAHLFDDKVMKQLKRRRYTGWGRLSRKLINGIRDKQSGKTILDFLKSDGFANRNFMQLIHDDSLTFKEDIQKAQVSGQGDSLHEHIANLAGSPAIKKGILQTVKVVDELVKVMGRHKPENIVIEMARENQTTQKGQKNSRERMKRIEEGIKELGSQILKEHPVENTQLQNEKLYLYYLQNGRDMYVDQELDINRLSDYDVDHIVPQSFLKDDSIDNKVLTRSDKARGKSDNVPSEEVVKKMKNYWRQLLNAKLITQRKFDNLTKAERGGLSELDKAGFIKRQLVETRQITKHVAQILDSRMNTKYDENDKLIREVKVITLKSKLVSDFRKDFQFYKVREINNYHHAHDAYLNAVVGTALIKKYPKLESEFVYGDYKVYDVRKMIAKSEQEIGKATAKYFFYSNIMNFFKTEITLANGEIRKRPLIETNGETGEIVWDKGRDFATVRKVLSMPQVNIVKKTEVQTGGFSKESILPKRNSDKLIARKKDWDPKKYGGFDSPTVAYSVLVVAKVEKGKSKKLKSVKELLGITIMERSSFEKNPIDFLEAKGYKEVKKDLIIKLPKYSLFELENGRKRMLASAGELQKGNELALPSKYVNFLYLASHYEKLKGSPEDNEQKQLFVEQHKHYLDEIIEQISEFSKRVILADANLDKVLSAYNKHRDKPIREQAENIIHLFTLTNLGAPAAFKYFDTTIDRKRYTSTKEVLDATLIHQSITGLYETRIDLSQLGGDGGGSSGSSGSSGSSGSSGSSGGWVQEISDSRPMLHIYLNGRRFLGLLNTGADKTCIAGRDWPANWPIHQTESSLQGLGMACGVARSSQPLRWQHEDKSGIIHPFVIPTLPFTLWGRDIMKDIKVRLMTDSPDDSQDLMIGAIESNLFADQISWKSDQPVWLNQWPLKQEKLQALQQLVTEQLQLGHLEESNSPWNTPVFVIKKKSGKWRLLQDLRAVNATMHDMGALQPGLPSPVAVPKGWEIIIIDLQDCFFNIKLHPEDCKRFAFSVPSPNFKRPYQRFQWKVLPQGMKNSPTLCQKFVDKAILTVRDKYQDSYIVHYMDDILLAHPSRSIVDEILTSMIQALNKHGLVVSTEKIQKYDNLKYLGTHIQGDSVSYQKLQIRTDKLRTLNDFQKLLGNINWIRPFLKLTTGELKPLFEILNGDSNPISTRKLTPEACKALQLMNERLSTARVKRLDLSQPWSLCILKTEYTPTACLWQDGVVEWIHLPHISPKVITPYDIFCTQLIIKGRHRSKELFSKDPDYIVVPYTKVQFDLLLQEKEDWPISLLGFLGEVHFHLPKDPLLTFTLQTAIIFPHMTSTTPLEKGIVIFTDGSANGRSVTYIQGREPIIKENTQNTAQQAEIVAVITAFEEVSQPFNLYTDSKYVTGLFPEIETATLSPRTKIYTELKHLQRLIHKRQEKFYIGHIRGHTGLPGPLAQGNAYADSLTRILTAGKRTADGSEFEKRTADGSEFESPKKKAKVE

SEQ ID NO: 3283 - protein, 2116 aa, synthetic construct
MPAAKRVKLDGGDKKYSIGLDIGTNSVGWAVITDEYKVPSKKFKVLGNTDRHSIKKNLIGALLFDSGETAEATRLKRTARRRYTRRKNRICYLQEIFSNEMAKVDDSFFHRLEESFLVEEDKKHERHPIFGNIVDEVAYHEKYPTIYHLRKKLVDSTDKADLRLIYLALAHMIKFRGHFLIEGDLNPDNSDVDKLFIQLVQTYNQLFEENPINASGVDAKAILSARLSKSRRLENLIAQLPGEKKNGLFGNLIALSLGLTPNFKSNFDLAEDAKLQLSKDTYDDDLDNLLAQIGDQYADLFLAAKNLSDAILLSDILRVNTEITKAPLSASMIKRYDEHHQDLTLLKALVRQQLPEKYKEIFFDQSKNGYAGYIDGGASQEEFYKFIKPILEKMDGTEELLVKLNREDLLRKQRTFDNGSIPHQIHLGELHAILRRQEDFYPFLKDNREKIEKILTFRIPYYVGPLARGNSRFAWMTRKSEETITPWNFEEVVDKGASAQSFIERMTNFDKNLPNEKVLPKHSLLYEYFTVYNELTKVKYVTEGMRKPAFLSGEQKKAIVDLLFKTNRKVTVKQLKEDYFKKIECFDSVEISGVEDRFNASLGTYHDLLKIIKDKDFLDNEENEDILEDIVLTLTLFEDREMIEERLKTYAHLFDDKVMKQLKRRRYTGWGRLSRKLINGIRDKQSGKTILDFLKSDGFANRNFMQLIHDDSLTFKEDIQKAQVSGQGDSLHEHIANLAGSPAIKKGILQTVKVVDELVKVMGRHKPENIVIEMARENQTTQKGQKNSRERMKRIEEGIKELGSQILKEHPVENTQLQNEKLYLYYLQNGRDMYVDQELDINRLSDYDVDHIVPQSFLKDDSIDNKVLTRSDKARGKSDNVPSEEVVKKMKNYWRQLLNAKLITQRKFDNLTKAERGGLSELDKAGFIKRQLVETRQITKHVAQILDSRMNTKYDENDKLIREVKVITLKSKLVSDFRKDFQFYKVREINNYHHAHDAYLNAVVGTALIKKYPKLESEFVYGDYKVYDVRKMIAKSEQEIGKATAKYFFYSNIMNFFKTEITLANGEIRKRPLIETNGETGEIVWDKGRDFATVRKVLSMPQVNIVKKTEVQTGGFSKESILPKRNSDKLIARKKDWDPKKYGGFDSPTVAYSVLVVAKVEKGKSKKLKSVKELLGITIMERSSFEKNPIDFLEAKGYKEVKKDLIIKLPKYSLFELENGRKRMLASAGELQKGNELALPSKYVNFLYLASHYEKLKGSPEDNEQKQLFVEQHKHYLDEIIEQISEFSKRVILADANLDKVLSAYNKHRDKPIREQAENIIHLFTLTNLGAPAAFKYFDTTIDRKRYTSTKEVLDATLIHQSITGLYETRIDLSQLGGDGGEAAAKGGGGSSGGWVQEISDSRPMLHIYLNGRRFLGLLNTGADKTCIAGRDWPANWPIHQTESSLQGLGMACGVARSSQPLRWQHEDKSGIIHPFVIPTLPFTLWGRDIMKDIKVRLMTDSPDDSQDLMIGAIESNLFADQISWKSDQPVWLNQWPLKQEKLQALQQLVTEQLQLGHLEESNSPWNTPVFVIKKKSGKWRLLQDLRAVNATMHDMGALQPGLPSPVAVPKGWEIIIIDLQDCFFNIKLHPEDCKRFAFSVPSPNFKRPYQRFQWKVLPQGMKNSPTLCQKFVDKAILTVRDKYQDSYIVHYMDDILLAHPSRSIVDEILTSMIQALNKHGLVVSTEKIQKYDNLKYLGTHIQGDSVSYQKLQIRTDKLRTLNDFQKLLGNINWIRPFLKLTTGELKPLFEILNGDSNPISTRKLTPEACKALQLMNERLSTARVKRLDLSQPWSLCILKTEYTPTACLWQDGVVEWIHLPHISPKVITPYDIFCTQLIIKGRHRSKELFSKDPDYIVVPYTKVQFDLLLQEKEDWPISLLGFLGEVHFHLPKDPLLTFTLQTAIIFPHMTSTTPLEKGIVIFTDGSANGRSVTYIQGREPIIKENTQNTAQQAEIVAVITAFEEVSQPFNLYTDSKYVTGLFPEIETATLSPRTKIYTELKHLQRLIHKRQEKFYIGHIRGHTGLPGPLAQGNAYADSLTRILTAGKRTADGSEFEKRTADGSEFESPKKKAKVE

SEQ ID NO: 3284 - protein, 2116 aa, synthetic construct
MPAAKRVKLDGGDKKYSIGLDIGTNSVGWAVITDEYKVPSKKFKVLGNTDRHSIKKNLIGALLFDSGETAEATRLKRTARRRYTRRKNRICYLQEIFSNEMAKVDDSFFHRLEESFLVEEDKKHERHPIFGNIVDEVAYHEKYPTIYHLRKKLVDSTDKADLRLIYLALAHMIKFRGHFLIEGDLNPDNSDVDKLFIQLVQTYNQLFEENPINASGVDAKAILSARLSKSRRLENLIAQLPGEKKNGLFGNLIALSLGLTPNFKSNFDLAEDAKLQLSKDTYDDDLDNLLAQIGDQYADLFLAAKNLSDAILLSDILRVNTEITKAPLSASMIKRYDEHHQDLTLLKALVRQQLPEKYKEIFFDQSKNGYAGYIDGGASQEEFYKFIKPILEKMDGTEELLVKLNREDLLRKQRTFDNGSIPHQIHLGELHAILRRQEDFYPFLKDNREKIEKILTFRIPYYVGPLARGNSRFAWMTRKSEETITPWNFEEVVDKGASAQSFIERMTNFDKNLPNEKVLPKHSLLYEYFTVYNELTKVKYVTEGMRKPAFLSGEQKKAIVDLLFKTNRKVTVKQLKEDYFKKIECFDSVEISGVEDRFNASLGTYHDLLKIIKDKDFLDNEENEDILEDIVLTLTLFEDREMIEERLKTYAHLFDDKVMKQLKRRRYTGWGRLSRKLINGIRDKQSGKTILDFLKSDGFANRNFMQLIHDDSLTFKEDIQKAQVSGQGDSLHEHIANLAGSPAIKKGILQTVKVVDELVKVMGRHKPENIVIEMARENQTTQKGQKNSRERMKRIEEGIKELGSQILKEHPVENTQLQNEKLYLYYLQNGRDMYVDQELDINRLSDYDVDHIVPQSFLKDDSIDNKVLTRSDKARGKSDNVPSEEVVKKMKNYWRQLLNAKLITQRKFDNLTKAERGGLSELDKAGFIKRQLVETRQITKHVAQILDSRMNTKYDENDKLIREVKVITLKSKLVSDFRKDFQFYKVREINNYHHAHDAYLNAVVGTALIKKYPKLESEFVYGDYKVYDVRKMIAKSEQEIGKATAKYFFYSNIMNFFKTEITLANGEIRKRPLIETNGETGEIVWDKGRDFATVRKVLSMPQVNIVKKTEVQTGGFSKESILPKRNSDKLIARKKDWDPKKYGGFDSPTVAYSVLVVAKVEKGKSKKLKSVKELLGITIMERSSFEKNPIDFLEAKGYKEVKKDLIIKLPKYSLFELENGRKRMLASAGELQKGNELALPSKYVNFLYLASHYEKLKGSPEDNEQKQLFVEQHKHYLDEIIEQISEFSKRVILADANLDKVLSAYNKHRDKPIREQAENIIHLFTLTNLGAPAAFKYFDTTIDRKRYTSTKEVLDATLIHQSITGLYETRIDLSQLGGDGGEAAAKGGGGGSGGWVQEISDSRPMLHIYLNGRRFLGLLNTGADKTCIAGRDWPANWPIHQTESSLQGLGMACGVARSSQPLRWQHEDKSGIIHPFVIPTLPFTLWGRDIMKDIKVRLMTDSPDDSQDLMIGAIESNLFADQISWKSDQPVWLNQWPLKQEKLQALQQLVTEQLQLGHLEESNSPWNTPVFVIKKKSGKWRLLQDLRAVNATMHDMGALQPGLPSPVAVPKGWEIIIIDLQDCFFNIKLHPEDCKRFAFSVPSPNFKRPYQRFQWKVLPQGMKNSPTLCQKFVDKAILTVRDKYQDSYIVHYMDDILLAHPSRSIVDEILTSMIQALNKHGLVVSTEKIQKYDNLKYLGTHIQGDSVSYQKLQIRTDKLRTLNDFQKLLGNINWIRPFLKLTTGELKPLFEILNGDSNPISTRKLTPEACKALQLMNERLSTARVKRLDLSQPWSLCILKTEYTPTACLWQDGVVEWIHLPHISPKVITPYDIFCTQLIIKGRHRSKELFSKDPDYIVVPYTKVQFDLLLQEKEDWPISLLGFLGEVHFHLPKDPLLTFTLQTAIIFPHMTSTTPLEKGIVIFTDGSANGRSVTYIQGREPIIKENTQNTAQQAEIVAVITAFEEVSQPFNLYTDSKYVTGLFPEIETATLSPRTKIYTELKHLQRLIHKRQEKFYIGHIRGHTGLPGPLAQGNAYADSLTRILTAGKRTADGSEFEKRTADGSEFESPKKKAKVE

SEQ ID NO: 3285 - protein, 2116 aa, synthetic construct
MPAAKRVKLDGGDKKYSIGLDIGTNSVGWAVITDEYKVPSKKFKVLGNTDRHSIKKNLIGALLFDSGETAEATRLKRTARRRYTRRKNRICYLQEIFSNEMAKVDDSFFHRLEESFLVEEDKKHERHPIFGNIVDEVAYHEKYPTIYHLRKKLVDSTDKADLRLIYLALAHMIKFRGHFLIEGDLNPDNSDVDKLFIQLVQTYNQLFEENPINASGVDAKAILSARLSKSRRLENLIAQLPGEKKNGLFGNLIALSLGLTPNFKSNFDLAEDAKLQLSKDTYDDDLDNLLAQIGDQYADLFLAAKNLSDAILLSDILRVNTEITKAPLSASMIKRYDEHHQDLTLLKALVRQQLPEKYKEIFFDQSKNGYAGYIDGGASQEEFYKFIKPILEKMDGTEELLVKLNREDLLRKQRTFDNGSIPHQIHLGELHAILRRQEDFYPFLKDNREKIEKILTFRIPYYVGPLARGNSRFAWMTRKSEETITPWNFEEVVDKGASAQSFIERMTNFDKNLPNEKVLPKHSLLYEYFTVYNELTKVKYVTEGMRKPAFLSGEQKKAIVDLLFKTNRKVTVKQLKEDYFKKIECFDSVEISGVEDRFNASLGTYHDLLKIIKDKDFLDNEENEDILEDIVLTLTLFEDREMIEERLKTYAHLFDDKVMKQLKRRRYTGWGRLSRKLINGIRDKQSGKTILDFLKSDGFANRNFMQLIHDDSLTFKEDIQKAQVSGQGDSLHEHIANLAGSPAIKKGILQTVKVVDELVKVMGRHKPENIVIEMARENQTTQKGQKNSRERMKRIEEGIKELGSQILKEHPVENTQLQNEKLYLYYLQNGRDMYVDQELDINRLSDYDVDHIVPQSFLKDDSIDNKVLTRSDKARGKSDNVPSEEVVKKMKNYWRQLLNAKLITQRKFDNLTKAERGGLSELDKAGFIKRQLVETRQITKHVAQILDSRMNTKYDENDKLIREVKVITLKSKLVSDFRKDFQFYKVREINNYHHAHDAYLNAVVGTALIKKYPKLESEFVYGDYKVYDVRKMIAKSEQEIGKATAKYFFYSNIMNFFKTEITLANGEIRKRPLIETNGETGEIVWDKGRDFATVRKVLSMPQVNIVKKTEVQTGGFSKESILPKRNSDKLIARKKDWDPKKYGGFDSPTVAYSVLVVAKVEKGKSKKLKSVKELLGITIMERSSFEKNPIDFLEAKGYKEVKKDLIIKLPKYSLFELENGRKRMLASAGELQKGNELALPSKYVNFLYLASHYEKLKGSPEDNEQKQLFVEQHKHYLDEIIEQISEFSKRVILADANLDKVLSAYNKHRDKPIREQAENIIHLFTLTNLGAPAAFKYFDTTIDRKRYTSTKEVLDATLIHQSITGLYETRIDLSQLGGDGGGGGGSSEAAAKGGWVQEISDSRPMLHIYLNGRRFLGLLNTGADKTCIAGRDWPANWPIHQTESSLQGLGMACGVARSSQPLRWQHEDKSGIIHPFVIPTLPFTLWGRDIMKDIKVRLMTDSPDDSQDLMIGAIESNLFADQISWKSDQPVWLNQWPLKQEKLQALQQLVTEQLQLGHLEESNSPWNTPVFVIKKKSGKWRLLQDLRAVNATMHDMGALQPGLPSPVAVPKGWEIIIIDLQDCFFNIKLHPEDCKRFAFSVPSPNFKRPYQRFQWKVLPQGMKNSPTLCQKFVDKAILTVRDKYQDSYIVHYMDDILLAHPSRSIVDEILTSMIQALNKHGLVVSTEKIQKYDNLKYLGTHIQGDSVSYQKLQIRTDKLRTLNDFQKLLGNINWIRPFLKLTTGELKPLFEILNGDSNPISTRKLTPEACKALQLMNERLSTARVKRLDLSQPWSLCILKTEYTPTACLWQDGVVEWIHLPHISPKVITPYDIFCTQLIIKGRHRSKELFSKDPDYIVVPYTKVQFDLLLQEKEDWPISLLGFLGEVHFHLPKDPLLTFTLQTAIIFPHMTSTTPLEKGIVIFTDGSANGRSVTYIQGREPIIKENTQNTAQQAEIVAVITAFEEVSQPFNLYTDSKYVTGLFPEIETATLSPRTKIYTELKHLQRLIHKRQEKFYIGHIRGHTGLPGPLAQGNAYADSLTRILTAGKRTADGSEFEKRTADGSEFESPKKKAKVE

SEQ ID NO: 3286 - protein, 2116 aa, synthetic construct
MPAAKRVKLDGGDKKYSIGLDIGTNSVGWAVITDEYKVPSKKFKVLGNTDRHSIKKNLIGALLFDSGETAEATRLKRTARRRYTRRKNRICYLQEIFSNEMAKVDDSFFHRLEESFLVEEDKKHERHPIFGNIVDEVAYHEKYPTIYHLRKKLVDSTDKADLRLIYLALAHMIKFRGHFLIEGDLNPDNSDVDKLFIQLVQTYNQLFEENPINASGVDAKAILSARLSKSRRLENLIAQLPGEKKNGLFGNLIALSLGLTPNFKSNFDLAEDAKLQLSKDTYDDDLDNLLAQIGDQYADLFLAAKNLSDAILLSDILRVNTEITKAPLSASMIKRYDEHHQDLTLLKALVRQQLPEKYKEIFFDQSKNGYAGYIDGGASQEEFYKFIKPILEKMDGTEELLVKLNREDLLRKQRTFDNGSIPHQIHLGELHAILRRQEDFYPFLKDNREKIEKILTFRIPYYVGPLARGNSRFAWMTRKSEETITPWNFEEVVDKGASAQSFIERMTNFDKNLPNEKVLPKHSLLYEYFTVYNELTKVKYVTEGMRKPAFLSGEQKKAIVDLLFKTNRKVTVKQLKEDYFKKIECFDSVEISGVEDRFNASLGTYHDLLKIIKDKDFLDNEENEDILEDIVLTLTLFEDREMIEERLKTYAHLFDDKVMKQLKRRRYTGWGRLSRKLINGIRDKQSGKTILDFLKSDGFANRNFMQLIHDDSLTFKEDIQKAQVSGQGDSLHEHIANLAGSPAIKKGILQTVKVVDELVKVMGRHKPENIVIEMARENQTTQKGQKNSRERMKRIEEGIKELGSQILKEHPVENTQLQNEKLYLYYLQNGRDMYVDQELDINRLSDYDVDHIVPQSFLKDDSIDNKVLTRSDKARGKSDNVPSEEVVKKMKNYWRQLLNAKLITQRKFDNLTKAERGGLSELDKAGFIKRQLVETRQITKHVAQILDSRMNTKYDENDKLIREVKVITLKSKLVSDFRKDFQFYKVREINNYHHAHDAYLNAVVGTALIKKYPKLESEFVYGDYKVYDVRKMIAKSEQEIGKATAKYFFYSNIMNFFKTEITLANGEIRKRPLIETNGETGEIVWDKGRDFATVRKVLSMPQVNIVKKTEVQTGGFSKESILPKRNSDKLIARKKDWDPKKYGGFDSPTVAYSVLVVAKVEKGKSKKLKSVKELLGITIMERSSFEKNPIDFLEAKGYKEVKKDLIIKLPKYSLFELENGRKRMLASAGELQKGNELALPSKYVNFLYLASHYEKLKGSPEDNEQKQLFVEQHKHYLDEIIEQISEFSKRVILADANLDKVLSAYNKHRDKPIREQAENIIHLFTLTNLGAPAAFKYFDTTIDRKRYTSTKEVLDATLIHQSITGLYETRIDLSQLGGDGGGGSGGGEAAAKGGWVQEISDSRPMLHIYLNGRRFLGLLNTGADKTCIAGRDWPANWPIHQTESSLQGLGMACGVARSSQPLRWQHEDKSGIIHPFVIPTLPFTLWGRDIMKDIKVRLMTDSPDDSQDLMIGAIESNLFADQISWKSDQPVWLNQWPLKQEKLQALQQLVTEQLQLGHLEESNSPWNTPVFVIKKKSGKWRLLQDLRAVNATMHDMGALQPGLPSPVAVPKGWEIIIIDLQDCFFNIKLHPEDCKRFAFSVPSPNFKRPYQRFQWKVLPQGMKNSPTLCQKFVDKAILTVRDKYQDSYIVHYMDDILLAHPSRSIVDEILTSMIQALNKHGLVVSTEKIQKYDNLKYLGTHIQGDSVSYQKLQIRTDKLRTLNDFQKLLGNINWIRPFLKLTTGELKPLFEILNGDSNPISTRKLTPEACKALQLMNERLSTARVKRLDLSQPWSLCILKTEYTPTACLWQDGVVEWIHLPHISPKVITPYDIFCTQLIIKGRHRSKELFSKDPDYIVVPYTKVQFDLLLQEKEDWPISLLGFLGEVHFHLPKDPLLTFTLQTAIIFPHMTSTTPLEKGIVIFTDGSANGRSVTYIQGREPIIKENTQNTAQQAEIVAVITAFEEVSQPFNLYTDSKYVTGLFPEIETATLSPRTKIYTELKHLQRLIHKRQEKFYIGHIRGHTGLPGPLAQGNAYADSLTRILTAGKRTADGSEFEKRTADGSEFESPKKKAKVE

SEQ ID NO: 3287 - protein, 2114 aa, synthetic construct; identical to SEQ ID NO: 3179

SEQ ID NO: 3288 - protein, 2116 aa, synthetic construct
MPAAKRVKLDGGDKKYSIGLDIGTNSVGWAVITDEYKVPSKKFKVLGNTDRHSIKKNLIGALLFDSGETAEATRLKRTARRRYTRRKNRICYLQEIFSNEMAKVDDSFFHRLEESFLVEEDKKHERHPIFGNIVDEVAYHEKYPTIYHLRKKLVDSTDKADLRLIYLALAHMIKFRGHFLIEGDLNPDNSDVDKLFIQLVQTYNQLFEENPINASGVDAKAILSARLSKSRRLENLIAQLPGEKKNGLFGNLIALSLGLTPNFKSNFDLAEDAKLQLSKDTYDDDLDNLLAQIGDQYADLFLAAKNLSDAILLSDILRVNTEITKAPLSASMIKRYDEHHQDLTLLKALVRQQLPEKYKEIFFDQSKNGYAGYIDGGASQEEFYKFIKPILEKMDGTEELLVKLNREDLLRKQRTFDNGSIPHQIHLGELHAILRRQEDFYPFLKDNREKIEKILTFRIPYYVGPLARGNSRFAWMTRKSEETITPWNFEEVVDKGASAQSFIERMTNFDKNLPNEKVLPKHSLLYEYFTVYNELTKVKYVTEGMRKPAFLSGEQKKAIVDLLFKTNRKVTVKQLKEDYFKKIECFDSVEISGVEDRFNASLGTYHDLLKIIKDKDFLDNEENEDILEDIVLTLTLFEDREMIEERLKTYAHLFDDKVMKQLKRRRYTGWGRLSRKLINGIRDKQSGKTILDFLKSDGFANRNFMQLIHDDSLTFKEDIQKAQVSGQGDSLHEHIANLAGSPAIKKGILQTVKVVDELVKVMGRHKPENIVIEMARENQTTQKGQKNSRERMKRIEEGIKELGSQILKEHPVENTQLQNEKLYLYYLQNGRDMYVDQELDINRLSDYDVDHIVPQSFLKDDSIDNKVLTRSDKARGKSDNVPSEEVVKKMKNYWRQLLNAKLITQRKFDNLTKAERGGLSELDKAGFIKRQLVETRQITKHVAQILDSRMNTKYDENDKLIREVKVITLKSKLVSDFRKDFQFYKVREINNYHHAHDAYLNAVVGTALIKKYPKLESEFVYGDYKVYDVRKMIAKSEQEIGKATAKYFFYSNIMNFFKTEITLANGEIRKRPLIETNGETGEIVWDKGRDFATVRKVLSMPQVNIVKKTEVQTGGFSKESILPKRNSDKLIARKKDWDPKKYGGFDSPTVAYSVLVVAKVEKGKSKKLKSVKELLGITIMERSSFEKNPIDFLEAKGYKEVKKDLIIKLPKYSLFELENGRKRMLASAGELQKGNELALPSKYVNFLYLASHYEKLKGSPEDNEQKQLFVEQHKHYLDEIIEQISEFSKRVILADANLDKVLSAYNKHRDKPIREQAENIIHLFTLTNLGAPAAFKYFDTTIDRKRYTSTKEVLDATLIHQSITGLYETRIDLSQLGGDGGPAPEAAAKGGSGGWVQEISDSRPMLHIYLNGRRFLGLLNTGADKTCIAGRDWPANWPIHQTESSLQGLGMACGVARSSQPLRWQHEDKSGIIHPFVIPTLPFTLWGRDIMKDIKVRLMTDSPDDSQDLMIGAIESNLFADQISWKSDQPVWLNQWPLKQEKLQALQQLVTEQLQLGHLEESNSPWNTPVFVIKKKSGKWRLLQDLRAVNATMHDMGALQPGLPSPVAVPKGWEIIIIDLQDCFFNIKLHPEDCKRFAFSVPSPNFKRPYQRFQWKVLPQGMKNSPTLCQKFVDKAILTVRDKYQDSYIVHYMDDILLAHPSRSIVDEILTSMIQALNKHGLVVSTEKIQKYDNLKYLGTHIQGDSVSYQKLQIRTDKLRTLNDFQKLLGNINWIRPFLKLTTGELKPLFEILNGDSNPISTRKLTPEACKALQLMNERLSTARVKRLDLSQPWSLCILKTEYTPTACLWQDGVVEWIHLPHISPKVITPYDIFCTQLIIKGRHRSKELFSKDPDYIVVPYTKVQFDLLLQEKEDWPISLLGFLGEVHFHLPKDPLLTFTLQTAIIFPHMTSTTPLEKGIVIFTDGSANGRSVTYIQGREPIIKENTQNTAQQAEIVAVITAFEEVSQPFNLYTDSKYVTGLFPEIETATLSPRTKIYTELKHLQRLIHKRQEKFYIGHIRGHTGLPGPLAQGNAYADSLTRILTAGKRTADGSEFEKRTADGSEFESPKKKAKVE

SEQ ID NO: 3289 - protein, 2116 aa, synthetic construct; identical to SEQ ID NO: 3178

SEQ ID NO: 3290 - protein, 2116 aa, synthetic construct
MPAAKRVKLDGGDKKYSIGLDIGTNSVGWAVITDEYKVPSKKFKVLGNTDRHSIKKNLIGALLFDSGETAEATRLKRTARRRYTRRKNRICYLQEIFSNEMAKVDDSFFHRLEESFLVEEDKKHERHPIFGNIVDEVAYHEKYPTIYHLRKKLVDSTDKADLRLIYLALAHMIKFRGHFLIEGDLNPDNSDVDKLFIQLVQTYNQLFEENPINASGVDAKAILSARLSKSRRLENLIAQLPGEKKNGLFGNLIALSLGLTPNFKSNFDLAEDAKLQLSKDTYDDDLDNLLAQIGDQYADLFLAAKNLSDAILLSDILRVNTEITKAPLSASMIKRYDEHHQDLTLLKALVRQQLPEKYKEIFFDQSKNGYAGYIDGGASQEEFYKFIKPILEKMDGTEELLVKLNREDLLRKQRTFDNGSIPHQIHLGELHAILRRQEDFYPFLKDNREKIEKILTFRIPYYVGPLARGNSRFAWMTRKSEETITPWNFEEVVDKGASAQSFIERMTNFDKNLPNEKVLPKHSLLYEYFTVYNELTKVKYVTEGMRKPAFLSGEQKKAIVDLLFKTNRKVTVKQLKEDYFKKIECFDSVEISGVEDRFNASLGTYHDLLKIIKDKDFLDNEENEDILEDIVLTLTLFEDREMIEERLKTYAHLFDDKVMKQLKRRRYTGWGRLSRKLINGIRDKQSGKTILDFLKSDGFANRNFMQLIHDDSLTFKEDIQKAQVSGQGDSLHEHIANLAGSPAIKKGILQTVKVVDELVKVMGRHKPENIVIEMARENQTTQKGQKNSRERMKRIEEGIKELGSQILKEHPVENTQLQNEKLYLYYLQNGRDMYVDQELDINRLSDYDVDHIVPQSFLKDDSIDNKVLTRSDKARGKSDNVPSEEVVKKMKNYWRQLLNAKLITQRKFDNLTKAERGGLSELDKAGFIKRQLVETRQITKHVAQILDSRMNTKYDENDKLIREVKVITLKSKLVSDFRKDFQFYKVREINNYHHAHDAYLNAVVGTALIKKYPKLESEFVYGDYKVYDVRKMIAKSEQEIGKATAKYFFYSNIMNFFKTEITLANGEIRKRPLIETNGETGEIVWDKGRDFATVRKVLSMPQVNIVKKTEVQTGGFSKESILPKRNSDKLIARKKDWDPKKYGGFDSPTVAYSVLVVAKVEKGKSKKLKSVKELLGITIMERSSFEKNPIDFLEAKGYKEVKKDLIIKLPKYSLFELENGRKRMLASAGELQKGNELALPSKYVNFLYLASHYEKLKGSPEDNEQKQLFVEQHKHYLDEIIEQISEFSKRVILADANLDKVLSAYNKHRDKPIREQAENIIHLFTLTNLGAPAAFKYFDTTIDRKRYTSTKEVLDATLIHQSITGLYETRIDLSQLGGDGGPAPGGSEAAAKGGWVQEISDSRPMLHIYLNGRRFLGLLNTGADKTCIAGRDWPANWPIHQTESSLQGLGMACGVARSSQPLRWQHEDKSGIIHPFVIPTLPFTLWGRDIMKDIKVRLMTDSPDDSQDLMIGAIESNLFADQISWKSDQPVWLNQWPLKQEKLQALQQLVTEQLQLGHLEESNSPWNTPVFVIKKKSGKWRLLQDLRAVNATMHDMGALQPGLPSPVAVPKGWEIIIIDLQDCFFNIKLHPEDCKRFAFSVPSPNFKRPYQRFQWKVLPQGMKNSPTLCQKFVDKAILTVRDKYQDSYIVHYMDDILLAHPSRSIVDEILTSMIQALNKHGLVVSTEKIQKYDNLKYLGTHIQGDSVSYQKLQIRTDKLRTLNDFQKLLGNINWIRPFLKLTTGELKPLFEILNGDSNPISTRKLTPEACKALQLMNERLSTARVKRLDLSQPWSLCILKTEYTPTACLWQDGVVEWIHLPHISPKVITPYDIFCTQLIIKGRHRSKELFSKDPDYIVVPYTKVQFDLLLQEKEDWPISLLGFLGEVHFHLPKDPLLTFTLQTAIIFPHMTSTTPLEKGIVIFTDGSANGRSVTYIQGREPIIKENTQNTAQQAEIVAVITAFEEVSQPFNLYTDSKYVTGLFPEIETATLSPRTKIYTELKHLQRLIHKRQEKFYIGHIRGHTGLPGPLAQGNAYADSLTRILTAGKRTADGSEFEKRTADGSEFESPKKKAKVE

SEQ ID NO: 3291 - protein, 2116 aa, synthetic construct
MPAAKRVKLDGGDKKYSIGLDIGTNSVGWAVITDEYKVPSKKFKVLGNTDRHSIKKNLIGALLFDSGETAEATRLKRTARRRYTRRKNRICYLQEIFSNEMAKVDDSFFHRLEESFLVEEDKKHERHPIFGNIVDEVAYHEKYPTIYHLRKKLVDSTDKADLRLIYLALAHMIKFRGHFLIEGDLNPDNSDVDKLFIQLVQTYNQLFEENPINASGVDAKAILSARLSKSRRLENLIAQLPGEKKNGLFGNLIALSLGLTPNFKSNFDLAEDAKLQLSKDTYDDDLDNLLAQIGDQYADLFLAAKNLSDAILLSDILRVNTEITKAPLSASMIKRYDEHHQDLTLLKALVRQQLPEKYKEIFFDQSKNGYAGYIDGGASQEEFYKFIKPILEKMDGTEELLVKLNREDLLRKQRTFDNGSIPHQIHLGELHAILRRQEDFYPFLKDNREKIEKILTFRIPYYVGPLARGNSRFAWMTRKSEETITPWNFEEVVDKGASAQSFIERMTNFDKNLPNEKVLPKHSLLYEYFTVYNELTKVKYVTEGMRKPAFLSGEQKKAIVDLLFKTNRKVTVKQLKEDYFKKIECFDSVEISGVEDRFNASLGTYHDLLKIIKDKDFLDNEENEDILEDIVLTLTLFEDREMIEERLKTYAHLFDDKVMKQLKRRRYTGWGRLSRKLINGIRDKQSGKTILDFLKSDGFANRNFMQLIHDDSLTFKEDIQKAQVSGQGDSLHEHIANLAGSPAIKKGILQTVKVVDELVKVMGRHKPENIVIEMARENQTTQKGQKNSRERMKRIEEGIKELGSQILKEHPVENTQLQNEKLYLYYLQNGRDMYVDQELDINRLSDYDVDHIVPQSFLKDDSIDNKVLTRSDKARGKSDNVPSEEVVKKMKNYWRQLLNAKLITQRKFDNLTKAERGGLSELDKAGFIKRQLVETRQITKHVAQILDSRMNTKYDENDKLIREVKVITLKSKLVSDFRKDFQFYKVREINNYHHAHDAYLNAVVGTALIKKYPKLESEFVYGDYKVYDVRKMIAKSEQEIGKATAKYFFYSNIMNFFKTEITLANGEIRKRPLIETNGETGEIVWDKGRDFATVRKVLSMPQVNIVKKTEVQTGGFSKESILPKRNSDKLIARKKDWDPKKYGGFDSPTVAYSVLVVAKVEKGKSKKLKSVKELLGITIMERSSFEKNPIDFLEAKGYKEVKKDLIIKLPKYSLFELENGRKRMLASAGELQKGNELALPSKYVNFLYLASHYEKLKGSPEDNEQKQLFVEQHKHYLDEIIEQISEFSKRVILADANLDKVLSAYNKHRDKPIREQAENIIHLFTLTNLGAPAAFKYFDTTIDRKRYTSTKEVLDATLIHQSITGLYETRIDLSQLGGDGGGGSEAAAKGGGGGWVQEISDSRPMLHIYLNGRRFLGLLNTGADKTCIAGRDWPANWPIHQTESSLQGLGMACGVARSSQPLRWQHEDKSGIIHPFVIPTLPFTLWGRDIMKDIKVRLMTDSPDDSQDLMIGAIESNLFADQISWKSDQPVWLNQWPLKQEKLQALQQLVTEQLQLGHLEESNSPWNTPVFVIKKKSGKWRLLQDLRAVNATMHDMGALQPGLPSPVAVPKGWEIIIIDLQDCFFNIKLHPEDCKRFAFSVPSPNFKRPYQRFQWKVLPQGMKNSPTLCQKFVDKAILTVRDKYQDSYIVHYMDDILLAHPSRSIVDEILTSMIQALNKHGLVVSTEKIQKYDNLKYLGTHIQGDSVSYQKLQIRTDKLRTLNDFQKLLGNINWIRPFLKLTTGELKPLFEILNGDSNPISTRKLTPEACKALQLMNERLSTARVKRLDLSQPWSLCILKTEYTPTACLWQDGVVEWIHLPHISPKVITPYDIFCTQLIIKGRHRSKELFSKDPDYIVVPYTKVQFDLLLQEKEDWPISLLGFLGEVHFHLPKDPLLTFTLQTAIIFPHMTSTTPLEKGIVIFTDGSANGRSVTYIQGREPIIKENTQNTAQQAEIVAVITAFEEVSQPFNLYTDSKYVTGLFPEIETATLSPRTKIYTELKHLQRLIHKRQEKFYIGHIRGHTGLPGPLAQGNAYADSLTRILTAGKRTADGSEFEKRTADGSEFESPKKKAKVE

SEQ ID NO: 3292 - protein, 2114 aa, synthetic construct
MPAAKRVKLDGGDKKYSIGLDIGTNSVGWAVITDEYKVPSKKFKVLGNTDRHSIKKNLIGALLFDSGETAEATRLKRTARRRYTRRKNRICYLQEIFSNEMAKVDDSFFHRLEESFLVEEDKKHERHPIFGNIVDEVAYHEKYPTIYHLRKKLVDSTDKADLRLIYLALAHMIKFRGHFLIEGDLNPDNSDVDKLFIQLVQTYNQLFEENPINASGVDAKAILSARLSKSRRLENLIAQLPGEKKNGLFGNLIALSLGLTPNFKSNFDLAEDAKLQLSKDTYDDDLDNLLAQIGDQYADLFLAAKNLSDAILLSDILRVNTEITKAPLSASMIKRYDEHHQDLTLLKALVRQQLPEKYKEIFFDQSKNGYAGYIDGGASQEEFYKFIKPILEKMDGTEELLVKLNREDLLRKQRTFDNGSIPHQIHLGELHAILRRQEDFYPFLKDNREKIEKILTFRIPYYVGPLARGNSRFAWMTRKSEETITPWNFEEVVDKGASAQSFIERMTNFDKNLPNEKVLPKHSLLYEYFTVYNELTKVKYVTEGMRKPAFLSGEQKKAIVDLLFKTNRKVTVKQLKEDYFKKIECFDSVEISGVEDRFNASLGTYHDLLKIIKDKDFLDNEENEDILEDIVLTLTLFEDREMIEERLKTYAHLFDDKVMKQLKRRRYTGWGRLSRKLINGIRDKQSGKTILDFLKSDGFANRNFMQLIHDDSLTFKEDIQKAQVSGQGDSLHEHIANLAGSPAIKKGILQTVKVVDELVKVMGRHKPENIVIEMARENQTTQKGQKNSRERMKRIEEGIKELGSQILKEHPVENTQLQNEKLYLYYLQNGRDMYVDQELDINRLSDYDVDHIVPQSFLKDDSIDNKVLTRSDKARGKSDNVPSEEVVKKMKNYWRQLLNAKLITQRKFDNLTKAERGGLSELDKAGFIKRQLVETRQITKHVAQILDSRMNTKYDENDKLIREVKVITLKSKLVSDFRKDFQFYKVREINNYHHAHDAYLNAVVGTALIKKYPKLESEFVYGDYKVYDVRKMIAKSEQEIGKATAKYFFYSNIMNFFKTEITLANGEIRKRPLIETNGETGEIVWDKGRDFATVRKVLSMPQVNIVKKTEVQTGGFSKESILPKRNSDKLIARKKDWDPKKYGGFDSPTVAYSVLVVAKVEKGKSKKLKSVKELLGITIMERSSFEKNPIDFLEAKGYKEVKKDLIIKLPKYSLFELENGRKRMLASAGELQKGNELALPSKYVNFLYLASHYEKLKGSPEDNEQKQLFVEQHKHYLDEIIEQISEFSKRVILADANLDKVLSAYNKHRDKPIREQAENIIHLFTLTNLGAPAAFKYFDTTIDRKRYTSTKEVLDATLIHQSITGLYETRIDLSQLGGDGGGGSGGSGGSGGWVQEISDSRPMLHIYLNGRRFLGLLNTGADKTCIAGRDWPANWPIHQTESSLQGLGMACGVARSSQPLRWQHEDKSGIIHPFVIPTLPFTLWGRDIMKDIKVRLMTDSPDDSQDLMIGAIESNLFADQISWKSDQPVWLNQWPLKQEKLQALQQLVTEQLQLGHLEESNSPWNTPVFVIKKKSGKWRLLQDLRAVNATMHDMGALQPGLPSPVAVPKGWEIIIIDLQDCFFNIKLHPEDCKRFAFSVPSPNFKRPYQRFQWKVLPQGMKNSPTLCQKFVDKAILTVRDKYQDSYIVHYMDDILLAHPSRSIVDEILTSMIQALNKHGLVVSTEKIQKYDNLKYLGTHIQGDSVSYQKLQIRTDKLRTLNDFQKLLGNINWIRPFLKLTTGELKPLFEILNGDSNPISTRKLTPEACKALQLMNERLSTARVKRLDLSQPWSLCILKTEYTPTACLWQDGVVEWIHLPHISPKVITPYDIFCTQLIIKGRHRSKELFSKDPDYIVVPYTKVQFDLLLQEKEDWPISLLGFLGEVHFHLPKDPLLTFTLQTAIIFPHMTSTTPLEKGIVIFTDGSANGRSVTYIQGREPIIKENTQNTAQQAEIVAVITAFEEVSQPFNLYTDSKYVTGLFPEIETATLSPRTKIYTELKHLQRLIHKRQEKFYIGHIRGHTGLPGPLAQGNAYADSLTRILTAGKRTADGSEFEKRTADGSEFESPKKKAKVE

SEQ ID NO: 3293 - protein, 2113 aa, synthetic construct
MPAAKRVKLDGGDKKYSIGLDIGTNSVGWAVITDEYKVPSKKFKVLGNTDRHSIKKNLIGALLFDSGETAEATRLKRTARRRYTRRKNRICYLQEIFSNEMAKVDDSFFHRLEESFLVEEDKKHERHPIFGNIVDEVAYHEKYPTIYHLRKKLVDSTDKADLRLIYLALAHMIKFRGHFLIEGDLNPDNSDVDKLFIQLVQTYNQLFEENPINASGVDAKAILSARLSKSRRLENLIAQLPGEKKNGLFGNLIALSLGLTPNFKSNFDLAEDAKLQLSKDTYDDDLDNLLAQIGDQYADLFLAAKNLSDAILLSDILRVNTEITKAPLSASMIKRYDEHHQDLTLLKALVRQQLPEKYKEIFFDQSKNGYAGYIDGGASQEEFYKFIKPILEKMDGTEELLVKLNREDLLRKQRTFDNGSIPHQIHLGELHAILRRQEDFYPFLKDNREKIEKILTFRIPYYVGPLARGNSRFAWMTRKSEETITPWNFEEVVDKGASAQSFIERMTNFDKNLPNEKVLPKHSLLYEYFTVYNELTKVKYVTEGMRKPAFLSGEQKKAIVDLLFKTNRKVTVKQLKEDYFKKIECFDSVEISGVEDRFNASLGTYHDLLKIIKDKDFLDNEENEDILEDIVLTLTLFEDREMIEERLKTYAHLFDDKVMKQLKRRRYTGWGRLSRKLINGIRDKQSGKTILDFLKSDGFANRNFMQLIHDDSLTFKEDIQKAQVSGQGDSLHEHIANLAGSPAIKKGILQTVKVVDELVKVMGRHKPENIVIEMARENQTTQKGQKNSRERMKRIEEGIKELGSQILKEHPVENTQLQNEKLYLYYLQNGRDMYVDQELDINRLSDYDVDHIVPQSFLKDDSIDNKVLTRSDKARGKSDNVPSEEVVKKMKNYWRQLLNAKLITQRKFDNLTKAERGGLSELDKAGFIKRQLVETRQITKHVAQILDSRMNTKYDENDKLIREVKVITLKSKLVSDFRKDFQFYKVREINNYHHAHDAYLNAVVGTALIKKYPKLESEFVYGDYKVYDVRKMIAKSEQEIGKATAKYFFYSNIMNFFKTEITLANGEIRKRPLIETNGETGEIVWDKGRDFATVRKVLSMPQVNIVKKTEVQTGGFSKESILPKRNSDKLIARKKDWDPKKYGGFDSPTVAYSVLVVAKVEKGKSKKLKSVKELLGITIMERSSFEKNPIDFLEAKGYKEVKKDLIIKLPKYSLFELENGRKRMLASAGELQKGNELALPSKYVNFLYLASHYEKLKGSPEDNEQKQLFVEQHKHYLDEIIEQISEFSKRVILADANLDKVLSAYNKHRDKPIREQAENIIHLFTLTNLGAPAAFKYFDTTIDRKRYTSTKEVLDATLIHQSITGLYETRIDLSQLGGDGGGGSEAAAKGGWVQEISDSRPMLHIYLNGRRFLGLLNTGADKTCIAGRDWPANWPIHQTESSLQGLGMACGVARSSQPLRWQHEDKSGIIHPFVIPTLPFTLWGRDIMKDIKVRLMTDSPDDSQDLMIGAIESNLFADQISWKSDQPVWLNQWPLKQEKLQALQQLVTEQLQLGHLEESNSPWNTPVFVIKKKSGKWRLLQDLRAVNATMHDMGALQPGLPSPVAVPKGWEIIIIDLQDCFFNIKLHPEDCKRFAFSVPSPNFKRPYQRFQWKVLPQGMKNSPTLCQKFVDKAILTVRDKYQDSYIVHYMDDILLAHPSRSIVDEILTSMIQALNKHGLVVSTEKIQKYDNLKYLGTHIQGDSVSYQKLQIRTDKLRTLNDFQKLLGNINWIRPFLKLTTGELKPLFEILNGDSNPISTRKLTPEACKALQLMNERLSTARVKRLDLSQPWSLCILKTEYTPTACLWQDGVVEWIHLPHISPKVITPYDIFCTQLIIKGRHRSKELFSKDPDYIVVPYTKVQFDLLLQEKEDWPISLLGFLGEVHFHLPKDPLLTFTLQTAIIFPHMTSTTPLEKGIVIFTDGSANGRSVTYIQGREPIIKENTQNTAQQAEIVAVITAFEEVSQPFNLYTDSKYVTGLFPEIETATLSPRTKIYTELKHLQRLIHKRQEKFYIGHIRGHTGLPGPLAQGNAYADSLTRILTAGKRTADGSEFEKRTADGSEFESPKKKAKVE

SEQ ID NO: 3294 - protein, 2043 aa, synthetic construct
MPAAKRVKLDGGDKKYSIGLDIGTNSVGWAVITDEYKVPSKKFKVLGNTDRHSIKKNLIGALLFDSGETAEATRLKRTARRRYTRRKNRICYLQEIFSNEMAKVDDSFFHRLEESFLVEEDKKHERHPIFGNIVDEVAYHEKYPTIYHLRKKLVDSTDKADLRLIYLALAHMIKFRGHFLIEGDLNPDNSDVDKLFIQLVQTYNQLFEENPINASGVDAKAILSARLSKSRRLENLIAQLPGEKKNGLFGNLIALSLGLTPNFKSNFDLAEDAKLQLSKDTYDDDLDNLLAQIGDQYADLFLAAKNLSDAILLSDILRVNTEITKAPLSASMIKRYDEHHQDLTLLKALVRQQLPEKYKEIFFDQSKNGYAGYIDGGASQEEFYKFIKPILEKMDGTEELLVKLNREDLLRKQRTFDNGSIPHQIHLGELHAILRRQEDFYPFLKDNREKIEKILTFRIPYYVGPLARGNSRFAWMTRKSEETITPWNFEEVVDKGASAQSFIERMTNFDKNLPNEKVLPKHSLLYEYFTVYNELTKVKYVTEGMRKPAFLSGEQKKAIVDLLFKTNRKVTVKQLKEDYFKKIECFDSVEISGVEDRFNASLGTYHDLLKIIKDKDFLDNEENEDILEDIVLTLTLFEDREMIEERLKTYAHLFDDKVMKQLKRRRYTGWGRLSRKLINGIRDKQSGKTILDFLKSDGFANRNFMQLIHDDSLTFKEDIQKAQVSGQGDSLHEHIANLAGSPAIKKGILQTVKVVDELVKVMGRHKPENIVIEMARENQTTQKGQKNSRERMKRIEEGIKELGSQILKEHPVENTQLQNEKLYLYYLQNGRDMYVDQELDINRLSDYDVDHIVPQSFLKDDSIDNKVLTRSDKARGKSDNVPSEEVVKKMKNYWRQLLNAKLITQRKFDNLTKAERGGLSELDKAGFIKRQLVETRQITKHVAQILDSRMNTKYDENDKLIREVKVITLKSKLVSDFRKDFQFYKVREINNYHHAHDAYLNAVVGTALIKKYPKLESEFVYGDYKVYDVRKMIAKSEQEIGKATAKYFFYSNIMNFFKTEITLANGEIRKRPLIETNGETGEIVWDKGRDFATVRKVLSMPQVNIVKKTEVQTGGFSKESILPKRNSDKLIARKKDWDPKKYGGFDSPTVAYSVLVVAKVEKGKSKKLKSVKELLGITIMERSSFEKNPIDFLEAKGYKEVKKDLIIKLPKYSLFELENGRKRMLASAGELQKGNELALPSKYVNFLYLASHYEKLKGSPEDNEQKQLFVEQHKHYLDEIIEQISEFSKRVILADANLDKVLSAYNKHRDKPIREQAENIIHLFTLTNLGAPAAFKYFDTTIDRKRYTSTKEVLDATLIHQSITGLYETRIDLSQLGGDGGEAAAKEAAAKEAAAKEAAAKEAAAKEAAAKGGGRDIMKDIKVRLMTDSPDDSQDLMIGAIESNLFADQISWKSDQPVWLNQWPLKQEKLQALQQLVTEQLQLGHLEESNSPWNTPVFVIKKKSGKWRLLQDLRAVNATMHDMGALQPGLPSPVAVPKGWEIIIIDLQDCFFNIKLHPEDCKRFAFSVPSPNFKRPYQRFQWKVLPQGMKNSPTLCQKFVDKAILTVRDKYQDSYIVHYMDDILLAHPSRSIVDEILTSMIQALNKHGLVVSTEKIQKYDNLKYLGTHIQGDSVSYQKLQIRTDKLRTLNDFQKLLGNINWIRPFLKLTTGELKPLFEILNGDSNPISTRKLTPEACKALQLMNERLSTARVKRLDLSQPWSLCILKTEYTPTACLWQDGVVEWIHLPHISPKVITPYDIFCTQLIIKGRHRSKELFSKDPDYIVVPYTKVQFDLLLQEKEDWPISLLGFLGEVHFHLPKDPLLTFTLQTAIIFPHMTSTTPLEKGIVIFTDGSANGRSVTYIQGREPIIKENTQNTAQQAEIVAVITAFEEVSQPFNLYTDSKYVTGLFPEIETATLSPRTKIYTELKHLQRLIHKRQEKFYIGHIRGHTGLPGPLAQGNAYADSLTRILTAGKRTADGSEFEKRTADGSEFESPKKKAKVE

SEQ ID NO: 3295 - protein, 2046 aa, synthetic construct; identical to SEQ ID NO: 3238

SEQ ID NO: 3296 - protein, 2028 aa, synthetic construct; identical to SEQ ID NO: 3201

SEQ ID NO: 3297 - protein, 2031 aa, synthetic construct
MPAAKRVKLDGGDKKYSIGLDIGTNSVGWAVITDEYKVPSKKFKVLGNTDRHSIKKNLIGALLFDSGETAEATRLKRTARRRYTRRKNRICYLQEIFSNEMAKVDDSFFHRLEESFLVEEDKKHERHPIFGNIVDEVAYHEKYPTIYHLRKKLVDSTDKADLRLIYLALAHMIKFRGHFLIEGDLNPDNSDVDKLFIQLVQTYNQLFEENPINASGVDAKAILSARLSKSRRLENLIAQLPGEKKNGLFGNLIALSLGLTPNFKSNFDLAEDAKLQLSKDTYDDDLDNLLAQIGDQYADLFLAAKNLSDAILLSDILRVNTEITKAPLSASMIKRYDEHHQDLTLLKALVRQQLPEKYKEIFFDQSKNGYAGYIDGGASQEEFYKFIKPILEKMDGTEELLVKLNREDLLRKQRTFDNGSIPHQIHLGELHAILRRQEDFYPFLKDNREKIEKILTFRIPYYVGPLARGNSRFAWMTRKSEETITPWNFEEVVDKGASAQSFIERMTNFDKNLPNEKVLPKHSLLYEYFTVYNELTKVKYVTEGMRKPAFLSGEQKKAIVDLLFKTNRKVTVKQLKEDYFKKIECFDSVEISGVEDRFNASLGTYHDLLKIIKDKDFLDNEENEDILEDIVLTLTLFEDREMIEERLKTYAHLFDDKVMKQLKRRRYTGWGRLSRKLINGIRDKQSGKTILDFLKSDGFANRNFMQLIHDDSLTFKEDIQKAQVSGQGDSLHEHIANLAGSPAIKKGILQTVKVVDELVKVMGRHKPENIVIEMARENQTTQKGQKNSRERMKRIEEGIKELGSQILKEHPVENTQLQNEKLYLYYLQNGRDMYVDQELDINRLSDYDVDHIVPQSFLKDDSIDNKVLTRSDKARGKSDNVPSEEVVKKMKNYWRQLLNAKLITQRKFDNLTKAERGGLSELDKAGFIKRQLVETRQITKHVAQILDSRMNTKYDENDKLIREVKVITLKSKLVSDFRKDFQFYKVREINNYHHAHDAYLNAVVGTALIKKYPKLESEFVYGDYKVYDVRKMIAKSEQEIGKATAKYFFYSNIMNFFKTEITLANGEIRKRPLIETNGETGEIVWDKGRDFATVRKVLSMPQVNIVKKTEVQTGGFSKESILPKRNSDKLIARKKDWDPKKYGGFDSPTVAYSVLVVAKVEKGKSKKLKSVKELLGITIMERSSFEKNPIDFLEAKGYKEVKKDLIIKLPKYSLFELENGRKRMLASAGELQKGNELALPSKYVNFLYLASHYEKLKGSPEDNEQKQLFVEQHKHYLDEIIEQISEFSKRVILADANLDKVLSAYNKHRDKPIREQAENIIHLFTLTNLGAPAAFKYFDTTIDRKRYTSTKEVLDATLIHQSITGLYETRIDLSQLGGDGGGSSGSSGSSGSSGSSGSSGGGRDIMKDIKVRLMTDSPDDSQDLMIGAIESNLFADQISWKSDQPVWLNQWPLKQEKLQALQQLVTEQLQLGHLEESNSPWNTPVFVIKKKSGKWRLLQDLRAVNATMHDMGALQPGLPSPVAVPKGWEIIIIDLQDCFFNIKLHPEDCKRFAFSVPSPNFKRPYQRFQWKVLPQGMKNSPTLCQKFVDKAILTVRDKYQDSYIVHYMDDILLAHPSRSIVDEILTSMIQALNKHGLVVSTEKIQKYDNLKYLGTHIQGDSVSYQKLQIRTDKLRTLNDFQKLLGNINWIRPFLKLTTGELKPLFEILNGDSNPISTRKLTPEACKALQLMNERLSTARVKRLDLSQPWSLCILKTEYTPTACLWQDGVVEWIHLPHISPKVITPYDIFCTQLIIKGRHRSKELFSKDPDYIVVPYTKVQFDLLLQEKEDWPISLLGFLGEVHFHLPKDPLLTFTLQTAIIFPHMTSTTPLEKGIVIFTDGSANGRSVTYIQGREPIIKENTQNTAQQAEIVAVITAFEEVSQPFNLYTDSKYVTGLFPEIETATLSPRTKIYTELKHLQRLIHKRQEKFYIGHIRGHTGLPGPLAQGNAYADSLTRILTAGKRTADGSEFEKRTADGSEFESPKKKAKVE

SEQ ID NO: 3298 - protein, 2028 aa, synthetic construct
MPAAKRVKLDGGDKKYSIGLDIGTNSVGWAVITDEYKVPSKKFKVLGNTDRHSIKKNLIGALLFDSGETAEATRLKRTARRRYTRRKNRICYLQEIFSNEMAKVDDSFFHRLEESFLVEEDKKHERHPIFGNIVDEVAYHEKYPTIYHLRKKLVDSTDKADLRLIYLALAHMIKFRGHFLIEGDLNPDNSDVDKLFIQLVQTYNQLFEENPINASGVDAKAILSARLSKSRRLENLIAQLPGEKKNGLFGNLIALSLGLTPNFKSNFDLAEDAKLQLSKDTYDDDLDNLLAQIGDQYADLFLAAKNLSDAILLSDILRVNTEITKAPLSASMIKRYDEHHQDLTLLKALVRQQLPEKYKEIFFDQSKNGYAGYIDGGASQEEFYKFIKPILEKMDGTEELLVKLNREDLLRKQRTFDNGSIPHQIHLGELHAILRRQEDFYPFLKDNREKIEKILTFRIPYYVGPLARGNSRFAWMTRKSEETITPWNFEEVVDKGASAQSFIERMTNFDKNLPNEKVLPKHSLLYEYFTVYNELTKVKYVTEGMRKPAFLSGEQKKAIVDLLFKTNRKVTVKQLKEDYFKKIECFDSVEISGVEDRFNASLGTYHDLLKIIKDKDFLDNEENEDILEDIVLTLTLFEDREMIEERLKTYAHLFDDKVMKQLKRRRYTGWGRLSRKLINGIRDKQSGKTILDFLKSDGFANRNFMQLIHDDSLTFKEDIQKAQVSGQGDSLHEHIANLAGSPAIKKGILQTVKVVDELVKVMGRHKPENIVIEMARENQTTQKGQKNSRERMKRIEEGIKELGSQILKEHPVENTQLQNEKLYLYYLQNGRDMYVDQELDINRLSDYDVDHIVPQSFLKDDSIDNKVLTRSDKARGKSDNVPSEEVVKKMKNYWRQLLNAKLITQRKFDNLTKAERGGLSELDKAGFIKRQLVETRQITKHVAQILDSRMNTKYDENDKLIREVKVITLKSKLVSDFRKDFQFYKVREINNYHHAHDAYLNAVVGTALIKKYPKLESEFVYGDYKVYDVRKMIAKSEQEIGKATAKYFFYSNIMNFFKTEITLANGEIRKRPLIETNGETGEIVWDKGRDFATVRKVLSMPQVNIVKKTEVQTGGFSKESILPKRNSDKLIARKKDWDPKKYGGFDSPTVAYSVLVVAKVEKGKSKKLKSVKELLGITIMERSSFEKNPIDFLEAKGYKEVKKDLIIKLPKYSLFELENGRKRMLASAGELQKGNELALPSKYVNFLYLASHYEKLKGSPEDNEQKQLFVEQHKHYLDEIIEQISEFSKRVILADANLDKVLSAYNKHRDKPIREQAENIIHLFTLTNLGAPAAFKYFDTTIDRKRYTSTKEVLDATLIHQSITGLYETRIDLSQLGGDGGGGGGSEAAAKGGGGSGGGRDIMKDIKVRLMTDSPDDSQDLMIGAIESNLFADQISWKSDQPVWLNQWPLKQEKLQALQQLVTEQLQLGHLEESNSPWNTPVFVIKKKSGKWRLLQDLRAVNATMHDMGALQPGLPSPVAVPKGWEIIIIDLQDCFFNIKLHPEDCKRFAFSVPSPNFKRPYQRFQWKVLPQGMKNSPTLCQKFVDKAILTVRDKYQDSYIVHYMDDILLAHPSRSIVDEILTSMIQALNKHGLVVSTEKIQKYDNLKYLGTHIQGDSVSYQKLQIRTDKLRTLNDFQKLLGNINWIRPFLKLTTGELKPLFEILNGDSNPISTRKLTPEACKALQLMNERLSTARVKRLDLSQPWSLCILKTEYTPTACLWQDGVVEWIHLPHISPKVITPYDIFCTQLIIKGRHRSKELFSKDPDYIVVPYTKVQFDLLLQEKEDWPISLLGFLGEVHFHLPKDPLLTFTLQTAIIFPHMTSTTPLEKGIVIFTDGSANGRSVTYIQGREPIIKENTQNTAQQAEIVAVITAFEEVSQPFNLYTDSKYVTGLFPEIETATLSPRTKIYTELKHLQRLIHKRQEKFYIGHIRGHTGLPGPLAQGNAYADSLTRILTAGKRTADGSEFEKRTADGSEFESPKKKAKVE

SEQ ID NO: 3299 - protein, 2028 aa, synthetic construct
MPAAKRVKLDGGDKKYSIGLDIGTNSVGWAVITDEYKVPSKKFKVLGNTDRHSIKKNLIGALLFDSGETAEATRLKRTARRRYTRRKNRICYLQEIFSNEMAKVDDSFFHRLEESFLVEEDKKHERHPIFGNIVDEVAYHEKYPTIYHLRKKLVDSTDKADLRLIYLALAHMIKFRGHFLIEGDLNPDNSDVDKLFIQLVQTYNQLFEENPINASGVDAKAILSARLSKSRRLENLIAQLPGEKKNGLFGNLIALSLGLTPNFKSNFDLAEDAKLQLSKDTYDDDLDNLLAQIGDQYADLFLAAKNLSDAILLSDILRVNTEITKAPLSASMIKRYDEHHQDLTLLKALVRQQLPEKYKEIFFDQSKNGYAGYIDGGASQEEFYKFIKPILEKMDGTEELLVKLNREDLLRKQRTFDNGSIPHQIHLGELHAILRRQEDFYPFLKDNREKIEKILTFRIPYYVGPLARGNSRFAWMTRKSEETITPWNFEEVVDKGASAQSFIERMTNFDKNLPNEKVLPKHSLLYEYFTVYNELTKVKYVTEGMRKPAFLSGEQKKAIVDLLFKTNRKVTVKQLKEDYFKKIECFDSVEISGVEDRFNASLGTYHDLLKIIKDKDFLDNEENEDILEDIVLTLTLFEDREMIEERLKTYAHLFDDKVMKQLKRRRYTGWGRLSRKLINGIRDKQSGKTILDFLKSDGFANRNFMQLIHDDSLTFKEDIQKAQVSGQGDSLHEHIANLAGSPAIKKGILQTVKVVDELVKVMGRHKPENIVIEMARENQTTQKGQKNSRERMKRIEEGIKELGSQILKEHPVENTQLQNEKLYLYYLQNGRDMYVDQELDINRLSDYDVDHIVPQSFLKDDSIDNKVLTRSDKARGKSDNVPSEEVVKKMKNYWRQLLNAKLITQRKFDNLTKAERGGLSELDKAGFIKRQLVETRQITKHVAQILDSRMNTKYDENDKLIREVKVITLKSKLVSDFRKDFQFYKVREINNYHHAHDAYLNAVVGTALIKKYPKLESEFVYGDYKVYDVRKMIAKSEQEIGKATAKYFFYSNIMNFFKTEITLANGEIRKRPLIETNGETGEIVWDKGRDFATVRKVLSMPQVNIVKKTEVQTGGFSKESILPKRNSDKLIARKKDWDPKKYGGFDSPTVAYSVLVVAKVEKGKSKKLKSVKELLGITIMERSSFEKNPIDFLEAKGYKEVKKDLIIKLPKYSLFELENGRKRMLASAGELQKGNELALPSKYVNFLYLASHYEKLKGSPEDNEQKQLFVEQHKHYLDEIIEQISEFSKRVILADANLDKVLSAYNKHRDKPIREQAENIIHLFTLTNLGAPAAFKYFDTTIDRKRYTSTKEVLDATLIHQSITGLYETRIDLSQLGGDGGEAAAKEAAAKEAAAKGGGRDIMKDIKVRLMTDSPDDSQDLMIGAIESNLFADQISWKSDQPVWLNQWPLKQEKLQALQQLVTEQLQLGHLEESNSPWNTPVFVIKKKSGKWRLLQDLRAVNATMHDMGALQPGLPSPVAVPKGWEIIIIDLQDCFFNIKLHPEDCKRFAFSVPSPNFKRPYQRFQWKVLPQGMKNSPTLCQKFVDKAILTVRDKYQDSYIVHYMDDILLAHPSRSIVDEILTSMIQALNKHGLVVSTEKIQKYDNLKYLGTHIQGDSVSYQKLQIRTDKLRTLNDFQKLLGNINWIRPFLKLTTGELKPLFEILNGDSNPISTRKLTPEACKALQLMNERLSTARVKRLDLSQPWSLCILKTEYTPTACLWQDGVVEWIHLPHISPKVITPYDIFCTQLIIKGRHRSKELFSKDPDYIVVPYTKVQFDLLLQEKEDWPISLLGFLGEVHFHLPKDPLLTFTLQTAIIFPHMTSTTPLEKGIVIFTDGSANGRSVTYIQGREPIIKENTQNTAQQAEIVAVITAFEEVSQPFNLYTDSKYVTGLFPEIETATLSPRTKIYTELKHLQRLIHKRQEKFYIGHIRGHTGLPGPLAQGNAYADSLTRILTAGKRTADGSEFEKRTADGSEFESPKKKAKVE

SEQ ID NO: 3300 - protein, 2024 aa, synthetic construct; identical to SEQ ID NO: 3213

SEQ ID NO: 3301 - protein, 2024 aa, synthetic construct
MPAAKRVKLDGGDKKYSIGLDIGTNSVGWAVITDEYKVPSKKFKVLGNTDRHSIKKNLIGALLFDSGETAEATRLKRTARRRYTRRKNRICYLQEIFSNEMAKVDDSFFHRLEESFLVEEDKKHERHPIFGNIVDEVAYHEKYPTIYHLRKKLVDSTDKADLRLIYLALAHMIKFRGHFLIEGDLNPDNSDVDKLFIQLVQTYNQLFEENPINASGVDAKAILSARLSKSRRLENLIAQLPGEKKNGLFGNLIALSLGLTPNFKSNFDLAEDAKLQLSKDTYDDDLDNLLAQIGDQYADLFLAAKNLSDAILLSDILRVNTEITKAPLSASMIKRYDEHHQDLTLLKALVRQQLPEKYKEIFFDQSKNGYAGYIDGGASQEEFYKFIKPILEKMDGTEELLVKLNREDLLRKQRTFDNGSIPHQIHLGELHAILRRQEDFYPFLKDNREKIEKILTFRIPYYVGPLARGNSRFAWMTRKSEETITPWNFEEVVDKGASAQSFIERMTNFDKNLPNEKVLPKHSLLYEYFTVYNELTKVKYVTEGMRKPAFLSGEQKKAIVDLLFKTNRKVTVKQLKEDYFKKIECFDSVEISGVEDRFNASLGTYHDLLKIIKDKDFLDNEENEDILEDIVLTLTLFEDREMIEERLKTYAHLFDDKVMKQLKRRRYTGWGRLSRKLINGIRDKQSGKTILDFLKSDGFANRNFMQLIHDDSLTFKEDIQKAQVSGQGDSLHEHIANLAGSPAIKKGILQTVKVVDELVKVMGRHKPENIVIEMARENQTTQKGQKNSRERMKRIEEGIKELGSQILKEHPVENTQLQNEKLYLYYLQNGRDMYVDQELDINRLSDYDVDHIVPQSFLKDDSIDNKVLTRSDKARGKSDNVPSEEVVKKMKNYWRQLLNAKLITQRKFDNLTKAERGGLSELDKAGFIKRQLVETRQITKHVAQILDSRMNTKYDENDKLIREVKVITLKSKLVSDFRKDFQFYKVREINNYHHAHDAYLNAVVGTALIKKYPKLESEFVYGDYKVYDVRKMIAKSEQEIGKATAKYFFYSNIMNFFKTEITLANGEIRKRPLIETNGETGEIVWDKGRDFATVRKVLSMPQVNIVKKTEVQTGGFSKESILPKRNSDKLIARKKDWDPKKYGGFDSPTVAYSVLVVAKVEKGKSKKLKSVKELLGITIMERSSFEKNPIDFLEAKGYKEVKKDLIIKLPKYSLFELENGRKRMLASAGELQKGNELALPSKYVNFLYLASHYEKLKGSPEDNEQKQLFVEQHKHYLDEIIEQISEFSKRVILADANLDKVLSAYNKHRDKPIREQAENIIHLFTLTNLGAPAAFKYFDTTIDRKRYTSTKEVLDATLIHQSITGLYETRIDLSQLGGDGGEAAAKGSSGGSGGGRDIMKDIKVRLMTDSPDDSQDLMIGAIESNLFADQISWKSDQPVWLNQWPLKQEKLQALQQLVTEQLQLGHLEESNSPWNTPVFVIKKKSGKWRLLQDLRAVNATMHDMGALQPGLPSPVAVPKGWEIIIIDLQDCFFNIKLHPEDCKRFAFSVPSPNFKRPYQRFQWKVLPQGMKNSPTLCQKFVDKAILTVRDKYQDSYIVHYMDDILLAHPSRSIVDEILTSMIQALNKHGLVVSTEKIQKYDNLKYLGTHIQGDSVSYQKLQIRTDKLRTLNDFQKLLGNINWIRPFLKLTTGELKPLFEILNGDSNPISTRKLTPEACKALQLMNERLSTARVKRLDLSQPWSLCILKTEYTPTACLWQDGVVEWIHLPHISPKVITPYDIFCTQLIIKGRHRSKELFSKDPDYIVVPYTKVQFDLLLQEKEDWPISLLGFLGEVHFHLPKDPLLTFTLQTAIIFPHMTSTTPLEKGIVIFTDGSANGRSVTYIQGREPIIKENTQNTAQQAEIVAVITAFEEVSQPFNLYTDSKYVTGLFPEIETATLSPRTKIYTELKHLQRLIHKRQEKFYIGHIRGHTGLPGPLAQGNAYADSLTRILTAGKRTADGSEFEKRTADGSEFESPKKKAKVE

SEQ ID NO: 3302 - protein, 2028 aa, synthetic construct
MPAAKRVKLDGGDKKYSIGLDIGTNSVGWAVITDEYKVPSKKFKVLGNTDRHSIKKNLIGALLFDSGETAEATRLKRTARRRYTRRKNRICYLQEIFSNEMAKVDDSFFHRLEESFLVEEDKKHERHPIFGNIVDEVAYHEKYPTIYHLRKKLVDSTDKADLRLIYLALAHMIKFRGHFLIEGDLNPDNSDVDKLFIQLVQTYNQLFEENPINASGVDAKAILSARLSKSRRLENLIAQLPGEKKNGLFGNLIALSLGLTPNFKSNFDLAEDAKLQLSKDTYDDDLDNLLAQIGDQYADLFLAAKNLSDAILLSDILRVNTEITKAPLSASMIKRYDEHHQDLTLLKALVRQQLPEKYKEIFFDQSKNGYAGYIDGGASQEEFYKFIKPILEKMDGTEELLVKLNREDLLRKQRTFDNGSIPHQIHLGELHAILRRQEDFYPFLKDNREKIEKILTFRIPYYVGPLARGNSRFAWMTRKSEETITPWNFEEVVDKGASAQSFIERMTNFDKNLPNEKVLPKHSLLYEYFTVYNELTKVKYVTEGMRKPAFLSGEQKKAIVDLLFKTNRKVTVKQLKEDYFKKIECFDSVEISGVEDRFNASLGTYHDLLKIIKDKDFLDNEENEDILEDIVLTLTLFEDREMIEERLKTYAHLFDDKVMKQLKRRRYTGWGRLSRKLINGIRDKQSGKTILDFLKSDGFANRNFMQLIHDDSLTFKEDIQKAQVSGQGDSLHEHIANLAGSPAIKKGILQTVKVVDELVKVMGRHKPENIVIEMARENQTTQKGQKNSRERMKRIEEGIKELGSQILKEHPVENTQLQNEKLYLYYLQNGRDMYVDQELDINRLSDYDVDHIVPQSFLKDDSIDNKVLTRSDKARGKSDNVPSEEVVKKMKNYWRQLLNAKLITQRKFDNLTKAERGGLSELDKAGFIKRQLVETRQITKHVAQILDSRMNTKYDENDKLIREVKVITLKSKLVSDFRKDFQFYKVREINNYHHAHDAYLNAVVGTALIKKYPKLESEFVYGDYKVYDVRKMIAKSEQEIGKATAKYFFYSNIMNFFKTEITLANGEIRKRPLIETNGETGEIVWDKGRDFATVRKVLSMPQVNIVKKTEVQTGGFSKESILPKRNSDKLIARKKDWDPKKYGGFDSPTVAYSVLVVAKVEKGKSKKLKSVKELLGITIMERSSFEKNPIDFLEAKGYKEVKKDLIIKLPKYSLFELENGRKRMLASAGELQKGNELALPSKYVNFLYLASHYEKLKGSPEDNEQKQLFVEQHKHYLDEIIEQISEFSKRVILADANLDKVLSAYNKHRDKPIREQAENIIHLFTLTNLGAPAAFKYFDTTIDRKRYTSTKEVLDATLIHQSITGLYETRIDLSQLGGDGGGGSGGSGGSGGSGGSGGGRDIMKDIKVRLMTDSPDDSQDLMIGAIESNLFADQISWKSDQPVWLNQWPLKQEKLQALQQLVTEQLQLGHLEESNSPWNTPVFVIKKKSGKWRLLQDLRAVNATMHDMGALQPGLPSPVAVPKGWEIIIIDLQDCFFNIKLHPEDCKRFAFSVPSPNFKRPYQRFQWKVLPQGMKNSPTLCQKFVDKAILTVRDKYQDSYIVHYMDDILLAHPSRSIVDEILTSMIQALNKHGLVVSTEKIQKYDNLKYLGTHIQGDSVSYQKLQIRTDKLRTLNDFQKLLGNINWIRPFLKLTTGELKPLFEILNGDSNPISTRKLTPEACKALQLMNERLSTARVKRLDLSQPWSLCILKTEYTPTACLWQDGVVEWIHLPHISPKVITPYDIFCTQLIIKGRHRSKELFSKDPDYIVVPYTKVQFDLLLQEKEDWPISLLGFLGEVHFHLPKDPLLTFTLQTAIIFPHMTSTTPLEKGIVIFTDGSANGRSVTYIQGREPIIKENTQNTAQQAEIVAVITAFEEVSQPFNLYTDSKYVTGLFPEIETATLSPRTKIYTELKHLQRLIHKRQEKFYIGHIRGHTGLPGPLAQGNAYADSLTRILTAGKRTADGSEFEKRTADGSEFESPKKKAKVE

SEQ ID NO: 3303 - protein, 2028 aa, synthetic construct
MPAAKRVKLDGGDKKYSIGLDIGTNSVGWAVITDEYKVPSKKFKVLGNTDRHSIKKNLIGALLFDSGETAEATRLKRTARRRYTRRKNRICYLQEIFSNEMAKVDDSFFHRLEESFLVEEDKKHERHPIFGNIVDEVAYHEKYPTIYHLRKKLVDSTDKADLRLIYLALAHMIKFRGHFLIEGDLNPDNSDVDKLFIQLVQTYNQLFEENPINASGVDAKAILSARLSKSRRLENLIAQLPGEKKNGLFGNLIALSLGLTPNFKSNFDLAEDAKLQLSKDTYDDDLDNLLAQIGDQYADLFLAAKNLSDAILLSDILRVNTEITKAPLSASMIKRYDEHHQDLTLLKALVRQQLPEKYKEIFFDQSKNGYAGYIDGGASQEEFYKFIKPILEKMDGTEELLVKLNREDLLRKQRTFDNGSIPHQIHLGELHAILRRQEDFYPFLKDNREKIEKILTFRIPYYVGPLARGNSRFAWMTRKSEETITPWNFEEVVDKGASAQSFIERMTNFDKNLPNEKVLPKHSLLYEYFTVYNELTKVKYVTEGMRKPAFLSGEQKKAIVDLLFKTNRKVTVKQLKEDYFKKIECFDSVEISGVEDRFNASLGTYHDLLKIIKDKDFLDNEENEDILEDIVLTLTLFEDREMIEERLKTYAHLFDDKVMKQLKRRRYTGWGRLSRKLINGIRDKQSGKTILDFLKSDGFANRNFMQLIHDDSLTFKEDIQKAQVSGQGDSLHEHIANLAGSPAIKKGILQTVKVVDELVKVMGRHKPENIVIEMARENQTTQKGQKNSRERMKRIEEGIKELGSQILKEHPVENTQLQNEKLYLYYLQNGRDMYVDQELDINRLSDYDVDHIVPQSFLKDDSIDNKVLTRSDKARGKSDNVPSEEVVKKMKNYWRQLLNAKLITQRKFDNLTKAERGGLSELDKAGFIKRQLVETRQITKHVAQILDSRMNTKYDENDKLIREVKVITLKSKLVSDFRKDFQFYKVREINNYHHAHDAYLNAVVGTALIKKYPKLESEFVYGDYKVYDVRKMIAKSEQEIGKATAKYFFYSNIMNFFKTEITLANGEIRKRPLIETNGETGEIVWDKGRDFATVRKVLSMPQVNIVKKTEVQTGGFSKESILPKRNSDKLIARKKDWDPKKYGGFDSPTVAYSVLVVAKVEKGKSKKLKSVKELLGITIMERSSFEKNPIDFLEAKGYKEVKKDLIIKLPKYSLFELENGRKRMLASAGELQKGNELALPSKYVNFLYLASHYEKLKGSPEDNEQKQLFVEQHKHYLDEIIEQISEFSKRVILADANLDKVLSAYNKHRDKPIREQAENIIHLFTLTNLGAPAAFKYFDTTIDRKRYTSTKEVLDATLIHQSITGLYETRIDLSQLGGDGGGSSGSSGSSGSSGSSGGGRDIMKDIKVRLMTDSPDDSQDLMIGAIESNLFADQISWKSDQPVWLNQWPLKQEKLQALQQLVTEQLQLGHLEESNSPWNTPVFVIKKKSGKWRLLQDLRAVNATMHDMGALQPGLPSPVAVPKGWEIIIIDLQDCFFNIKLHPEDCKRFAFSVPSPNFKRPYQRFQWKVLPQGMKNSPTLCQKFVDKAILTVRDKYQDSYIVHYMDDILLAHPSRSIVDEILTSMIQALNKHGLVVSTEKIQKYDNLKYLGTHIQGDSVSYQKLQIRTDKLRTLNDFQKLLGNINWIRPFLKLTTGELKPLFEILNGDSNPISTRKLTPEACKALQLMNERLSTARVKRLDLSQPWSLCILKTEYTPTACLWQDGVVEWIHLPHISPKVITPYDIFCTQLIIKGRHRSKELFSKDPDYIVVPYTKVQFDLLLQEKEDWPISLLGFLGEVHFHLPKDPLLTFTLQTAIIFPHMTSTTPLEKGIVIFTDGSANGRSVTYIQGREPIIKENTQNTAQQAEIVAVITAFEEVSQPFNLYTDSKYVTGLFPEIETATLSPRTKIYTELKHLQRLIHKRQEKFYIGHIRGHTGLPGPLAQGNAYADSLTRILTAGKRTADGSEFEKRTADGSEFESPKKKAKVE

SEQ ID NO: 3304 - protein, 2022 aa, synthetic construct; identical to SEQ ID NO: 3221

SEQ ID NO: 3305 - protein, 2022 aa, synthetic construct
MPAAKRVKLDGGDKKYSIGLDIGTNSVGWAVITDEYKVPSKKFKVLGNTDRHSIKKNLIGALLFDSGETAEATRLKRTARRRYTRRKNRICYLQEIFSNEMAKVDDSFFHRLEESFLVEEDKKHERHPIFGNIVDEVAYHEKYPTIYHLRKKLVDSTDKADLRLIYLALAHMIKFRGHFLIEGDLNPDNSDVDKLFIQLVQTYNQLFEENPINASGVDAKAILSARLSKSRRLENLIAQLPGEKKNGLFGNLIALSLGLTPNFKSNFDLAEDAKLQLSKDTYDDDLDNLLAQIGDQYADLFLAAKNLSDAILLSDILRVNTEITKAPLSASMIKRYDEHHQDLTLLKALVRQQLPEKYKEIFFDQSKNGYAGYIDGGASQEEFYKFIKPILEKMDGTEELLVKLNREDLLRKQRTFDNGSIPHQIHLGELHAILRRQEDFYPFLKDNREKIEKILTFRIPYYVGPLARGNSRFAWMTRKSEETITPWNFEEVVDKGASAQSFIERMTNFDKNLPNEKVLPKHSLLYEYFTVYNELTKVKYVTEGMRKPAFLSGEQKKAIVDLLFKTNRKVTVKQLKEDYFKKIECFDSVEISGVEDRFNASLGTYHDLLKIIKDKDFLDNEENEDILEDIVLTLTLFEDREMIEERLKTYAHLFDDKVMKQLKRRRYTGWGRLSRKLINGIRDKQSGKTILDFLKSDGFANRNFMQLIHDDSLTFKEDIQKAQVSGQGDSLHEHIANLAGSPAIKKGILQTVKVVDELVKVMGRHKPENIVIEMARENQTTQKGQKNSRERMKRIEEGIKELGSQILKEHPVENTQLQNEKLYLYYLQNGRDMYVDQELDINRLSDYDVDHIVPQSFLKDDSIDNKVLTRSDKARGKSDNVPSEEVVKKMKNYWRQLLNAKLITQRKFDNLTKAERGGLSELDKAGFIKRQLVETRQITKHVAQILDSRMNTKYDENDKLIREVKVITLKSKLVSDFRKDFQFYKVREINNYHHAHDAYLNAVVGTALIKKYPKLESEFVYGDYKVYDVRKMIAKSEQEIGKATAKYFFYSNIMNFFKTEITLANGEIRKRPLIETNGETGEIVWDKGRDFATVRKVLSMPQVNIVKKTEVQTGGFSKESILPKRNSDKLIARKKDWDPKKYGGFDSPTVAYSVLVVAKVEKGKSKKLKSVKELLGITIMERSSFEKNPIDFLEAKGYKEVKKDLIIKLPKYSLFELENGRKRMLASAGELQKGNELALPSKYVNFLYLASHYEKLKGSPEDNEQKQLFVEQHKHYLDEIIEQISEFSKRVILADANLDKVLSAYNKHRDKPIREQAENIIHLFTLTNLGAPAAFKYFDTTIDRKRYTSTKEVLDATLIHQSITGLYETRIDLSQLGGDGGGSSGGSPAPGGGRDIMKDIKVRLMTDSPDDSQDLMIGAIESNLFADQISWKSDQPVWLNQWPLKQEKLQALQQLVTEQLQLGHLEESNSPWNTPVFVIKKKSGKWRLLQDLRAVNATMHDMGALQPGLPSPVAVPKGWEIIIIDLQDCFFNIKLHPEDCKRFAFSVPSPNFKRPYQRFQWKVLPQGMKNSPTLCQKFVDKAILTVRDKYQDSYIVHYMDDILLAHPSRSIVDEILTSMIQALNKHGLVVSTEKIQKYDNLKYLGTHIQGDSVSYQKLQIRTDKLRTLNDFQKLLGNINWIRPFLKLTTGELKPLFEILNGDSNPISTRKLTPEACKALQLMNERLSTARVKRLDLSQPWSLCILKTEYTPTACLWQDGVVEWIHLPHISPKVITPYDIFCTQLIIKGRHRSKELFSKDPDYIVVPYTKVQFDLLLQEKEDWPISLLGFLGEVHFHLPKDPLLTFTLQTAIIFPHMTSTTPLEKGIVIFTDGSANGRSVTYIQGREPIIKENTQNTAQQAEIVAVITAFEEVSQPFNLYTDSKYVTGLFPEIETATLSPRTKIYTELKHLQRLIHKRQEKFYIGHIRGHTGLPGPLAQGNAYADSLTRILTAGKRTADGSEFEKRTADGSEFESPKKKAKVE

SEQ ID NO: 3306 - protein, 2024 aa, synthetic construct
MPAAKRVKLDGGDKKYSIGLDIGTNSVGWAVITDEYKVPSKKFKVLGNTDRHSIKKNLIGALLFDSGETAEATRLKRTARRRYTRRKNRICYLQEIFSNEMAKVDDSFFHRLEESFLVEEDKKHERHPIFGNIVDEVAYHEKYPTIYHLRKKLVDSTDKADLRLIYLALAHMIKFRGHFLIEGDLNPDNSDVDKLFIQLVQTYNQLFEENPINASGVDAKAILSARLSKSRRLENLIAQLPGEKKNGLFGNLIALSLGLTPNFKSNFDLAEDAKLQLSKDTYDDDLDNLLAQIGDQYADLFLAAKNLSDAILLSDILRVNTEITKAPLSASMIKRYDEHHQDLTLLKALVRQQLPEKYKEIFFDQSKNGYAGYIDGGASQEEFYKFIKPILEKMDGTEELLVKLNREDLLRKQRTFDNGSIPHQIHLGELHAILRRQEDFYPFLKDNREKIEKILTFRIPYYVGPLARGNSRFAWMTRKSEETITPWNFEEVVDKGASAQSFIERMTNFDKNLPNEKVLPKHSLLYEYFTVYNELTKVKYVTEGMRKPAFLSGEQKKAIVDLLFKTNRKVTVKQLKEDYFKKIECFDSVEISGVEDRFNASLGTYHDLLKIIKDKDFLDNEENEDILEDIVLTLTLFEDREMIEERLKTYAHLFDDKVMKQLKRRRYTGWGRLSRKLINGIRDKQSGKTILDFLKSDGFANRNFMQLIHDDSLTFKEDIQKAQVSGQGDSLHEHIANLAGSPAIKKGILQTVKVVDELVKVMGRHKPENIVIEMARENQTTQKGQKNSRERMKRIEEGIKELGSQILKEHPVENTQLQNEKLYLYYLQNGRDMYVDQELDINRLSDYDVDHIVPQSFLKDDSIDNKVLTRSDKARGKSDNVPSEEVVKKMKNYWRQLLNAKLITQRKFDNLTKAERGGLSELDKAGFIKRQLVETRQITKHVAQILDSRMNTKYDENDKLIREVKVITLKSKLVSDFRKDFQFYKVREINNYHHAHDAYLNAVVGTALIKKYPKLESEFVYGDYKVYDVRKMIAKSEQEIGKATAKYFFYSNIMNFFKTEITLANGEIRKRPLIETNGETGEIVWDKGRDFATVRKVLSMPQVNIVKKTEVQTGGFSKESILPKRNSDKLIARKKDWDPKKYGGFDSPTVAYSVLVVAKVEKGKSKKLKSVKELLGITIMERSSFEKNPIDFLEAKGYKEVKKDLIIKLPKYSLFELENGRKRMLASAGELQKGNELALPSKYVNFLYLASHYEKLKGSPEDNEQKQLFVEQHKHYLDEIIEQISEFSKRVILADANLDKVLSAYNKHRDKPIREQAENIIHLFTLTNLGAPAAFKYFDTTIDRKRYTSTKEVLDATLIHQSITGLYETRIDLSQLGGDGGEAAAKGGGGSSGGGRDIMKDIKVRLMTDSPDDSQDLMIGAIESNLFADQISWKSDQPVWLNQWPLKQEKLQALQQLVTEQLQLGHLEESNSPWNTPVFVIKKKSGKWRLLQDLRAVNATMHDMGALQPGLPSPVAVPKGWEIIIIDLQDCFFNIKLHPEDCKRFAFSVPSPNFKRPYQRFQWKVLPQGMKNSPTLCQKFVDKAILTVRDKYQDSYIVHYMDDILLAHPSRSIVDEILTSMIQALNKHGLVVSTEKIQKYDNLKYLGTHIQGDSVSYQKLQIRTDKLRTLNDFQKLLGNINWIRPFLKLTTGELKPLFEILNGDSNPISTRKLTPEACKALQLMNERLSTARVKRLDLSQPWSLCILKTEYTPTACLWQDGVVEWIHLPHISPKVITPYDIFCTQLIIKGRHRSKELFSKDPDYIVVPYTKVQFDLLLQEKEDWPISLLGFLGEVHFHLPKDPLLTFTLQTAIIFPHMTSTTPLEKGIVIFTDGSANGRSVTYIQGREPIIKENTQNTAQQAEIVAVITAFEEVSQPFNLYTDSKYVTGLFPEIETATLSPRTKIYTELKHLQRLIHKRQEKFYIGHIRGHTGLPGPLAQGNAYADSLTRILTAGKRTADGSEFEKRTADGSEFESPKKKAKVE

SEQ ID NO: 3307 - protein, 2021 aa, synthetic construct
MPAAKRVKLDGGDKKYSIGLDIGTNSVGWAVITDEYKVPSKKFKVLGNTDRHSIKKNLIGALLFDSGETAEATRLKRTARRRYTRRKNRICYLQEIFSNEMAKVDDSFFHRLEESFLVEEDKKHERHPIFGNIVDEVAYHEKYPTIYHLRKKLVDSTDKADLRLIYLALAHMIKFRGHFLIEGDLNPDNSDVDKLFIQLVQTYNQLFEENPINASGVDAKAILSARLSKSRRLENLIAQLPGEKKNGLFGNLIALSLGLTPNFKSNFDLAEDAKLQLSKDTYDDDLDNLLAQIGDQYADLFLAAKNLSDAILLSDILRVNTEITKAPLSASMIKRYDEHHQDLTLLKALVRQQLPEKYKEIFFDQSKNGYAGYIDGGASQEEFYKFIKPILEKMDGTEELLVKLNREDLLRKQRTFDNGSIPHQIHLGELHAILRRQEDFYPFLKDNREKIEKILTFRIPYYVGPLARGNSRFAWMTRKSEETITPWNFEEVVDKGASAQSFIERMTNFDKNLPNEKVLPKHSLLYEYFTVYNELTKVKYVTEGMRKPAFLSGEQKKAIVDLLFKTNRKVTVKQLKEDYFKKIECFDSVEISGVEDRFNASLGTYHDLLKIIKDKDFLDNEENEDILEDIVLTLTLFEDREMIEERLKTYAHLFDDKVMKQLKRRRYTGWGRLSRKLINGIRDKQSGKTILDFLKSDGFANRNFMQLIHDDSLTFKEDIQKAQVSGQGDSLHEHIANLAGSPAIKKGILQTVKVVDELVKVMGRHKPENIVIEMARENQTTQKGQKNSRERMKRIEEGIKELGSQILKEHPVENTQLQNEKLYLYYLQNGRDMYVDQELDINRLSDYDVDHIVPQSFLKDDSIDNKVLTRSDKARGKSDNVPSEEVVKKMKNYWRQLLNAKLITQRKFDNLTKAERGGLSELDKAGFIKRQLVETRQITKHVAQILDSRMNTKYDENDKLIREVKVITLKSKLVSDFRKDFQFYKVREINNYHHAHDAYLNAVVGTALIKKYPKLESEFVYGDYKVYDVRKMIAKSEQEIGKATAKYFFYSNIMNFFKTEITLANGEIRKRPLIETNGETGEIVWDKGRDFATVRKVLSMPQVNIVKKTEVQTGGFSKESILPKRNSDKLIARKKDWDPKKYGGFDSPTVAYSVLVVAKVEKGKSKKLKSVKELLGITIMERSSFEKNPIDFLEAKGYKEVKKDLIIKLPKYSLFELENGRKRMLASAGELQKGNELALPSKYVNFLYLASHYEKLKGSPEDNEQKQLFVEQHKHYLDEIIEQISEFSKRVILADANLDKVLSAYNKHRDKPIREQAENIIHLFTLTNLGAPAAFKYFDTTIDRKRYTSTKEVLDATLIHQSITGLYETRIDLSQLGGDGGGSSEAAAKGGGRDIMKDIKVRLMTDSPDDSQDLMIGAIESNLFADQISWKSDQPVWLNQWPLKQEKLQALQQLVTEQLQLGHLEESNSPWNTPVFVIKKKSGKWRLLQDLRAVNATMHDMGALQPGLPSPVAVPKGWEIIIIDLQDCFFNIKLHPEDCKRFAFSVPSPNFKRPYQRFQWKVLPQGMKNSPTLCQKFVDKAILTVRDKYQDSYIVHYMDDILLAHPSRSIVDEILTSMIQALNKHGLVVSTEKIQKYDNLKYLGTHIQGDSVSYQKLQIRTDKLRTLNDFQKLLGNINWIRPFLKLTTGELKPLFEILNGDSNPISTRKLTPEACKALQLMNERLSTARVKRLDLSQPWSLCILKTEYTPTACLWQDGVVEWIHLPHISPKVITPYDIFCTQLIIKGRHRSKELFSKDPDYIVVPYTKVQFDLLLQEKEDWPISLLGFLGEVHFHLPKDPLLTFTLQTAIIFPHMTSTTPLEKGIVIFTDGSANGRSVTYIQGREPIIKENTQNTAQQAEIVAVITAFEEVSQPFNLYTDSKYVTGLFPEIETATLSPRTKIYTELKHLQRLIHKRQEKFYIGHIRGHTGLPGPLAQGNAYADSLTRILTAGKRTADGSEFEKRTADGSEFESPKKKAKVE

SEQ ID NO: 3308 - protein, 2022 aa, synthetic construct; identical to SEQ ID NO: 3224

SEQ ID NO: 3309 - protein, 2024 aa, synthetic construct
MPAAKRVKLDGGDKKYSIGLDIGTNSVGWAVITDEYKVPSKKFKVLGNTDRHSIKKNLIGALLFDSGETAEATRLKRTARRRYTRRKNRICYLQEIFSNEMAKVDDSFFHRLEESFLVEEDKKHERHPIFGNIVDEVAYHEKYPTIYHLRKKLVDSTDKADLRLIYLALAHMIKFRGHFLIEGDLNPDNSDVDKLFIQLVQTYNQLFEENPINASGVDAKAILSARLSKSRRLENLIAQLPGEKKNGLFGNLIALSLGLTPNFKSNFDLAEDAKLQLSKDTYDDDLDNLLAQIGDQYADLFLAAKNLSDAILLSDILRVNTEITKAPLSASMIKRYDEHHQDLTLLKALVRQQLPEKYKEIFFDQSKNGYAGYIDGGASQEEFYKFIKPILEKMDGTEELLVKLNREDLLRKQRTFDNGSIPHQIHLGELHAILRRQEDFYPFLKDNREKIEKILTFRIPYYVGPLARGNSRFAWMTRKSEETITPWNFEEVVDKGASAQSFIERMTNFDKNLPNEKVLPKHSLLYEYFTVYNELTKVKYVTEGMRKPAFLSGEQKKAIVDLLFKTNRKVTVKQLKEDYFKKIECFDSVEISGVEDRFNASLGTYHDLLKIIKDKDFLDNEENEDILEDIVLTLTLFEDREMIEERLKTYAHLFDDKVMKQLKRRRYTGWGRLSRKLINGIRDKQSGKTILDFLKSDGFANRNFMQLIHDDSLTFKEDIQKAQVSGQGDSLHEHIANLAGSPAIKKGILQTVKVVDELVKVMGRHKPENIVIEMARENQTTQKGQKNSRERMKRIEEGIKELGSQILKEHPVENTQLQNEKLYLYYLQNGRDMYVDQELDINRLSDYDVDHIVPQSFLKDDSIDNKVLTRSDKARGKSDNVPSEEVVKKMKNYWRQLLNAKLITQRKFDNLTKAERGGLSELDKAGFIKRQLVETRQITKHVAQILDSRMNTKYDENDKLIREVKVITLKSKLVSDFRKDFQFYKVREINNYHHAHDAYLNAVVGTALIKKYPKLESEFVYGDYKVYDVRKMIAKSEQEIGKATAKYFFYSNIMNFFKTEITLANGEIRKRPLIETNGETGEIVWDKGRDFATVRKVLSMPQVNIVKKTEVQTGGFSKESILPKRNSDKLIARKKDWDPKKYGGFDSPTVAYSVLVVAKVEKGKSKKLKSVKELLGITIMERSSFEKNPIDFLEAKGYKEVKKDLIIKLPKYSLFELENGRKRMLASAGELQKGNELALPSKYVNFLYLASHYEKLKGSPEDNEQKQLFVEQHKHYLDEIIEQISEFSKRVILADANLDKVLSAYNKHRDKPIREQAENIIHLFTLTNLGAPAAFKYFDTTIDRKRYTSTKEVLDATLIHQSITGLYETRIDLSQLGGDGGPAPAPAPAPAPGGGRDIMKDIKVRLMTDSPDDSQDLMIGAIESNLFADQISWKSDQPVWLNQWPLKQEKLQALQQLVTEQLQLGHLEESNSPWNTPVFVIKKKSGKWRLLQDLRAVNATMHDMGALQPGLPSPVAVPKGWEIIIIDLQDCFFNIKLHPEDCKRFAFSVPSPNFKRPYQRFQWKVLPQGMKNSPTLCQKFVDKAILTVRDKYQDSYIVHYMDDILLAHPSRSIVDEILTSMIQALNKHGLVVSTEKIQKYDNLKYLGTHIQGDSVSYQKLQIRTDKLRTLNDFQKLLGNINWIRPFLKLTTGELKPLFEILNGDSNPISTRKLTPEACKALQLMNERLSTARVKRLDLSQPWSLCILKTEYTPTACLWQDGVVEWIHLPHISPKVITPYDIFCTQLIIKGRHRSKELFSKDPDYIVVPYTKVQFDLLLQEKEDWPISLLGFLGEVHFHLPKDPLLTFTLQTAIIFPHMTSTTPLEKGIVIFTDGSANGRSVTYIQGREPIIKENTQNTAQQAEIVAVITAFEEVSQPFNLYTDSKYVTGLFPEIETATLSPRTKIYTELKHLQRLIHKRQEKFYIGHIRGHTGLPGPLAQGNAYADSLTRILTAGKRTADGSEFEKRTADGSEFESPKKKAKVE

SEQ ID NO: 3310 - protein, 2024 aa, synthetic construct
MPAAKRVKLDGGDKKYSIGLDIGTNSVGWAVITDEYKVPSKKFKVLGNTDRHSIKKNLIGALLFDSGETAEATRLKRTARRRYTRRKNRICYLQEIFSNEMAKVDDSFFHRLEESFLVEEDKKHERHPIFGNIVDEVAYHEKYPTIYHLRKKLVDSTDKADLRLIYLALAHMIKFRGHFLIEGDLNPDNSDVDKLFIQLVQTYNQLFEENPINASGVDAKAILSARLSKSRRLENLIAQLPGEKKNGLFGNLIALSLGLTPNFKSNFDLAEDAKLQLSKDTYDDDLDNLLAQIGDQYADLFLAAKNLSDAILLSDILRVNTEITKAPLSASMIKRYDEHHQDLTLLKALVRQQLPEKYKEIFFDQSKNGYAGYIDGGASQEEFYKFIKPILEKMDGTEELLVKLNREDLLRKQRTFDNGSIPHQIHLGELHAILRRQEDFYPFLKDNREKIEKILTFRIPYYVGPLARGNSRFAWMTRKSEETITPWNFEEVVDKGASAQSFIERMTNFDKNLPNEKVLPKHSLLYEYFTVYNELTKVKYVTEGMRKPAFLSGEQKKAIVDLLFKTNRKVTVKQLKEDYFKKIECFDSVEISGVEDRFNASLGTYHDLLKIIKDKDFLDNEENEDILEDIVLTLTLFEDREMIEERLKTYAHLFDDKVMKQLKRRRYTGWGRLSRKLINGIRDKQSGKTILDFLKSDGFANRNFMQLIHDDSLTFKEDIQKAQVSGQGDSLHEHIANLAGSPAIKKGILQTVKVVDELVKVMGRHKPENIVIEMARENQTTQKGQKNSRERMKRIEEGIKELGSQILKEHPVENTQLQNEKLYLYYLQNGRDMYVDQELDINRLSDYDVDHIVPQSFLKDDSIDNKVLTRSDKARGKSDNVPSEEVVKKMKNYWRQLLNAKLITQRKFDNLTKAERGGLSELDKAGFIKRQLVETRQITKHVAQILDSRMNTKYDENDKLIREVKVITLKSKLVSDFRKDFQFYKVREINNYHHAHDAYLNAVVGTALIKKYPKLESEFVYGDYKVYDVRKMIAKSEQEIGKATAKYFFYSNIMNFFKTEITLANGEIRKRPLIETNGETGEIVWDKGRDFATVRKVLSMPQVNIVKKTEVQTGGFSKESILPKRNSDKLIARKKDWDPKKYGGFDSPTVAYSVLVVAKVEKGKSKKLKSVKELLGITIMERSSFEKNPIDFLEAKGYKEVKKDLIIKLPKYSLFELENGRKRMLASAGELQKGNELALPSKYVNFLYLASHYEKLKGSPEDNEQKQLFVEQHKHYLDEIIEQISEFSKRVILADANLDKVLSAYNKHRDKPIREQAENIIHLFTLTNLGAPAAFKYFDTTIDRKRYTSTKEVLDATLIHQSITGLYETRIDLSQLGGDGGGSSEAAAKGGSGGGRDIMKDIKVRLMTDSPDDSQDLMIGAIESNLFADQISWKSDQPVWLNQWPLKQEKLQALQQLVTEQLQLGHLEESNSPWNTPVFVIKKKSGKWRLLQDLRAVNATMHDMGALQPGLPSPVAVPKGWEIIIIDLQDCFFNIKLHPEDCKRFAFSVPSPNFKRPYQRFQWKVLPQGMKNSPTLCQKFVDKAILTVRDKYQDSYIVHYMDDILLAHPSRSIVDEILTSMIQALNKHGLVVSTEKIQKYDNLKYLGTHIQGDSVSYQKLQIRTDKLRTLNDFQKLLGNINWIRPFLKLTTGELKPLFEILNGDSNPISTRKLTPEACKALQLMNERLSTARVKRLDLSQPWSLCILKTEYTPTACLWQDGVVEWIHLPHISPKVITPYDIFCTQLIIKGRHRSKELFSKDPDYIVVPYTKVQFDLLLQEKEDWPISLLGFLGEVHFHLPKDPLLTFTLQTAIIFPHMTSTTPLEKGIVIFTDGSANGRSVTYIQGREPIIKENTQNTAQQAEIVAVITAFEEVSQPFNLYTDSKYVTGLFPEIETATLSPRTKIYTELKHLQRLIHKRQEKFYIGHIRGHTGLPGPLAQGNAYADSLTRILTAGKRTADGSEFEKRTADGSEFESPKKKAKVE

SEQ ID NO: 3311 - protein, 2024 aa, synthetic construct
MPAAKRVKLDGGDKKYSIGLDIGTNSVGWAVITDEYKVPSKKFKVLGNTDRHSIKKNLIGALLFDSGETAEATRLKRTARRRYTRRKNRICYLQEIFSNEMAKVDDSFFHRLEESFLVEEDKKHERHPIFGNIVDEVAYHEKYPTIYHLRKKLVDSTDKADLRLIYLALAHMIKFRGHFLIEGDLNPDNSDVDKLFIQLVQTYNQLFEENPINASGVDAKAILSARLSKSRRLENLIAQLPGEKKNGLFGNLIALSLGLTPNFKSNFDLAEDAKLQLSKDTYDDDLDNLLAQIGDQYADLFLAAKNLSDAILLSDILRVNTEITKAPLSASMIKRYDEHHQDLTLLKALVRQQLPEKYKEIFFDQSKNGYAGYIDGGASQEEFYKFIKPILEKMDGTEELLVKLNREDLLRKQRTFDNGSIPHQIHLGELHAILRRQEDFYPFLKDNREKIEKILTFRIPYYVGPLARGNSRFAWMTRKSEETITPWNFEEVVDKGASAQSFIERMTNFDKNLPNEKVLPKHSLLYEYFTVYNELTKVKYVTEGMRKPAFLSGEQKKAIVDLLFKTNRKVTVKQLKEDYFKKIECFDSVEISGVEDRFNASLGTYHDLLKIIKDKDFLDNEENEDILEDIVLTLTLFEDREMIEERLKTYAHLFDDKVMKQLKRRRYTGWGRLSRKLINGIRDKQSGKTILDFLKSDGFANRNFMQLIHDDSLTFKEDIQKAQVSGQGDSLHEHIANLAGSPAIKKGILQTVKVVDELVKVMGRHKPENIVIEMARENQTTQKGQKNSRERMKRIEEGIKELGSQILKEHPVENTQLQNEKLYLYYLQNGRDMYVDQELDINRLSDYDVDHIVPQSFLKDDSIDNKVLTRSDKARGKSDNVPSEEVVKKMKNYWRQLLNAKLITQRKFDNLTKAERGGLSELDKAGFIKRQLVETRQITKHVAQILDSRMNTKYDENDKLIREVKVITLKSKLVSDFRKDFQFYKVREINNYHHAHDAYLNAVVGTALIKKYPKLESEFVYGDYKVYDVRKMIAKSEQEIGKATAKYFFYSNIMNFFKTEITLANGEIRKRPLIETNGETGEIVWDKGRDFATVRKVLSMPQVNIVKKTEVQTGGFSKESILPKRNSDKLIARKKDWDPKKYGGFDSPTVAYSVLVVAKVEKGKSKKLKSVKELLGITIMERSSFEKNPIDFLEAKGYKEVKKDLIIKLPKYSLFELENGRKRMLASAGELQKGNELALPSKYVNFLYLASHYEKLKGSPEDNEQKQLFVEQHKHYLDEIIEQISEFSKRVILADANLDKVLSAYNKHRDKPIREQAENIIHLFTLTNLGAPAAFKYFDTTIDRKRYTSTKEVLDATLIHQSITGLYETRIDLSQLGGDGGGGGGSSEAAAKGGGRDIMKDIKVRLMTDSPDDSQDLMIGAIESNLFADQISWKSDQPVWLNQWPLKQEKLQALQQLVTEQLQLGHLEESNSPWNTPVFVIKKKSGKWRLLQDLRAVNATMHDMGALQPGLPSPVAVPKGWEIIIIDLQDCFFNIKLHPEDCKRFAFSVPSPNFKRPYQRFQWKVLPQGMKNSPTLCQKFVDKAILTVRDKYQDSYIVHYMDDILLAHPSRSIVDEILTSMIQALNKHGLVVSTEKIQKYDNLKYLGTHIQGDSVSYQKLQIRTDKLRTLNDFQKLLGNINWIRPFLKLTTGELKPLFEILNGDSNPISTRKLTPEACKALQLMNERLSTARVKRLDLSQPWSLCILKTEYTPTACLWQDGVVEWIHLPHISPKVITPYDIFCTQLIIKGRHRSKELFSKDPDYIVVPYTKVQFDLLLQEKEDWPISLLGFLGEVHFHLPKDPLLTFTLQTAIIFPHMTSTTPLEKGIVIFTDGSANGRSVTYIQGREPIIKENTQNTAQQAEIVAVITAFEEVSQPFNLYTDSKYVTGLFPEIETATLSPRTKIYTELKHLQRLIHKRQEKFYIGHIRGHTGLPGPLAQGNAYADSLTRILTAGKRTADGSEFEKRTADGSEFESPKKKAKVE

SEQ ID NO: 3312 - protein, 2022 aa, synthetic construct; identical to SEQ ID NO: 3229

SEQ ID NO: 3313 - protein, 2021 aa, synthetic construct; identical to SEQ ID NO: 3208

SEQ ID NO: 3314 - protein, 2024 aa, synthetic construct
MPAAKRVKLDGGDKKYSIGLDIGTNSVGWAVITDEYKVPSKKFKVLGNTDRHSIKKNLIGALLFDSGETAEATRLKRTARRRYTRRKNRICYLQEIFSNEMAKVDDSFFHRLEESFLVEEDKKHERHPIFGNIVDEVAYHEKYPTIYHLRKKLVDSTDKADLRLIYLALAHMIKFRGHFLIEGDLNPDNSDVDKLFIQLVQTYNQLFEENPINASGVDAKAILSARLSKSRRLENLIAQLPGEKKNGLFGNLIALSLGLTPNFKSNFDLAEDAKLQLSKDTYDDDLDNLLAQIGDQYADLFLAAKNLSDAILLSDILRVNTEITKAPLSASMIKRYDEHHQDLTLLKALVRQQLPEKYKEIFFDQSKNGYAGYIDGGASQEEFYKFIKPILEKMDGTEELLVKLNREDLLRKQRTFDNGSIPHQIHLGELHAILRRQEDFYPFLKDNREKIEKILTFRIPYYVGPLARGNSRFAWMTRKSEETITPWNFEEVVDKGASAQSFIERMTNFDKNLPNEKVLPKHSLLYEYFTVYNELTKVKYVTEGMRKPAFLSGEQKKAIVDLLFKTNRKVTVKQLKEDYFKKIECFDSVEISGVEDRFNASLGTYHDLLKIIKDKDFLDNEENEDILEDIVLTLTLFEDREMIEERLKTYAHLFDDKVMKQLKRRRYTGWGRLSRKLINGIRDKQSGKTILDFLKSDGFANRNFMQLIHDDSLTFKEDIQKAQVSGQGDSLHEHIANLAGSPAIKKGILQTVKVVDELVKVMGRHKPENIVIEMARENQTTQKGQKNSRERMKRIEEGIKELGSQILKEHPVENTQLQNEKLYLYYLQNGRDMYVDQELDINRLSDYDVDHIVPQSFLKDDSIDNKVLTRSDKARGKSDNVPSEEVVKKMKNYWRQLLNAKLITQRKFDNLTKAERGGLSELDKAGFIKRQLVETRQITKHVAQILDSRMNTKYDENDKLIREVKVITLKSKLVSDFRKDFQFYKVREINNYHHAHDAYLNAVVGTALIKKYPKLESEFVYGDYKVYDVRKMIAKSEQEIGKATAKYFFYSNIMNFFKTEITLANGEIRKRPLIETNGETGEIVWDKGRDFATVRKVLSMPQVNIVKKTEVQTGGFSKESILPKRNSDKLIARKKDWDPKKYGGFDSPTVAYSVLVVAKVEKGKSKKLKSVKELLGITIMERSSFEKNPIDFLEAKGYKEVKKDLIIKLPKYSLFELENGRKRMLASAGELQKGNELALPSKYVNFLYLASHYEKLKGSPEDNEQKQLFVEQHKHYLDEIIEQISEFSKRVILADANLDKVLSAYNKHRDKPIREQAENIIHLFTLTNLGAPAAFKYFDTTIDRKRYTSTKEVLDATLIHQSITGLYETRIDLSQLGGDGGGSSGGSEAAAKGGGRDIMKDIKVRLMTDSPDDSQDLMIGAIESNLFADQISWKSDQPVWLNQWPLKQEKLQALQQLVTEQLQLGHLEESNSPWNTPVFVIKKKSGKWRLLQDLRAVNATMHDMGALQPGLPSPVAVPKGWEIIIIDLQDCFFNIKLHPEDCKRFAFSVPSPNFKRPYQRFQWKVLPQGMKNSPTLCQKFVDKAILTVRDKYQDSYIVHYMDDILLAHPSRSIVDEILTSMIQALNKHGLVVSTEKIQKYDNLKYLGTHIQGDSVSYQKLQIRTDKLRTLNDFQKLLGNINWIRPFLKLTTGELKPLFEILNGDSNPISTRKLTPEACKALQLMNERLSTARVKRLDLSQPWSLCILKTEYTPTACLWQDGVVEWIHLPHISPKVITPYDIFCTQLIIKGRHRSKELFSKDPDYIVVPYTKVQFDLLLQEKEDWPISLLGFLGEVHFHLPKDPLLTFTLQTAIIFPHMTSTTPLEKGIVIFTDGSANGRSVTYIQGREPIIKENTQNTAQQAEIVAVITAFEEVSQPFNLYTDSKYVTGLFPEIETATLSPRTKIYTELKHLQRLIHKRQEKFYIGHIRGHTGLPGPLAQGNAYADSLTRILTAGKRTADGSEFEKRTADGSEFESPKKKAKVE

SEQ ID NO: 3315 - protein, 2022 aa, synthetic construct; identical to SEQ ID NO: 3199

SEQ ID NO: 3316 - protein, 2022 aa, synthetic construct
MPAAKRVKLDGGDKKYSIGLDIGTNSVGWAVITDEYKVPSKKFKVLGNTDRHSIKKNLIGALLFDSGETAEATRLKRTARRRYTRRKNRICYLQEIFSNEMAKVDDSFFHRLEESFLVEEDKKHERHPIFGNIVDEVAYHEKYPTIYHLRKKLVDSTDKADLRLIYLALAHMIKFRGHFLIEGDLNPDNSDVDKLFIQLVQTYNQLFEENPINASGVDAKAILSARLSKSRRLENLIAQLPGEKKNGLFGNLIALSLGLTPNFKSNFDLAEDAKLQLSKDTYDDDLDNLLAQIGDQYADLFLAAKNLSDAILLSDILRVNTEITKAPLSASMIKRYDEHHQDLTLLKALVRQQLPEKYKEIFFDQSKNGYAGYIDGGASQEEFYKFIKPILEKMDGTEELLVKLNREDLLRKQRTFDNGSIPHQIHLGELHAILRRQEDFYPFLKDNREKIEKILTFRIPYYVGPLARGNSRFAWMTRKSEETITPWNFEEVVDKGASAQSFIERMTNFDKNLPNEKVLPKHSLLYEYFTVYNELTKVKYVTEGMRKPAFLSGEQKKAIVDLLFKTNRKVTVKQLKEDYFKKIECFDSVEISGVEDRFNASLGTYHDLLKIIKDKDFLDNEENEDILEDIVLTLTLFEDREMIEERLKTYAHLFDDKVMKQLKRRRYTGWGRLSRKLINGIRDKQSGKTILDFLKSDGFANRNFMQLIHDDSLTFKEDIQKAQVSGQGDSLHEHIANLAGSPAIKKGILQTVKVVDELVKVMGRHKPENIVIEMARENQTTQKGQKNSRERMKRIEEGIKELGSQILKEHPVENTQLQNEKLYLYYLQNGRDMYVDQELDINRLSDYDVDHIVPQSFLKDDSIDNKVLTRSDKARGKSDNVPSEEVVKKMKNYWRQLLNAKLITQRKFDNLTKAERGGLSELDKAGFIKRQLVETRQITKHVAQILDSRMNTKYDENDKLIREVKVITLKSKLVSDFRKDFQFYKVREINNYHHAHDAYLNAVVGTALIKKYPKLESEFVYGDYKVYDVRKMIAKSEQEIGKATAKYFFYSNIMNFFKTEITLANGEIRKRPLIETNGETGEIVWDKGRDFATVRKVLSMPQVNIVKKTEVQTGGFSKESILPKRNSDKLIARKKDWDPKKYGGFDSPTVAYSVLVVAKVEKGKSKKLKSVKELLGITIMERSSFEKNPIDFLEAKGYKEVKKDLIIKLPKYSLFELENGRKRMLASAGELQKGNELALPSKYVNFLYLASHYEKLKGSPEDNEQKQLFVEQHKHYLDEIIEQISEFSKRVILADANLDKVLSAYNKHRDKPIREQAENIIHLFTLTNLGAPAAFKYFDTTIDRKRYTSTKEVLDATLIHQSITGLYETRIDLSQLGGDGGGGSGGSGGSGGGRDIMKDIKVRLMTDSPDDSQDLMIGAIESNLFADQISWKSDQPVWLNQWPLKQEKLQALQQLVTEQLQLGHLEESNSPWNTPVFVIKKKSGKWRLLQDLRAVNATMHDMGALQPGLPSPVAVPKGWEIIIIDLQDCFFNIKLHPEDCKRFAFSVPSPNFKRPYQRFQWKVLPQGMKNSPTLCQKFVDKAILTVRDKYQDSYIVHYMDDILLAHPSRSIVDEILTSMIQALNKHGLVVSTEKIQKYDNLKYLGTHIQGDSVSYQKLQIRTDKLRTLNDFQKLLGNINWIRPFLKLTTGELKPLFEILNGDSNPISTRKLTPEACKALQLMNERLSTARVKRLDLSQPWSLCILKTEYTPTACLWQDGVVEWIHLPHISPKVITPYDIFCTQLIIKGRHRSKELFSKDPDYIVVPYTKVQFDLLLQEKEDWPISLLGFLGEVHFHLPKDPLLTFTLQTAIIFPHMTSTTPLEKGIVIFTDGSANGRSVTYIQGREPIIKENTQNTAQQAEIVAVITAFEEVSQPFNLYTDSKYVTGLFPEIETATLSPRTKIYTELKHLQRLIHKRQEKFYIGHIRGHTGLPGPLAQGNAYADSLTRILTAGKRTADGSEFEKRTADGSEFESPKKKAKVE

SEQ ID NO: 3317 - protein, 2025 aa, synthetic construct
MPAAKRVKLDGGDKKYSIGLDIGTNSVGWAVITDEYKVPSKKFKVLGNTDRHSIKKNLIGALLFDSGETAEATRLKRTARRRYTRRKNRICYLQEIFSNEMAKVDDSFFHRLEESFLVEEDKKHERHPIFGNIVDEVAYHEKYPTIYHLRKKLVDSTDKADLRLIYLALAHMIKFRGHFLIEGDLNPDNSDVDKLFIQLVQTYNQLFEENPINASGVDAKAILSARLSKSRRLENLIAQLPGEKKNGLFGNLIALSLGLTPNFKSNFDLAEDAKLQLSKDTYDDDLDNLLAQIGDQYADLFLAAKNLSDAILLSDILRVNTEITKAPLSASMIKRYDEHHQDLTLLKALVRQQLPEKYKEIFFDQSKNGYAGYIDGGASQEEFYKFIKPILEKMDGTEELLVKLNREDLLRKQRTFDNGSIPHQIHLGELHAILRRQEDFYPFLKDNREKIEKILTFRIPYYVGPLARGNSRFAWMTRKSEETITPWNFEEVVDKGASAQSFIERMTNFDKNLPNEKVLPKHSLLYEYFTVYNELTKVKYVTEGMRKPAFLSGEQKKAIVDLLFKTNRKVTVKQLKEDYFKKIECFDSVEISGVEDRFNASLGTYHDLLKIIKDKDFLDNEENEDILEDIVLTLTLFEDREMIEERLKTYAHLFDDKVMKQLKRRRYTGWGRLSRKLINGIRDKQSGKTILDFLKSDGFANRNFMQLIHDDSLTFKEDIQKAQVSGQGDSLHEHIANLAGSPAIKKGILQTVKVVDELVKVMGRHKPENIVIEMARENQTTQKGQKNSRERMKRIEEGIKELGSQILKEHPVENTQLQNEKLYLYYLQNGRDMYVDQELDINRLSDYDVDHIVPQSFLKDDSIDNKVLTRSDKARGKSDNVPSEEVVKKMKNYWRQLLNAKLITQRKFDNLTKAERGGLSELDKAGFIKRQLVETRQITKHVAQILDSRMNTKYDENDKLIREVKVITLKSKLVSDFRKDFQFYKVREINNYHHAHDAYLNAVVGTALIKKYPKLESEFVYGDYKVYDVRKMIAKSEQEIGKATAKYFFYSNIMNFFKTEITLANGEIRKRPLIETNGETGEIVWDKGRDFATVRKVLSMPQVNIVKKTEVQTGGFSKESILPKRNSDKLIARKKDWDPKKYGGFDSPTVAYSVLVVAKVEKGKSKKLKSVKELLGITIMERSSFEKNPIDFLEAKGYKEVKKDLIIKLPKYSLFELENGRKRMLASAGELQKGNELALPSKYVNFLYLASHYEKLKGSPEDNEQKQLFVEQHKHYLDEIIEQISEFSKRVILADANLDKVLSAYNKHRDKPIREQAENIIHLFTLTNLGAPAAFKYFDTTIDRKRYTSTKEVLDATLIHQSITGLYETRIDLSQLGGDGGGGSGGSGGSGGSGGGRDIMKDIKVRLMTDSPDDSQDLMIGAIESNLFADQISWKSDQPVWLNQWPLKQEKLQALQQLVTEQLQLGHLEESNSPWNTPVFVIKKKSGKWRLLQDLRAVNATMHDMGALQPGLPSPVAVPKGWEIIIIDLQDCFFNIKLHPEDCKRFAFSVPSPNFKRPYQRFQWKVLPQGMKNSPTLCQKFVDKAILTVRDKYQDSYIVHYMDDILLAHPSRSIVDEILTSMIQALNKHGLVVSTEKIQKYDNLKYLGTHIQGDSVSYQKLQIRTDKLRTLNDFQKLLGNINWIRPFLKLTTGELKPLFEILNGDSNPISTRKLTPEACKALQLMNERLSTARVKRLDLSQPWSLCILKTEYTPTACLWQDGVVEWIHLPHISPKVITPYDIFCTQLIIKGRHRSKELFSKDPDYIVVPYTKVQFDLLLQEKEDWPISLLGFLGEVHFHLPKDPLLTFTLQTAIIFPHMTSTTPLEKGIVIFTDGSANGRSVTYIQGREPIIKENTQNTAQQAEIVAVITAFEEVSQPFNLYTDSKYVTGLFPEIETATLSPRTKIYTELKHLQRLIHKRQEKFYIGHIRGHTGLPGPLAQGNAYADSLTRILTAGKRTADGSEFEKRTADGSEFESPKKKAKVE

SEQ ID NO: 3318 - protein, 2024 aa, synthetic construct; identical to SEQ ID NO: 3207

SEQ ID NO: 3319 - protein, 2016 aa, synthetic construct; identical to SEQ ID NO: 3210

SEQ ID NO: 3320 - protein, 2024 aa, synthetic construct
MPAAKRVKLDGGDKKYSIGLDIGTNSVGWAVITDEYKVPSKKFKVLGNTDRHSIKKNLIGALLFDSGETAEATRLKRTARRRYTRRKNRICYLQEIFSNEMAKVDDSFFHRLEESFLVEEDKKHERHPIFGNIVDEVAYHEKYPTIYHLRKKLVDSTDKADLRLIYLALAHMIKFRGHFLIEGDLNPDNSDVDKLFIQLVQTYNQLFEENPINASGVDAKAILSARLSKSRRLENLIAQLPGEKKNGLFGNLIALSLGLTPNFKSNFDLAEDAKLQLSKDTYDDDLDNLLAQIGDQYADLFLAAKNLSDAILLSDILRVNTEITKAPLSASMIKRYDEHHQDLTLLKALVRQQLPEKYKEIFFDQSKNGYAGYIDGGASQEEFYKFIKPILEKMDGTEELLVKLNREDLLRKQRTFDNGSIPHQIHLGELHAILRRQEDFYPFLKDNREKIEKILTFRIPYYVGPLARGNSRFAWMTRKSEETITPWNFEEVVDKGASAQSFIERMTNFDKNLPNEKVLPKHSLLYEYFTVYNELTKVKYVTEGMRKPAFLSGEQKKAIVDLLFKTNRKVTVKQLKEDYFKKIECFDSVEISGVEDRFNASLGTYHDLLKIIKDKDFLDNEENEDILEDIVLTLTLFEDREMIEERLKTYAHLFDDKVMKQLKRRRYTGWGRLSRKLINGIRDKQSGKTILDFLKSDGFANRNFMQLIHDDSLTFKEDIQKAQVSGQGDSLHEHIANLAGSPAIKKGILQTVKVVDELVKVMGRHKPENIVIEMARENQTTQKGQKNSRERMKRIEEGIKELGSQILKEHPVENTQLQNEKLYLYYLQNGRDMYVDQELDINRLSDYDVDHIVPQSFLKDDSIDNKVLTRSDKARGKSDNVPSEEVVKKMKNYWRQLLNAKLITQRKFDNLTKAERGGLSELDKAGFIKRQLVETRQITKHVAQILDSRMNTKYDENDKLIREVKVITLKSKLVSDFRKDFQFYKVREINNYHHAHDAYLNAVVGTALIKKYPKLESEFVYGDYKVYDVRKMIAKSEQEIGKATAKYFFYSNIMNFFKTEITLANGEIRKRPLIETNGETGEIVWDKGRDFATVRKVLSMPQVNIVKKTEVQTGGFSKESILPKRNSDKLIARKKDWDPKKYGGFDSPTVAYSVLVVAKVEKGKSKKLKSVKELLGITIMERSSFEKNPIDFLEAKGYKEVKKDLIIKLPKYSLFELENGRKRMLASAGELQKGNELALPSKYVNFLYLASHYEKLKGSPEDNEQKQLFVEQHKHYLDEIIEQISEFSKRVILADANLDKVLSAYNKHRDKPIREQAENIIHLFTLTNLGAPAAFKYFDTTIDRKRYTSTKEVLDATLIHQSITGLYETRIDLSQLGGDGGGGSPAPEAAAKGGGRDIMKDIKVRLMTDSPDDSQDLMIGAIESNLFADQISWKSDQPVWLNQWPLKQEKLQALQQLVTEQLQLGHLEESNSPWNTPVFVIKKKSGKWRLLQDLRAVNATMHDMGALQPGLPSPVAVPKGWEIIIIDLQDCFFNIKLHPEDCKRFAFSVPSPNFKRPYQRFQWKVLPQGMKNSPTLCQKFVDKAILTVRDKYQDSYIVHYMDDILLAHPSRSIVDEILTSMIQALNKHGLVVSTEKIQKYDNLKYLGTHIQGDSVSYQKLQIRTDKLRTLNDFQKLLGNINWIRPFLKLTTGELKPLFEILNGDSNPISTRKLTPEACKALQLMNERLSTARVKRLDLSQPWSLCILKTEYTPTACLWQDGVVEWIHLPHISPKVITPYDIFCTQLIIKGRHRSKELFSKDPDYIVVPYTKVQFDLLLQEKEDWPISLLGFLGEVHFHLPKDPLLTFTLQTAIIFPHMTSTTPLEKGIVIFTDGSANGRSVTYIQGREPIIKENTQNTAQQAEIVAVITAFEEVSQPFNLYTDSKYVTGLFPEIETATLSPRTKIYTELKHLQRLIHKRQEKFYIGHIRGHTGLPGPLAQGNAYADSLTRILTAGKRTADGSEFEKRTADGSEFESPKKKAKVE

SEQ ID NO: 3321 - protein, 2022 aa, synthetic construct; identical to SEQ ID NO: 3215

SEQ ID NO: 3322 - protein, 2024 aa, synthetic construct; identical to SEQ ID NO: 3232

SEQ ID NO: 3323 - protein, 2024 aa, synthetic construct; identical to SEQ ID NO: 3235

SEQ ID NO: 3324 - protein, 2024 aa, synthetic construct; identical to SEQ ID NO: 3236

SEQ ID NO: 3325 - protein, 2024 aa, synthetic construct
MPAAKRVKLDGGDKKYSIGLDIGTNSVGWAVITDEYKVPSKKFKVLGNTDRHSIKKNLIGALLFDSGETAEATRLKRTARRRYTRRKNRICYLQEIFSNEMAKVDDSFFHRLEESFLVEEDKKHERHPIFGNIVDEVAYHEKYPTIYHLRKKLVDSTDKADLRLIYLALAHMIKFRGHFLIEGDLNPDNSDVDKLFIQLVQTYNQLFEENPINASGVDAKAILSARLSKSRRLENLIAQLPGEKKNGLFGNLIALSLGLTPNFKSNFDLAEDAKLQLSKDTYDDDLDNLLAQIGDQYADLFLAAKNLSDAILLSDILRVNTEITKAPLSASMIKRYDEHHQDLTLLKALVRQQLPEKYKEIFFDQSKNGYAGYIDGGASQEEFYKFIKPILEKMDGTEELLVKLNREDLLRKQRTFDNGSIPHQIHLGELHAILRRQEDFYPFLKDNREKIEKILTFRIPYYVGPLARGNSRFAWMTRKSEETITPWNFEEVVDKGASAQSFIERMTNFDKNLPNEKVLPKHSLLYEYFTVYNELTKVKYVTEGMRKPAFLSGEQKKAIVDLLFKTNRKVTVKQLKEDYFKKIECFDSVEISGVEDRFNASLGTYHDLLKIIKDKDFLDNEENEDILEDIVLTLTLFEDREMIEERLKTYAHLFDDKVMKQLKRRRYTGWGRLSRKLINGIRDKQSGKTILDFLKSDGFANRNFMQLIHDDSLTFKEDIQKAQVSGQGDSLHEHIANLAGSPAIKKGILQTVKVVDELVKVMGRHKPENIVIEMARENQTTQKGQKNSRERMKRIEEGIKELGSQILKEHPVENTQLQNEKLYLYYLQNGRDMYVDQELDINRLSDYDVDHIVPQSFLKDDSIDNKVLTRSDKARGKSDNVPSEEVVKKMKNYWRQLLNAKLITQRKFDNLTKAERGGLSELDKAGFIKRQLVETRQITKHVAQILDSRMNTKYDENDKLIREVKVITLKSKLVSDFRKDFQFYKVREINNYHHAHDAYLNAVVGTALIKKYPKLESEFVYGDYKVYDVRKMIAKSEQEIGKATAKYFFYSNIMNFFKTEITLANGEIRKRPLIETNGETGEIVWDKGRDFATVRKVLSMPQVNIVKKTEVQTGGFSKESILPKRNSDKLIARKKDWDPKKYGGFDSPTVAYSVLVVAKVEKGKSKKLKSVKELLGITIMERSSFEKNPIDFLEAKGYKEVKKDLIIKLPKYSLFELENGRKRMLASAGELQKGNELALPSKYVNFLYLASHYEKLKGSPEDNEQKQLFVEQHKHYLDEIIEQISEFSKRVILADANLDKVLSAYNKHRDKPIREQAENIIHLFTLTNLGAPAAFKYFDTTIDRKRYTSTKEVLDATLIHQSITGLYETRIDLSQLGGDGGGGGGGSEAAAKGGGRDIMKDIKVRLMTDSPDDSQDLMIGAIESNLFADQISWKSDQPVWLNQWPLKQEKLQALQQLVTEQLQLGHLEESNSPWNTPVFVIKKKSGKWRLLQDLRAVNATMHDMGALQPGLPSPVAVPKGWEIIIIDLQDCFFNIKLHPEDCKRFAFSVPSPNFKRPYQRFQWKVLPQGMKNSPTLCQKFVDKAILTVRDKYQDSYIVHYMDDILLAHPSRSIVDEILTSMIQALNKHGLVVSTEKIQKYDNLKYLGTHIQGDSVSYQKLQIRTDKLRTLNDFQKLLGNINWIRPFLKLTTGELKPLFEILNGDSNPISTRKLTPEACKALQLMNERLSTARVKRLDLSQPWSLCILKTEYTPTACLWQDGVVEWIHLPHISPKVITPYDIFCTQLIIKGRHRSKELFSKDPDYIVVPYTKVQFDLLLQEKEDWPISLLGFLGEVHFHLPKDPLLTFTLQTAIIFPHMTSTTPLEKGIVIFTDGSANGRSVTYIQGREPIIKENTQNTAQQAEIVAVITAFEEVSQPFNLYTDSKYVTGLFPEIETATLSPRTKIYTELKHLQRLIHKRQEKFYIGHIRGHTGLPGPLAQGNAYADSLTRILTAGKRTADGSEFEKRTADGSEFESPKKKAKVE

SEQ ID NO: 3326 - protein, 2024 aa, synthetic construct
MPAAKRVKLDGGDKKYSIGLDIGTNSVGWAVITDEYKVPSKKFKVLGNTDRHSIKKNLIGALLFDSGETAEATRLKRTARRRYTRRKNRICYLQEIFSNEMAKVDDSFFHRLEESFLVEEDKKHERHPIFGNIVDEVAYHEKYPTIYHLRKKLVDSTDKADLRLIYLALAHMIKFRGHFLIEGDLNPDNSDVDKLFIQLVQTYNQLFEENPINASGVDAKAILSARLSKSRRLENLIAQLPGEKKNGLFGNLIALSLGLTPNFKSNFDLAEDAKLQLSKDTYDDDLDNLLAQIGDQYADLFLAAKNLSDAILLSDILRVNTEITKAPLSASMIKRYDEHHQDLTLLKALVRQQLPEKYKEIFFDQSKNGYAGYIDGGASQEEFYKFIKPILEKMDGTEELLVKLNREDLLRKQRTFDNGSIPHQIHLGELHAILRRQEDFYPFLKDNREKIEKILTFRIPYYVGPLARGNSRFAWMTRKSEETITPWNFEEVVDKGASAQSFIERMTNFDKNLPNEKVLPKHSLLYEYFTVYNELTKVKYVTEGMRKPAFLSGEQKKAIVDLLFKTNRKVTVKQLKEDYFKKIECFDSVEISGVEDRFNASLGTYHDLLKIIKDKDFLDNEENEDILEDIVLTLTLFEDREMIEERLKTYAHLFDDKVMKQLKRRRYTGWGRLSRKLINGIRDKQSGKTILDFLKSDGFANRNFMQLIHDDSLTFKEDIQKAQVSGQGDSLHEHIANLAGSPAIKKGILQTVKVVDELVKVMGRHKPENIVIEMARENQTTQKGQKNSRERMKRIEEGIKELGSQILKEHPVENTQLQNEKLYLYYLQNGRDMYVDQELDINRLSDYDVDHIVPQSFLKDDSIDNKVLTRSDKARGKSDNVPSEEVVKKMKNYWRQLLNAKLITQRKFDNLTKAERGGLSELDKAGFIKRQLVETRQITKHVAQILDSRMNTKYDENDKLIREVKVITLKSKLVSDFRKDFQFYKVREINNYHHAHDAYLNAVVGTALIKKYPKLESEFVYGDYKVYDVRKMIAKSEQEIGKATAKYFFYSNIMNFFKTEITLANGEIRKRPLIETNGETGEIVWDKGRDFATVRKVLSMPQVNIVKKTEVQTGGFSKESILPKRNSDKLIARKKDWDPKKYGGFDSPTVAYSVLVVAKVEKGKSKKLKSVKELLGITIMERSSFEKNPIDFLEAKGYKEVKKDLIIKLPKYSLFELENGRKRMLASAGELQKGNELALPSKYVNFLYLASHYEKLKGSPEDNEQKQLFVEQHKHYLDEIIEQISEFSKRVILADANLDKVLSAYNKHRDKPIREQAENIIHLFTLTNLGAPAAFKYFDTTIDRKRYTSTKEVLDATLIHQSITGLYETRIDLSQLGGDGGGGSEAAAKGSSGGGRDIMKDIKVRLMTDSPDDSQDLMIGAIESNLFADQISWKSDQPVWLNQWPLKQEKLQALQQLVTEQLQLGHLEESNSPWNTPVFVIKKKSGKWRLLQDLRAVNATMHDMGALQPGLPSPVAVPKGWEIIIIDLQDCFFNIKLHPEDCKRFAFSVPSPNFKRPYQRFQWKVLPQGMKNSPTLCQKFVDKAILTVRDKYQDSYIVHYMDDILLAHPSRSIVDEILTSMIQALNKHGLVVSTEKIQKYDNLKYLGTHIQGDSVSYQKLQIRTDKLRTLNDFQKLLGNINWIRPFLKLTTGELKPLFEILNGDSNPISTRKLTPEACKALQLMNERLSTARVKRLDLSQPWSLCILKTEYTPTACLWQDGVVEWIHLPHISPKVITPYDIFCTQLIIKGRHRSKELFSKDPDYIVVPYTKVQFDLLLQEKEDWPISLLGFLGEVHFHLPKDPLLTFTLQTAIIFPHMTSTTPLEKGIVIFTDGSANGRSVTYIQGREPIIKENTQNTAQQAEIVAVITAFEEVSQPFNLYTDSKYVTGLFPEIETATLSPRTKIYTELKHLQRLIHKRQEKFYIGHIRGHTGLPGPLAQGNAYADSLTRILTAGKRTADGSEFEKRTADGSEFESPKKKAKVE

SEQ ID NO: 3327 - protein, 2018 aa, synthetic construct
MPAAKRVKLDGGDKKYSIGLDIGTNSVGWAVITDEYKVPSKKFKVLGNTDRHSIKKNLIGALLFDSGETAEATRLKRTARRRYTRRKNRICYLQEIFSNEMAKVDDSFFHRLEESFLVEEDKKHERHPIFGNIVDEVAYHEKYPTIYHLRKKLVDSTDKADLRLIYLALAHMIKFRGHFLIEGDLNPDNSDVDKLFIQLVQTYNQLFEENPINASGVDAKAILSARLSKSRRLENLIAQLPGEKKNGLFGNLIALSLGLTPNFKSNFDLAEDAKLQLSKDTYDDDLDNLLAQIGDQYADLFLAAKNLSDAILLSDILRVNTEITKAPLSASMIKRYDEHHQDLTLLKALVRQQLPEKYKEIFFDQSKNGYAGYIDGGASQEEFYKFIKPILEKMDGTEELLVKLNREDLLRKQRTFDNGSIPHQIHLGELHAILRRQEDFYPFLKDNREKIEKILTFRIPYYVGPLARGNSRFAWMTRKSEETITPWNFEEVVDKGASAQSFIERMTNFDKNLPNEKVLPKHSLLYEYFTVYNELTKVKYVTEGMRKPAFLSGEQKKAIVDLLFKTNRKVTVKQLKEDYFKKIECFDSVEISGVEDRFNASLGTYHDLLKIIKDKDFLDNEENEDILEDIVLTLTLFEDREMIEERLKTYAHLFDDKVMKQLKRRRYTGWGRLSRKLINGIRDKQSGKTILDFLKSDGFANRNFMQLIHDDSLTFKEDIQKAQVSGQGDSLHEHIANLAGSPAIKKGILQTVKVVDELVKVMGRHKPENIVIEMARENQTTQKGQKNSRERMKRIEEGIKELGSQILKEHPVENTQLQNEKLYLYYLQNGRDMYVDQELDINRLSDYDVDHIVPQSFLKDDSIDNKVLTRSDKARGKSDNVPSEEVVKKMKNYWRQLLNAKLITQRKFDNLTKAERGGLSELDKAGFIKRQLVETRQITKHVAQILDSRMNTKYDENDKLIREVKVITLKSKLVSDFRKDFQFYKVREINNYHHAHDAYLNAVVGTALIKKYPKLESEFVYGDYKVYDVRKMIAKSEQEIGKATAKYFFYSNIMNFFKTEITLANGEIRKRPLIETNGETGEIVWDKGRDFATVRKVLSMPQVNIVKKTEVQTGGFSKESILPKRNSDKLIARKKDWDPKKYGGFDSPTVAYSVLVVAKVEKGKSKKLKSVKELLGITIMERSSFEKNPIDFLEAKGYKEVKKDLIIKLPKYSLFELENGRKRMLASAGELQKGNELALPSKYVNFLYLASHYEKLKGSPEDNEQKQLFVEQHKHYLDEIIEQISEFSKRVILADANLDKVLSAYNKHRDKPIREQAENIIHLFTLTNLGAPAAFKYFDTTIDRKRYTSTKEVLDATLIHQSITGLYETRIDLSQLGGDGGPAPAPGGGRDIMKDIKVRLMTDSPDDSQDLMIGAIESNLFADQISWKSDQPVWLNQWPLKQEKLQALQQLVTEQLQLGHLEESNSPWNTPVFVIKKKSGKWRLLQDLRAVNATMHDMGALQPGLPSPVAVPKGWEIIIIDLQDCFFNIKLHPEDCKRFAFSVPSPNFKRPYQRFQWKVLPQGMKNSPTLCQKFVDKAILTVRDKYQDSYIVHYMDDILLAHPSRSIVDEILTSMIQALNKHGLVVSTEKIQKYDNLKYLGTHIQGDSVSYQKLQIRTDKLRTLNDFQKLLGNINWIRPFLKLTTGELKPLFEILNPDSNPISTRKLTPEACKALQLMNERLSTARVKRLDLSQPWSLCILKTEYTPTACLWQDGVVEWIHLPHISPKVITPYDIFCTQLIIKGRHRSKELFSKDPDYIVVPYTKVQFDLLLQEKEDWPISLLGFLGEVHFHLPKDPLLTFTLQTAIIFPHMTSTTPLEKGIVIFTDGSANGRSVTYIQGREPIIKENTQNTAQQAEIVAVITAFEEVSQPFNLYTDSKYVTGLFPEIETATLSPRTKIYTELKHLQRLIHKRQEKFYIGHIRGHTGLPGPLAQGNAYADSLTRILTAGKRTADGSEFEKRTADGSEFESPKKKAKVE

SEQ ID NO: 3328 - protein, 2028 aa, synthetic construct
MPAAKRVKLDGGDKKYSIGLDIGTNSVGWAVITDEYKVPSKKFKVLGNTDRHSIKKNLIGALLFDSGETAEATRLKRTARRRYTRRKNRICYLQEIFSNEMAKVDDSFFHRLEESFLVEEDKKHERHPIFGNIVDEVAYHEKYPTIYHLRKKLVDSTDKADLRLIYLALAHMIKFRGHFLIEGDLNPDNSDVDKLFIQLVQTYNQLFEENPINASGVDAKAILSARLSKSRRLENLIAQLPGEKKNGLFGNLIALSLGLTPNFKSNFDLAEDAKLQLSKDTYDDDLDNLLAQIGDQYADLFLAAKNLSDAILLSDILRVNTEITKAPLSASMIKRYDEHHQDLTLLKALVRQQLPEKYKEIFFDQSKNGYAGYIDGGASQEEFYKFIKPILEKMDGTEELLVKLNREDLLRKQRTFDNGSIPHQIHLGELHAILRRQEDFYPFLKDNREKIEKILTFRIPYYVGPLARGNSRFAWMTRKSEETITPWNFEEVVDKGASAQSFIERMTNFDKNLPNEKVLPKHSLLYEYFTVYNELTKVKYVTEGMRKPAFLSGEQKKAIVDLLFKTNRKVTVKQLKEDYFKKIECFDSVEISGVEDRFNASLGTYHDLLKIIKDKDFLDNEENEDILEDIVLTLTLFEDREMIEERLKTYAHLFDDKVMKQLKRRRYTGWGRLSRKLINGIRDKQSGKTILDFLKSDGFANRNFMQLIHDDSLTFKEDIQKAQVSGQGDSLHEHIANLAGSPAIKKGILQTVKVVDELVKVMGRHKPENIVIEMARENQTTQKGQKNSRERMKRIEEGIKELGSQILKEHPVENTQLQNEKLYLYYLQNGRDMYVDQELDINRLSDYDVDHIVPQSFLKDDSIDNKVLTRSDKARGKSDNVPSEEVVKKMKNYWRQLLNAKLITQRKFDNLTKAERGGLSELDKAGFIKRQLVETRQITKHVAQILDSRMNTKYDENDKLIREVKVITLKSKLVSDFRKDFQFYKVREINNYHHAHDAYLNAVVGTALIKKYPKLESEFVYGDYKVYDVRKMIAKSEQEIGKATAKYFFYSNIMNFFKTEITLANGEIRKRPLIETNGETGEIVWDKGRDFATVRKVLSMPQVNIVKKTEVQTGGFSKESILPKRNSDKLIARKKDWDPKKYGGFDSPTVAYSVLVVAKVEKGKSKKLKSVKELLGITIMERSSFEKNPIDFLEAKGYKEVKKDLIIKLPKYSLFELENGRKRMLASAGELQKGNELALPSKYVNFLYLASHYEKLKGSPEDNEQKQLFVEQHKHYLDEIIEQISEFSKRVILADANLDKVLSAYNKHRDKPIREQAENIIHLFTLTNLGAPAAFKYFDTTIDRKRYTSTKEVLDATLIHQSITGLYETRIDLSQLGGDGGGGGGSEAAAKGGGGSGGGRDIMKDIKVRLMTDSPDDSQDLMIGAIESNLFADQISWKSDQPVWLNQWPLKQEKLQALQQLVTEQLQLGHLEESNSPWNTPVFVIKKKSGKWRLLQDLRAVNATMHDMGALQPGLPSPVAVPKGWEIIIIDLQDCFFNIKLHPEDCKRFAFSVPSPNFKRPYQRFQWKVLPQGMKNSPTLCQKFVDKAILTVRDKYQDSYIVHYMDDILLAHPSRSIVDEILTSMIQALNKHGLVVSTEKIQKYDNLKYLGTHIQGDSVSYQKLQIRTDKLRTLNDFQKLLGNINWIRPFLKLTTGELKPLFEILNPDSNPISTRKLTPEACKALQLMNERLSTARVKRLDLSQPWSLCILKTEYTPTACLWQDGVVEWIHLPHISPKVITPYDIFCTQLIIKGRHRSKELFSKDPDYIVVPYTKVQFDLLLQEKEDWPISLLGFLGEVHFHLPKDPLLTFTLQTAIIFPHMTSTTPLEKGIVIFTDGSANGRSVTYIQGREPIIKENTQNTAQQAEIVAVITAFEEVSQPFNLYTDSKYVTGLFPEIETATLSPRTKIYTELKHLQRLIHKRQEKFYIGHIRGHTGLPGPLAQGNAYADSLTRILTAGKRTADGSEFEKRTADGSEFESPKKKAKVE

SEQ ID NO: 3329 - protein, 2022 aa, synthetic construct
MPAAKRVKLDGGDKKYSIGLDIGTNSVGWAVITDEYKVPSKKFKVLGNTDRHSIKKNLIGALLFDSGETAEATRLKRTARRRYTRRKNRICYLQEIFSNEMAKVDDSFFHRLEESFLVEEDKKHERHPIFGNIVDEVAYHEKYPTIYHLRKKLVDSTDKADLRLIYLALAHMIKFRGHFLIEGDLNPDNSDVDKLFIQLVQTYNQLFEENPINASGVDAKAILSARLSKSRRLENLIAQLPGEKKNGLFGNLIALSLGLTPNFKSNFDLAEDAKLQLSKDTYDDDLDNLLAQIGDQYADLFLAAKNLSDAILLSDILRVNTEITKAPLSASMIKRYDEHHQDLTLLKALVRQQLPEKYKEIFFDQSKNGYAGYIDGGASQEEFYKFIKPILEKMDGTEELLVKLNREDLLRKQRTFDNGSIPHQIHLGELHAILRRQEDFYPFLKDNREKIEKILTFRIPYYVGPLARGNSRFAWMTRKSEETITPWNFEEVVDKGASAQSFIERMTNFDKNLPNEKVLPKHSLLYEYFTVYNELTKVKYVTEGMRKPAFLSGEQKKAIVDLLFKTNRKVTVKQLKEDYFKKIECFDSVEISGVEDRFNASLGTYHDLLKIIKDKDFLDNEENEDILEDIVLTLTLFEDREMIEERLKTYAHLFDDKVMKQLKRRRYTGWGRLSRKLINGIRDKQSGKTILDFLKSDGFANRNFMQLIHDDSLTFKEDIQKAQVSGQGDSLHEHIANLAGSPAIKKGILQTVKVVDELVKVMGRHKPENIVIEMARENQTTQKGQKNSRERMKRIEEGIKELGSQILKEHPVENTQLQNEKLYLYYLQNGRDMYVDQELDINRLSDYDVDHIVPQSFLKDDSIDNKVLTRSDKARGKSDNVPSEEVVKKMKNYWRQLLNAKLITQRKFDNLTKAERGGLSELDKAGFIKRQLVETRQITKHVAQILDSRMNTKYDENDKLIREVKVITLKSKLVSDFRKDFQFYKVREINNYHHAHDAYLNAVVGTALIKKYPKLESEFVYGDYKVYDVRKMIAKSEQEIGKATAKYFFYSNIMNFFKTEITLANGEIRKRPLIETNGETGEIVWDKGRDFATVRKVLSMPQVNIVKKTEVQTGGFSKESILPKRNSDKLIARKKDWDPKKYGGFDSPTVAYSVLVVAKVEKGKSKKLKSVKELLGITIMERSSFEKNPIDFLEAKGYKEVKKDLIIKLPKYSLFELENGRKRMLASAGELQKGNELALPSKYVNFLYLASHYEKLKGSPEDNEQKQLFVEQHKHYLDEIIEQISEFSKRVILADANLDKVLSAYNKHRDKPIREQAENIIHLFTLTNLGAPAAFKYFDTTIDRKRYTSTKEVLDATLIHQSITGLYETRIDLSQLGGDGGGGSGGGGSSGGGRDIMKDIKVRLMTDSPDDSQDLMIGAIESNLFADQISWKSDQPVWLNQWPLKQEKLQALQQLVTEQLQLGHLEESNSPWNTPVFVIKKKSGKWRLLQDLRAVNATMHDMGALQPGLPSPVAVPKGWEIIIIDLQDCFFNIKLHPEDCKRFAFSVPSPNFKRPYQRFQWKVLPQGMKNSPTLCQKFVDKAILTVRDKYQDSYIVHYMDDILLAHPSRSIVDEILTSMIQALNKHGLVVSTEKIQKYDNLKYLGTHIQGDSVSYQKLQIRTDKLRTLNDFQKLLGNINWIRPFLKLTTGELKPLFEILNPDSNPISTRKLTPEACKALQLMNERLSTARVKRLDLSQPWSLCILKTEYTPTACLWQDGVVEWIHLPHISPKVITPYDIFCTQLIIKGRHRSKELFSKDPDYIVVPYTKVQFDLLLQEKEDWPISLLGFLGEVHFHLPKDPLLTFTLQTAIIFPHMTSTTPLEKGIVIFTDGSANGRSVTYIQGREPIIKENTQNTAQQAEIVAVITAFEEVSQPFNLYTDSKYVTGLFPEIETATLSPRTKIYTELKHLQRLIHKRQEKFYIGHIRGHTGLPGPLAQGNAYADSLTRILTAGKRTADGSEFEKRTADGSEFESPKKKAKVE

SEQ ID NO: 3330 - protein, 2033 aa, synthetic construct
MPAAKRVKLDGGDKKYSIGLDIGTNSVGWAVITDEYKVPSKKFKVLGNTDRHSIKKNLIGALLFDSGETAEATRLKRTARRRYTRRKNRICYLQEIFSNEMAKVDDSFFHRLEESFLVEEDKKHERHPIFGNIVDEVAYHEKYPTIYHLRKKLVDSTDKADLRLIYLALAHMIKFRGHFLIEGDLNPDNSDVDKLFIQLVQTYNQLFEENPINASGVDAKAILSARLSKSRRLENLIAQLPGEKKNGLFGNLIALSLGLTPNFKSNFDLAEDAKLQLSKDTYDDDLDNLLAQIGDQYADLFLAAKNLSDAILLSDILRVNTEITKAPLSASMIKRYDEHHQDLTLLKALVRQQLPEKYKEIFFDQSKNGYAGYIDGGASQEEFYKFIKPILEKMDGTEELLVKLNREDLLRKQRTFDNGSIPHQIHLGELHAILRRQEDFYPFLKDNREKIEKILTFRIPYYVGPLARGNSRFAWMTRKSEETITPWNFEEVVDKGASAQSFIERMTNFDKNLPNEKVLPKHSLLYEYFTVYNELTKVKYVTEGMRKPAFLSGEQKKAIVDLLFKTNRKVTVKQLKEDYFKKIECFDSVEISGVEDRFNASLGTYHDLLKIIKDKDFLDNEENEDILEDIVLTLTLFEDREMIEERLKTYAHLFDDKVMKQLKRRRYTGWGRLSRKLINGIRDKQSGKTILDFLKSDGFANRNFMQLIHDDSLTFKEDIQKAQVSGQGDSLHEHIANLAGSPAIKKGILQTVKVVDELVKVMGRHKPENIVIEMARENQTTQKGQKNSRERMKRIEEGIKELGSQILKEHPVENTQLQNEKLYLYYLQNGRDMYVDQELDINRLSDYDVDHIVPQSFLKDDSIDNKVLTRSDKARGKSDNVPSEEVVKKMKNYWRQLLNAKLITQRKFDNLTKAERGGLSELDKAGFIKRQLVETRQITKHVAQILDSRMNTKYDENDKLIREVKVITLKSKLVSDFRKDFQFYKVREINNYHHAHDAYLNAVVGTALIKKYPKLESEFVYGDYKVYDVRKMIAKSEQEIGKATAKYFFYSNIMNFFKTEITLANGEIRKRPLIETNGETGEIVWDKGRDFATVRKVLSMPQVNIVKKTEVQTGGFSKESILPKRNSDKLIARKKDWDPKKYGGFDSPTVAYSVLVVAKVEKGKSKKLKSVKELLGITIMERSSFEKNPIDFLEAKGYKEVKKDLIIKLPKYSLFELENGRKRMLASAGELQKGNELALPSKYVNFLYLASHYEKLKGSPEDNEQKQLFVEQHKHYLDEIIEQISEFSKRVILADANLDKVLSAYNKHRDKPIREQAENIIHLFTLTNLGAPAAFKYFDTTIDRKRYTSTKEVLDATLIHQSITGLYETRIDLSQLGGDGGEAAAKEAAAKEAAAKEAAAKGGGRDIMKDIKVRLMTDSPDDSQDLMIGAIESNLFADQISWKSDQPVWLNQWPLKQEKLQALQQLVTEQLQLGHLEESNSPWNTPVFVIKKKSGKWRLLQDLRAVNATMHDMGALQPGLPSPVAPPKGWEIIIIDLQDCFFNIKLHPEDCKRFAFSVPSPNFKRPYQRFQWKVLPQGMKNSPTLCQKFVDKAILTVRDKYQDSYIVHYMDDILLAHPSRSIVDEILTSMIQALNKHGLVVSTEKIQKYDNLKYLGTHIQGDSVSYQKLQIRTDKLRTLNDFQKLLGNINWIRPFLKLTTGELKPLFEILNPDSNPISTRKLTPEACKALQLMNERLSTARVKRLDLSQPWSLCILKTEYTPTACLWQDGVVEWIHLPHISPKVITPYDIFCTQLIIKGRHRSKELFSKDPDYIVVPYTKVQFDLLLQEKEDWPISLLGFLGEVHFHLPKDPLLTFTLQTAIIFPHMTSTTPLEKGIVIFTDGSANGRSVTYIQGREPIIKENTQNTAQQAEIVAVITAFEEVSQPFNLYTDSKYVTGLFPEIETATLSPRTKIYTELKHLQRLIHKRQEKFYIGHIRGHTGLPGPLAQGNAYADSLTRILTAGKRTADGSEFEKRTADGSEFESPKKKAKVE

SEQ ID NO: 3331 - protein, 2022 aa, synthetic construct
MPAAKRVKLDGGDKKYSIGLDIGTNSVGWAVITDEYKVPSKKFKVLGNTDRHSIKKNLIGALLFDSGETAEATRLKRTARRRYTRRKNRICYLQEIFSNEMAKVDDSFFHRLEESFLVEEDKKHERHPIFGNIVDEVAYHEKYPTIYHLRKKLVDSTDKADLRLIYLALAHMIKFRGHFLIEGDLNPDNSDVDKLFIQLVQTYNQLFEENPINASGVDAKAILSARLSKSRRLENLIAQLPGEKKNGLFGNLIALSLGLTPNFKSNFDLAEDAKLQLSKDTYDDDLDNLLAQIGDQYADLFLAAKNLSDAILLSDILRVNTEITKAPLSASMIKRYDEHHQDLTLLKALVRQQLPEKYKEIFFDQSKNGYAGYIDGGASQEEFYKFIKPILEKMDGTEELLVKLNREDLLRKQRTFDNGSIPHQIHLGELHAILRRQEDFYPFLKDNREKIEKILTFRIPYYVGPLARGNSRFAWMTRKSEETITPWNFEEVVDKGASAQSFIERMTNFDKNLPNEKVLPKHSLLYEYFTVYNELTKVKYVTEGMRKPAFLSGEQKKAIVDLLFKTNRKVTVKQLKEDYFKKIECFDSVEISGVEDRFNASLGTYHDLLKIIKDKDFLDNEENEDILEDIVLTLTLFEDREMIEERLKTYAHLFDDKVMKQLKRRRYTGWGRLSRKLINGIRDKQSGKTILDFLKSDGFANRNFMQLIHDDSLTFKEDIQKAQVSGQGDSLHEHIANLAGSPAIKKGILQTVKVVDELVKVMGRHKPENIVIEMARENQTTQKGQKNSRERMKRIEEGIKELGSQILKEHPVENTQLQNEKLYLYYLQNGRDMYVDQELDINRLSDYDVDHIVPQSFLKDDSIDNKVLTRSDKARGKSDNVPSEEVVKKMKNYWRQLLNAKLITQRKFDNLTKAERGGLSELDKAGFIKRQLVETRQITKHVAQILDSRMNTKYDENDKLIREVKVITLKSKLVSDFRKDFQFYKVREINNYHHAHDAYLNAVVGTALIKKYPKLESEFVYGDYKVYDVRKMIAKSEQEIGKATAKYFFYSNIMNFFKTEITLANGEIRKRPLIETNGETGEIVWDKGRDFATVRKVLSMPQVNIVKKTEVQTGGFSKESILPKRNSDKLIARKKDWDPKKYGGFDSPTVAYSVLVVAKVEKGKSKKLKSVKELLGITIMERSSFEKNPIDFLEAKGYKEVKKDLIIKLPKYSLFELENGRKRMLASAGELQKGNELALPSKYVNFLYLASHYEKLKGSPEDNEQKQLFVEQHKHYLDEIIEQISEFSKRVILADANLDKVLSAYNKHRDKPIREQAENIIHLFTLTNLGAPAAFKYFDTTIDRKRYTSTKEVLDATLIHQSITGLYETRIDLSQLGGDGGGGGGGSPAPGGGRDIMKDIKVRLMTDSPDDSQDLMIGAIESNLFADQISWKSDQPVWLNQWPLKQEKLQALQQLVTEQLQLGHLEESNSPWNTPVFVIKKKSGKWRLLQDLRAVNATMHDMGALQPGLPSPVAPPKGWEIIIIDLQDCFFNIKLHPEDCKRFAFSVPSPNFKRPYQRFQWKVLPQGMKNSPTLCQKFVDKAILTVRDKYQDSYIVHYMDDILLAHPSRSIVDEILTSMIQALNKHGLVVSTEKIQKYDNLKYLGTHIQGDSVSYQKLQIRTDKLRTLNDFQKLLGNINWIRPFLKLTTGELKPLFEILNPDSNPISTRKLTPEACKALQLMNERLSTARVKRLDLSQPWSLCILKTEYTPTACLWQDGVVEWIHLPHISPKVITPYDIFCTQLIIKGRHRSKELFSKDPDYIVVPYTKVQFDLLLQEKEDWPISLLGFLGEVHFHLPKDPLLTFTLQTAIIFPHMTSTTPLEKGIVIFTDGSANGRSVTYIQGREPIIKENTQNTAQQAEIVAVITAFEEVSQPFNLYTDSKYVTGLFPEIETATLSPRTKIYTELKHLQRLIHKRQEKFYIGHIRGHTGLPGPLAQGNAYADSLTRILTAGKRTADGSEFEKRTADGSEFESPKKKAKVE

SEQ ID NO: 3332 - protein, 2024 aa, synthetic construct
MPAAKRVKLDGGDKKYSIGLDIGTNSVGWAVITDEYKVPSKKFKVLGNTDRHSIKKNLIGALLFDSGETAEATRLKRTARRRYTRRKNRICYLQEIFSNEMAKVDDSFFHRLEESFLVEEDKKHERHPIFGNIVDEVAYHEKYPTIYHLRKKLVDSTDKADLRLIYLALAHMIKFRGHFLIEGDLNPDNSDVDKLFIQLVQTYNQLFEENPINASGVDAKAILSARLSKSRRLENLIAQLPGEKKNGLFGNLIALSLGLTPNFKSNFDLAEDAKLQLSKDTYDDDLDNLLAQIGDQYADLFLAAKNLSDAILLSDILRVNTEITKAPLSASMIKRYDEHHQDLTLLKALVRQQLPEKYKEIFFDQSKNGYAGYIDGGASQEEFYKFIKPILEKMDGTEELLVKLNREDLLRKQRTFDNGSIPHQIHLGELHAILRRQEDFYPFLKDNREKIEKILTFRIPYYVGPLARGNSRFAWMTRKSEETITPWNFEEVVDKGASAQSFIERMTNFDKNLPNEKVLPKHSLLYEYFTVYNELTKVKYVTEGMRKPAFLSGEQKKAIVDLLFKTNRKVTVKQLKEDYFKKIECFDSVEISGVEDRFNASLGTYHDLLKIIKDKDFLDNEENEDILEDIVLTLTLFEDREMIEERLKTYAHLFDDKVMKQLKRRRYTGWGRLSRKLINGIRDKQSGKTILDFLKSDGFANRNFMQLIHDDSLTFKEDIQKAQVSGQGDSLHEHIANLAGSPAIKKGILQTVKVVDELVKVMGRHKPENIVIEMARENQTTQKGQKNSRERMKRIEEGIKELGSQILKEHPVENTQLQNEKLYLYYLQNGRDMYVDQELDINRLSDYDVDHIVPQSFLKDDSIDNKVLTRSDKARGKSDNVPSEEVVKKMKNYWRQLLNAKLITQRKFDNLTKAERGGLSELDKAGFIKRQLVETRQITKHVAQILDSRMNTKYDENDKLIREVKVITLKSKLVSDFRKDFQFYKVREINNYHHAHDAYLNAVVGTALIKKYPKLESEFVYGDYKVYDVRKMIAKSEQEIGKATAKYFFYSNIMNFFKTEITLANGEIRKRPLIETNGETGEIVWDKGRDFATVRKVLSMPQVNIVKKTEVQTGGFSKESILPKRNSDKLIARKKDWDPKKYGGFDSPTVAYSVLVVAKVEKGKSKKLKSVKELLGITIMERSSFEKNPIDFLEAKGYKEVKKDLIIKLPKYSLFELENGRKRMLASAGELQKGNELALPSKYVNFLYLASHYEKLKGSPEDNEQKQLFVEQHKHYLDEIIEQISEFSKRVILADANLDKVLSAYNKHRDKPIREQAENIIHLFTLTNLGAPAAFKYFDTTIDRKRYTSTKEVLDATLIHQSITGLYETRIDLSQLGGDGGGSSEAAAKPAPGGGRDIMKDIKVRLMTDSPDDSQDLMIGAIESNLFADQISWKSDQPVWLNQWPLKQEKLQALQQLVTEQLQLGHLEESNSPWNTPVFVIKKKSGKWRLLQDLRAVNATMHDMGALQPGLPSPVAPPKGWEIIIIDLQDCFFNIKLHPEDCKRFAFSVPSPNFKRPYQRFQWKVLPQGMKNSPTLCQKFVDKAILTVRDKYQDSYIVHYMDDILLAHPSRSIVDEILTSMIQALNKHGLVVSTEKIQKYDNLKYLGTHIQGDSVSYQKLQIRTDKLRTLNDFQKLLGNINWIRPFLKLTTGELKPLFEILNPDSNPISTRKLTPEACKALQLMNERLSTARVKRLDLSQPWSLCILKTEYTPTACLWQDGVVEWIHLPHISPKVITPYDIFCTQLIIKGRHRSKELFSKDPDYIVVPYTKVQFDLLLQEKEDWPISLLGFLGEVHFHLPKDPLLTFTLQTAIIFPHMTSTTPLEKGIVIFTDGSANGRSVTYIQGREPIIKENTQNTAQQAEIVAVITAFEEVSQPFNLYTDSKYVTGLFPEIETATLSPRTKIYTELKHLQRLIHKRQEKFYIGHIRGHTGLPGPLAQGNAYADSLTRILTAGKRTADGSEFEKRTADGSEFESPKKKAKVE

SEQ ID NO: 3333-3999 - skipped (667 entries)

SEQ ID NO: 4000 - protein, 1381 aa, synthetic construct
MPAAKRVKLDGGDKKYSIGLDIGTNSVGWAVITDEYKVPSKKFKVLGNTDRHSIKKNLIGALLFDSGETAEATRLKRTARRRYTRRKNRICYLQEIFSNEMAKVDDSFFHRLEESFLVEEDKKHERHPIFGNIVDEVAYHEKYPTIYHLRKKLVDSTDKADLRLIYLALAHMIKFRGHFLIEGDLNPDNSDVDKLFIQLVQTYNQLFEENPINASGVDAKAILSARLSKSRRLENLIAQLPGEKKNGLFGNLIALSLGLTPNFKSNFDLAEDAKLQLSKDTYDDDLDNLLAQIGDQYADLFLAAKNLSDAILLSDILRVNTEITKAPLSASMIKRYDEHHQDLTLLKALVRQQLPEKYKEIFFDQSKNGYAGYIDGGASQEEFYKFIKPILEKMDGTEELLVKLNREDLLRKQRTFDNGSIPHQIHLGELHAILRRQEDFYPFLKDNREKIEKILTFRIPYYVGPLARGNSRFAWMTRKSEETITPWNFEEVVDKGASAQSFIERMTNFDKNLPNEKVLPKHSLLYEYFTVYNELTKVKYVTEGMRKPAFLSGEQKKAIVDLLFKTNRKVTVKQLKEDYFKKIECFDSVEISGVEDRFNASLGTYHDLLKIIKDKDFLDNEENEDILEDIVLTLTLFEDREMIEERLKTYAHLFDDKVMKQLKRRRYTGWGRLSRKLINGIRDKQSGKTILDFLKSDGFANRNFMQLIHDDSLTFKEDIQKAQVSGQGDSLHEHIANLAGSPAIKKGILQTVKVVDELVKVMGRHKPENIVIEMARENQTTQKGQKNSRERMKRIEEGIKELGSQILKEHPVENTQLQNEKLYLYYLQNGRDMYVDQELDINRLSDYDVDHIVPQSFLKDDSIDNKVLTRSDKARGKSDNVPSEEVVKKMKNYWRQLLNAKLITQRKFDNLTKAERGGLSELDKAGFIKRQLVETRQITKHVAQILDSRMNTKYDENDKLIREVKVITLKSKLVSDFRKDFQFYKVREINNYHHAHDAYLNAVVGTALIKKYPKLESEFVYGDYKVYDVRKMIAKSEQEIGKATAKYFFYSNIMNFFKTEITLANGEIRKRPLIETNGETGEIVWDKGRDFATVRKVLSMPQVNIVKKTEVQTGGFSKESILPKRNSDKLIARKKDWDPKKYGGFDSPTVAYSVLVVAKVEKGKSKKLKSVKELLGITIMERSSFEKNPIDFLEAKGYKEVKKDLIIKLPKYSLFELENGRKRMLASAGELQKGNELALPSKYVNFLYLASHYEKLKGSPEDNEQKQLFVEQHKHYLDEIIEQISEFSKRVILADANLDKVLSAYNKHRDKPIREQAENIIHLFTLTNLGAPAAFKYFDTTIDRKRYTSTKEVLDATLIHQSITGLYETRIDLSQLGGDGG

SEQ ID NO: 4001 - protein, 31 aa, synthetic construct
AGKRTADGSEFEKRTADGSEFESPKKKAKVE

SEQ ID NO: 4002 - protein, 2138 aa, synthetic construct; identical to SEQ ID NO: 2892

SEQ ID NO: 4003-4500 - skipped (498 entries)

SEQ ID NO: 4501 - protein, 2096 aa, synthetic construct
MPAAKRVKLDGGDKKYSIGLDIGTNSVGWAVITDEYKVPSKKFKVLGNTDRHSIKKNLIGALLFDSGETAEATRLKRTARRRYTRRKNRICYLQEIFSNEMAKVDDSFFHRLEESFLVEEDKKHERHPIFGNIVDEVAYHEKYPTIYHLRKKLVDSTDKADLRLIYLALAHMIKFRGHFLIEGDLNPDNSDVDKLFIQLVQTYNQLFEENPINASGVDAKAILSARLSKSRRLENLIAQLPGEKKNGLFGNLIALSLGLTPNFKSNFDLAEDAKLQLSKDTYDDDLDNLLAQIGDQYADLFLAAKNLSDAILLSDILRVNTEITKAPLSASMIKRYDEHHQDLTLLKALVRQQLPEKYKEIFFDQSKNGYAGYIDGGASQEEFYKFIKPILEKMDGTEELLVKLNREDLLRKQRTFDNGSIPHQIHLGELHAILRRQEDFYPFLKDNREKIEKILTFRIPYYVGPLARGNSRFAWMTRKSEETITPWNFEEVVDKGASAQSFIERMTNFDKNLPNEKVLPKHSLLYEYFTVYNELTKVKYVTEGMRKPAFLSGEQKKAIVDLLFKTNRKVTVKQLKEDYFKKIECFDSVEISGVEDRFNASLGTYHDLLKIIKDKDFLDNEENEDILEDIVLTLTLFEDREMIEERLKTYAHLFDDKVMKQLKRRRYTGWGRLSRKLINGIRDKQSGKTILDFLKSDGFANRNFMQLIHDDSLTFKEDIQKAQVSGQGDSLHEHIANLAGSPAIKKGILQTVKVVDELVKVMGRHKPENIVIEMARENQTTQKGQKNSRERMKRIEEGIKELGSQILKEHPVENTQLQNEKLYLYYLQNGRDMYVDQELDINRLSDYDVDHIVPQSFLKDDSIDNKVLTRSDKARGKSDNVPSEEVVKKMKNYWRQLLNAKLITQRKFDNLTKAERGGLSELDKAGFIKRQLVETRQITKHVAQILDSRMNTKYDENDKLIREVKVITLKSKLVSDFRKDFQFYKVREINNYHHAHDAYLNAVVGTALIKKYPKLESEFVYGDYKVYDVRKMIAKSEQEIGKATAKYFFYSNIMNFFKTEITLANGEIRKRPLIETNGETGEIVWDKGRDFATVRKVLSMPQVNIVKKTEVQTGGFSKESILPKRNSDKLIARKKDWDPKKYGGFDSPTVAYSVLVVAKVEKGKSKKLKSVKELLGITIMERSSFEKNPIDFLEAKGYKEVKKDLIIKLPKYSLFELENGRKRMLASAGELQKGNELALPSKYVNFLYLASHYEKLKGSPEDNEQKQLFVEQHKHYLDEIIEQISEFSKRVILADANLDKVLSAYNKHRDKPIREQAENIIHLFTLTNLGAPAAFKYFDTTIDRKRYTSTKEVLDATLIHQSITGLYETRIDLSQLGGDGGGGSGGSGGSGGTAPLEEEYRLFLEAPIQNVTLLEQWKREIPKVWAEINPPGLASTQAPIHVQLLSTALPVRVRQYPITLEAKRSLRETIRKFRAAGILRPVHSPWNTPLLPVRKSGTSEYRMVQDLREVNKRVETIHPTVPNPYTLLSLLPPDRIWYSVLDLKDAFFCIPLAPESQLIFAFEWADAEEGESGQLTWTRLPQGFKNSPTLFNEALNRDLQGFRLDHPSVSLLQYVDDLLIAADTQAACLSATRDLLMTLAELGYRVSGKKAQLCQEEVTYLGFKIHKGSRSLSNSRTQAILQIPVPKTKRQVREFLGKIGYCRLFIPGFAELAQPLYAATRPGNDPLVWGEKEEEAFQSLKLALTQPPALALPSLDKPFQLFVEETSGAAKGVLTQALGPWKRPVAYLSKRLDPVAAGWPRCLRAIAAAALLTREASKLTFGQDIEITSSHNLESLLRSPPDKWLTNARITQYQVLLLDPPRVRFKQTAALNPATLLPETDDTLPIHHCLDTLDSLTSTRPDLTDQPLAQAEATLFTDGSSYIRDGKRYAGAAVVTLDSVIWAEPLPIGTSAQKAELIALTKALEWSKDKSVNIYTDSRYAFATLHVHGMIYRERGWLTAGGKAIKNAPEILALLTAVWLPKRVAVMHCKGHQKDDAPTSTGNRRADEVAREVAIRPLSTQATISAGKRTADGSEFEKRTADGSEFESPKKKAKVE

SEQ ID NO: 4502 - protein, 2098 aa, synthetic construct
MPAAKRVKLDGGDKKYSIGLDIGTNSVGWAVITDEYKVPSKKFKVLGNTDRHSIKKNLIGALLFDSGETAEATRLKRTARRRYTRRKNRICYLQEIFSNEMAKVDDSFFHRLEESFLVEEDKKHERHPIFGNIVDEVAYHEKYPTIYHLRKKLVDSTDKADLRLIYLALAHMIKFRGHFLIEGDLNPDNSDVDKLFIQLVQTYNQLFEENPINASGVDAKAILSARLSKSRRLENLIAQLPGEKKNGLFGNLIALSLGLTPNFKSNFDLAEDAKLQLSKDTYDDDLDNLLAQIGDQYADLFLAAKNLSDAILLSDILRVNTEITKAPLSASMIKRYDEHHQDLTLLKALVRQQLPEKYKEIFFDQSKNGYAGYIDGGASQEEFYKFIKPILEKMDGTEELLVKLNREDLLRKQRTFDNGSIPHQIHLGELHAILRRQEDFYPFLKDNREKIEKILTFRIPYYVGPLARGNSRFAWMTRKSEETITPWNFEEVVDKGASAQSFIERMTNFDKNLPNEKVLPKHSLLYEYFTVYNELTKVKYVTEGMRKPAFLSGEQKKAIVDLLFKTNRKVTVKQLKEDYFKKIECFDSVEISGVEDRFNASLGTYHDLLKIIKDKDFLDNEENEDILEDIVLTLTLFEDREMIEERLKTYAHLFDDKVMKQLKRRRYTGWGRLSRKLINGIRDKQSGKTILDFLKSDGFANRNFMQLIHDDSLTFKEDIQKAQVSGQGDSLHEHIANLAGSPAIKKGILQTVKVVDELVKVMGRHKPENIVIEMARENQTTQKGQKNSRERMKRIEEGIKELGSQILKEHPVENTQLQNEKLYLYYLQNGRDMYVDQELDINRLSDYDVDHIVPQSFLKDDSIDNKVLTRSDKARGKSDNVPSEEVVKKMKNYWRQLLNAKLITQRKFDNLTKAERGGLSELDKAGFIKRQLVETRQITKHVAQILDSRMNTKYDENDKLIREVKVITLKSKLVSDFRKDFQFYKVREINNYHHAHDAYLNAVVGTALIKKYPKLESEFVYGDYKVYDVRKMIAKSEQEIGKATAKYFFYSNIMNFFKTEITLANGEIRKRPLIETNGETGEIVWDKGRDFATVRKVLSMPQVNIVKKTEVQTGGFSKESILPKRNSDKLIARKKDWDPKKYGGFDSPTVAYSVLVVAKVEKGKSKKLKSVKELLGITIMERSSFEKNPIDFLEAKGYKEVKKDLIIKLPKYSLFELENGRKRMLASAGELQKGNELALPSKYVNFLYLASHYEKLKGSPEDNEQKQLFVEQHKHYLDEIIEQISEFSKRVILADANLDKVLSAYNKHRDKPIREQAENIIHLFTLTNLGAPAAFKYFDTTIDRKRYTSTKEVLDATLIHQSITGLYETRIDLSQLGGDGGGGSGGSGGSGGSGGSGGVLNLEEEYRLHEKPVPSSIDPSWLQLFPTVWAERAGMGLANQVPPVVVELRSGASPVAVRQYPMSKEAREGIRPHIQRFLDLGVLVPCQSPWNTPLLPVKKPGTNDYRPVQDLREINKRVQDIHPTVPNPYNLLSSLPPSHTWYSVLDLKDAFFCLKLHPNSQPLFAFEWRDPEKGNTGQLTWTRLPQGFKNSPTLFNEALHRDLAPFRALNPQVVLLQYVDDLLVAAPTYRDCKEGTQKLLQELSKLGYRVSAKKAQLCQKEVTYLGYLLKEGKRWLTPARKATVMKIPPPTTPRQVREFLGTAGFCRLWIPGFASLAAPLYPLTKPSIPFIWTEEHQKAFDRIKEALLSAPALALPDLTKPFTLYVDERAGVARGVLTQTLGPWRRPVAYLSKKLDPVASGWPTCLKAVAAVALLLKDADKLTLGQNVTVIASHSLESIVRQPPDRWMTNARMTHYQSLLLNERVSFAPPAVLNPATLLPVESEATPVHRCSEILAEETGTRRDLKDQPLPGVPAWYTDGSSFIAEGKRRAGAAIVDGKRTVWASSLPEGTSAQKAELVALTQALRLAEGKDINIYTDSRYAFATAHIHGAIYKQRGWLTSAGKDIKNKEEILALLEAIHLPKRVAIIHCPGHQKGNDPVATGNRRADEAAKQAALSTRVLAETTKPAGKRTADGSEFEKRTADGSEFESPKKKAKVE

SEQ ID NO: 4503 - protein, 2103 aa, synthetic construct
MPAAKRVKLDGGDKKYSIGLDIGTNSVGWAVITDEYKVPSKKFKVLGNTDRHSIKKNLIGALLFDSGETAEATRLKRTARRRYTRRKNRICYLQEIFSNEMAKVDDSFFHRLEESFLVEEDKKHERHPIFGNIVDEVAYHEKYPTIYHLRKKLVDSTDKADLRLIYLALAHMIKFRGHFLIEGDLNPDNSDVDKLFIQLVQTYNQLFEENPINASGVDAKAILSARLSKSRRLENLIAQLPGEKKNGLFGNLIALSLGLTPNFKSNFDLAEDAKLQLSKDTYDDDLDNLLAQIGDQYADLFLAAKNLSDAILLSDILRVNTEITKAPLSASMIKRYDEHHQDLTLLKALVRQQLPEKYKEIFFDQSKNGYAGYIDGGASQEEFYKFIKPILEKMDGTEELLVKLNREDLLRKQRTFDNGSIPHQIHLGELHAILRRQEDFYPFLKDNREKIEKILTFRIPYYVGPLARGNSRFAWMTRKSEETITPWNFEEVVDKGASAQSFIERMTNFDKNLPNEKVLPKHSLLYEYFTVYNELTKVKYVTEGMRKPAFLSGEQKKAIVDLLFKTNRKVTVKQLKEDYFKKIECFDSVEISGVEDRFNASLGTYHDLLKIIKDKDFLDNEENEDILEDIVLTLTLFEDREMIEERLKTYAHLFDDKVMKQLKRRRYTGWGRLSRKLINGIRDKQSGKTILDFLKSDGFANRNFMQLIHDDSLTFKEDIQKAQVSGQGDSLHEHIANLAGSPAIKKGILQTVKVVDELVKVMGRHKPENIVIEMARENQTTQKGQKNSRERMKRIEEGIKELGSQILKEHPVENTQLQNEKLYLYYLQNGRDMYVDQELDINRLSDYDVDHIVPQSFLKDDSIDNKVLTRSDKARGKSDNVPSEEVVKKMKNYWRQLLNAKLITQRKFDNLTKAERGGLSELDKAGFIKRQLVETRQITKHVAQILDSRMNTKYDENDKLIREVKVITLKSKLVSDFRKDFQFYKVREINNYHHAHDAYLNAVVGTALIKKYPKLESEFVYGDYKVYDVRKMIAKSEQEIGKATAKYFFYSNIMNFFKTEITLANGEIRKRPLIETNGETGEIVWDKGRDFATVRKVLSMPQVNIVKKTEVQTGGFSKESILPKRNSDKLIARKKDWDPKKYGGFDSPTVAYSVLVVAKVEKGKSKKLKSVKELLGITIMERSSFEKNPIDFLEAKGYKEVKKDLIIKLPKYSLFELENGRKRMLASAGELQKGNELALPSKYVNFLYLASHYEKLKGSPEDNEQKQLFVEQHKHYLDEIIEQISEFSKRVILADANLDKVLSAYNKHRDKPIREQAENIIHLFTLTNLGAPAAFKYFDTTIDRKRYTSTKEVLDATLIHQSITGLYETRIDLSQLGGDGGGGSGGSGGSGGSGGSGGSGGLGIEDEYRLHETSTEPDVSLGSTWLSDFPQAWAETGGMGLAVRQAPLIIPLKATSTPVSIQQYPMSHEARLGIKPHIQRLLDQGILVPCQSPWNTPLLPVKKPGTNDYRPVQDLREVNKRVEDIHPTVPNPYNLLSGLPPSHQWYTVLDLKDAFFCLRLHPTSQPLFAFEWRDPGMGISGQLTWTRLPQGFKNSPTLFNEALHRDLADFRIQHPDLILLQYVDDILLAATSELDCQQGTRALLQTLGDLGYRASAKKAQICQKQVKYLGYLLREGQRWLTEARKETVMGQPVPKTPRQLREFLGKAGFCRLFIPGFAEMAAPLYPLTKPGTLFSWGPDQQKAYQEIKQALLTAPALGLPDLTKPFELFVDEKQGYAKGVLTQKLGPWRRPVAYLSKKLDPVAAGWPPCLRMVAAIAVLTKDAGKLTMGQPLVILAPHAVEALVKQPPDRWLSNARMTHYQAMLLDTDRVQFGPVVALNPATLLPLPEEGAPHDCLEILAETHGTRPDLTDQPIPDADHTWYTDGSSFLQEGQRKAGAAVTTETEVIWAGALPAGTSAQRAELIALTQALKMAEGKRLNVYTDSRYAFATAHIHGEIYRRRGWLTSEGREIKNKSEILALLKALFLPKRLSIIHCLGHQKGDSAEARGNRLADQAAREAAIKTPPDTSTLLIAGKRTADGSEFEKRTADGSEFESPKKKAKVE

SEQ ID NO: 4504 - protein, 2110 aa, synthetic construct
MPAAKRVKLDGGDKKYSIGLDIGTNSVGWAVITDEYKVPSKKFKVLGNTDRHSIKKNLIGALLFDSGETAEATRLKRTARRRYTRRKNRICYLQEIFSNEMAKVDDSFFHRLEESFLVEEDKKHERHPIFGNIVDEVAYHEKYPTIYHLRKKLVDSTDKADLRLIYLALAHMIKFRGHFLIEGDLNPDNSDVDKLFIQLVQTYNQLFEENPINASGVDAKAILSARLSKSRRLENLIAQLPGEKKNGLFGNLIALSLGLTPNFKSNFDLAEDAKLQLSKDTYDDDLDNLLAQIGDQYADLFLAAKNLSDAILLSDILRVNTEITKAPLSASMIKRYDEHHQDLTLLKALVRQQLPEKYKEIFFDQSKNGYAGYIDGGASQEEFYKFIKPILEKMDGTEELLVKLNREDLLRKQRTFDNGSIPHQIHLGELHAILRRQEDFYPFLKDNREKIEKILTFRIPYYVGPLARGNSRFAWMTRKSEETITPWNFEEVVDKGASAQSFIERMTNFDKNLPNEKVLPKHSLLYEYFTVYNELTKVKYVTEGMRKPAFLSGEQKKAIVDLLFKTNRKVTVKQLKEDYFKKIECFDSVEISGVEDRFNASLGTYHDLLKIIKDKDFLDNEENEDILEDIVLTLTLFEDREMIEERLKTYAHLFDDKVMKQLKRRRYTGWGRLSRKLINGIRDKQSGKTILDFLKSDGFANRNFMQLIHDDSLTFKEDIQKAQVSGQGDSLHEHIANLAGSPAIKKGILQTVKVVDELVKVMGRHKPENIVIEMARENQTTQKGQKNSRERMKRIEEGIKELGSQILKEHPVENTQLQNEKLYLYYLQNGRDMYVDQELDINRLSDYDVDHIVPQSFLKDDSIDNKVLTRSDKARGKSDNVPSEEVVKKMKNYWRQLLNAKLITQRKFDNLTKAERGGLSELDKAGFIKRQLVETRQITKHVAQILDSRMNTKYDENDKLIREVKVITLKSKLVSDFRKDFQFYKVREINNYHHAHDAYLNAVVGTALIKKYPKLESEFVYGDYKVYDVRKMIAKSEQEIGKATAKYFFYSNIMNFFKTEITLANGEIRKRPLIETNGETGEIVWDKGRDFATVRKVLSMPQVNIVKKTEVQTGGFSKESILPKRNSDKLIARKKDWDPKKYGGFDSPTVAYSVLVVAKVEKGKSKKLKSVKELLGITIMERSSFEKNPIDFLEAKGYKEVKKDLIIKLPKYSLFELENGRKRMLASAGELQKGNELALPSKYVNFLYLASHYEKLKGSPEDNEQKQLFVEQHKHYLDEIIEQISEFSKRVILADANLDKVLSAYNKHRDKPIREQAENIIHLFTLTNLGAPAAFKYFDTTIDRKRYTSTKEVLDATLIHQSITGLYETRIDLSQLGGDGGGGGGSGGGGSGGGGSGGGGSGGGGSGGTLNIEDEHRLHETSKEPDVSLGSTWLSDFPQAWAETGGMGLAVRQAPLIIPLKATSTPVSIKQYPMSQEARLGIKPHIQRLLDQGILVPCQSPWNTPLLPVKKPGTNDYRPVQDLREVNKRVEDIHPTVPNPYNLLSGLPPSHQWYTVLDLKDAFFCLRLHPTSQPLFAFEWRDPEMGISGQLTWTRLPQGFKNSPTLFNEALHRDLADFRIQHPDLILLQYVDDLLLAATSELDCQQGTRALLQTLGNLGYRASAKKAQICQKQVKYLGYLLKEGQRWLTEARKETVMGQPTPKTPRQLREFLGKAGFCRLFIPGFAEMAAPLYPLTKPGTLFNWGPDQQKAYQEIKQALLTAPALGLPDLTKPFELFVDEKQGYAKGVLTQKLGPWRRPVAYLSKKLDPVAAGWPPCLRMVAAIAVLTKDAGKLTMGQPLVILAPHAVEALVKQPPDRWLSNARMTHYQALLLDTDRVQFGPVVALNPATLLPLPEEGLQHNCLDILAEAHGTRPDLTDQPLPDADHTWYTDGSSLLQEGQRKAGAAVTTETEVIWAKALPAGTSAQRAELIALTQALKMAEGKKLNVYTDSRYAFATAHIHGEIYRRRGWLTSEGKEIKNKDEILALLKALFLPKRLSIIHCPGHQKGHSAEARGNRMADQAARKAAITETPDTSTLLAGKRTADGSEFEKRTADGSEFESPKKKAKVE

SEQ ID NO: 4505 - protein, 2094 aa, synthetic construct
MPAAKRVKLDGGDKKYSIGLDIGTNSVGWAVITDEYKVPSKKFKVLGNTDRHSIKKNLIGALLFDSGETAEATRLKRTARRRYTRRKNRICYLQEIFSNEMAKVDDSFFHRLEESFLVEEDKKHERHPIFGNIVDEVAYHEKYPTIYHLRKKLVDSTDKADLRLIYLALAHMIKFRGHFLIEGDLNPDNSDVDKLFIQLVQTYNQLFEENPINASGVDAKAILSARLSKSRRLENLIAQLPGEKKNGLFGNLIALSLGLTPNFKSNFDLAEDAKLQLSKDTYDDDLDNLLAQIGDQYADLFLAAKNLSDAILLSDILRVNTEITKAPLSASMIKRYDEHHQDLTLLKALVRQQLPEKYKEIFFDQSKNGYAGYIDGGASQEEFYKFIKPILEKMDGTEELLVKLNREDLLRKQRTFDNGSIPHQIHLGELHAILRRQEDFYPFLKDNREKIEKILTFRIPYYVGPLARGNSRFAWMTRKSEETITPWNFEEVVDKGASAQSFIERMTNFDKNLPNEKVLPKHSLLYEYFTVYNELTKVKYVTEGMRKPAFLSGEQKKAIVDLLFKTNRKVTVKQLKEDYFKKIECFDSVEISGVEDRFNASLGTYHDLLKIIKDKDFLDNEENEDILEDIVLTLTLFEDREMIEERLKTYAHLFDDKVMKQLKRRRYTGWGRLSRKLINGIRDKQSGKTILDFLKSDGFANRNFMQLIHDDSLTFKEDIQKAQVSGQGDSLHEHIANLAGSPAIKKGILQTVKVVDELVKVMGRHKPENIVIEMARENQTTQKGQKNSRERMKRIEEGIKELGSQILKEHPVENTQLQNEKLYLYYLQNGRDMYVDQELDINRLSDYDVDHIVPQSFLKDDSIDNKVLTRSDKARGKSDNVPSEEVVKKMKNYWRQLLNAKLITQRKFDNLTKAERGGLSELDKAGFIKRQLVETRQITKHVAQILDSRMNTKYDENDKLIREVKVITLKSKLVSDFRKDFQFYKVREINNYHHAHDAYLNAVVGTALIKKYPKLESEFVYGDYKVYDVRKMIAKSEQEIGKATAKYFFYSNIMNFFKTEITLANGEIRKRPLIETNGETGEIVWDKGRDFATVRKVLSMPQVNIVKKTEVQTGGFSKESILPKRNSDKLIARKKDWDPKKYGGFDSPTVAYSVLVVAKVEKGKSKKLKSVKELLGITIMERSSFEKNPIDFLEAKGYKEVKKDLIIKLPKYSLFELENGRKRMLASAGELQKGNELALPSKYVNFLYLASHYEKLKGSPEDNEQKQLFVEQHKHYLDEIIEQISEFSKRVILADANLDKVLSAYNKHRDKPIREQAENIIHLFTLTNLGAPAAFKYFDTTIDRKRYTSTKEVLDATLIHQSITGLYETRIDLSQLGGDGGGSSGSSGSSGGTLNIEDEHRLHETSKEPDVSLGSTWLSDFPQAWAETGGMGLAVRQAPLIIPLKATSTPVSIKQYPMSQEARLGIKPHIQRLLDQGILVPCQSPWNTPLLPVKKPGTNDYRPVQDLREVNKRVEDIHPTVPNPYNLLSGLPPSHQWYTVLDLKDAFFCLRLHPTSQPLFAFEWRDPEMGISGQLTWTRLPQGFKNSPTLFNEALHRDLADFRIQHPDLILLQYVDDLLLAATSELDCQQGTRALLQTLGNLGYRASAKKAQICQKQVKYLGYLLKEGQRWLTEARKETVMGQPTPKTPRQLREFLGTAGFCRLWIPGFAEMAAPLYPLTKPGTLFNWGPDQQKAYQEIKQALLTAPALGLPDLTKPFELFVDEKQGYAKGVLTQKLGPWRRPVAYLSKKLDPVAAGWPPCLRMVAAIAVLTKDAGKLTMGQPLVILAPHAVEALVKQPPDRWLSNARMTHYQALLLDTDRVQFGPVVALNPATLLPLPEEGLQHNCLDILAEAHGTRPDLTDQPLPDADHTWYTDGSSLLQEGQRKAGAAVTTETEVIWAKALPAGTSAQRAELIALTQALKMAEGKKLNVYTDSRYAFATAHIHGEIYRRRGWLTSEGKEIKNKDEILALLKALFLPKRLSIIHCPGHQKGHSAEARGNRMADQAARKAAITETPDTSTLLAGKRTADGSEFEKRTADGSEFESPKKKAKVE

SEQ ID NO: 4506 - protein, 2100 aa, synthetic construct
MPAAKRVKLDGGDKKYSIGLDIGTNSVGWAVITDEYKVPSKKFKVLGNTDRHSIKKNLIGALLFDSGETAEATRLKRTARRRYTRRKNRICYLQEIFSNEMAKVDDSFFHRLEESFLVEEDKKHERHPIFGNIVDEVAYHEKYPTIYHLRKKLVDSTDKADLRLIYLALAHMIKFRGHFLIEGDLNPDNSDVDKLFIQLVQTYNQLFEENPINASGVDAKAILSARLSKSRRLENLIAQLPGEKKNGLFGNLIALSLGLTPNFKSNFDLAEDAKLQLSKDTYDDDLDNLLAQIGDQYADLFLAAKNLSDAILLSDILRVNTEITKAPLSASMIKRYDEHHQDLTLLKALVRQQLPEKYKEIFFDQSKNGYAGYIDGGASQEEFYKFIKPILEKMDGTEELLVKLNREDLLRKQRTFDNGSIPHQIHLGELHAILRRQEDFYPFLKDNREKIEKILTFRIPYYVGPLARGNSRFAWMTRKSEETITPWNFEEVVDKGASAQSFIERMTNFDKNLPNEKVLPKHSLLYEYFTVYNELTKVKYVTEGMRKPAFLSGEQKKAIVDLLFKTNRKVTVKQLKEDYFKKIECFDSVEISGVEDRFNASLGTYHDLLKIIKDKDFLDNEENEDILEDIVLTLTLFEDREMIEERLKTYAHLFDDKVMKQLKRRRYTGWGRLSRKLINGIRDKQSGKTILDFLKSDGFANRNFMQLIHDDSLTFKEDIQKAQVSGQGDSLHEHIANLAGSPAIKKGILQTVKVVDELVKVMGRHKPENIVIEMARENQTTQKGQKNSRERMKRIEEGIKELGSQILKEHPVENTQLQNEKLYLYYLQNGRDMYVDQELDINRLSDYDVDHIVPQSFLKDDSIDNKVLTRSDKARGKSDNVPSEEVVKKMKNYWRQLLNAKLITQRKFDNLTKAERGGLSELDKAGFIKRQLVETRQITKHVAQILDSRMNTKYDENDKLIREVKVITLKSKLVSDFRKDFQFYKVREINNYHHAHDAYLNAVVGTALIKKYPKLESEFVYGDYKVYDVRKMIAKSEQEIGKATAKYFFYSNIMNFFKTEITLANGEIRKRPLIETNGETGEIVWDKGRDFATVRKVLSMPQVNIVKKTEVQTGGFSKESILPKRNSDKLIARKKDWDPKKYGGFDSPTVAYSVLVVAKVEKGKSKKLKSVKELLGITIMERSSFEKNPIDFLEAKGYKEVKKDLIIKLPKYSLFELENGRKRMLASAGELQKGNELALPSKYVNFLYLASHYEKLKGSPEDNEQKQLFVEQHKHYLDEIIEQISEFSKRVILADANLDKVLSAYNKHRDKPIREQAENIIHLFTLTNLGAPAAFKYFDTTIDRKRYTSTKEVLDATLIHQSITGLYETRIDLSQLGGDGGEAAAKEAAAKEAAAKGGTLNIEDEYRLHETSKEPDVPLGSTWLSDFPQAWAETGGMGLAVRQAPLIIPLKATSTPVSIKQYPMSQEARLGIKPHIQRLLDQGILVPCQSPWNTPLLPVKKPGTNDYRPVQDLREVNKRVEDIHPTVPNPYNLLSGLPPSHQWYTVLDLKDAFFCLRLHPTSQPLFAFEWRDPEMGISGQLTWTRLPQGFKNSPTLFNEALHRDLADFRIQHPDLILLQYVDDLLLAATSEQDCQRGTRALLQTLGNLGYRASAKKAQICQKQVKYLGYLLKEGQRWLTEARKETVMGQPTPKTPRQLREFLGKAGFCRLFIPGFAEMAAPLYPLTKPGTLFNWGPDQQKAYQEIKQALLTAPALGLPDLTKPFELFVDEKQGYAKGVLTQKLGPWRRPVAYLSKKLDPVAAGWPPCLRMVAAIAVLTKDAGKLTMGQPLVILAPHAVEALVKQPPDRWLSNARMTHYQAMLLDTDRVQFGPVVALNPATLLPLPEKEAPHDCLEILAETHGTRPDLTDQPIPDADYTWYTDGSSFLQEGQRRAGAAVTTETEVIWARALPAGTSAQRAELIALTQALKMAEGKKLNVYTDSRYAFATAHVHGEIYRRRGWLTSEGREIKNKNEILALLKALFLPKRLSIIHCPGHQKGNSAEARGNRMADQAAREAAMKAVLETSTLLAGKRTADGSEFEKRTADGSEFESPKKKAKVE

SEQ ID NO: 4507 - protein, 2110 aa, synthetic construct
MPAAKRVKLDGGDKKYSIGLDIGTNSVGWAVITDEYKVPSKKFKVLGNTDRHSIKKNLIGALLFDSGETAEATRLKRTARRRYTRRKNRICYLQEIFSNEMAKVDDSFFHRLEESFLVEEDKKHERHPIFGNIVDEVAYHEKYPTIYHLRKKLVDSTDKADLRLIYLALAHMIKFRGHFLIEGDLNPDNSDVDKLFIQLVQTYNQLFEENPINASGVDAKAILSARLSKSRRLENLIAQLPGEKKNGLFGNLIALSLGLTPNFKSNFDLAEDAKLQLSKDTYDDDLDNLLAQIGDQYADLFLAAKNLSDAILLSDILRVNTEITKAPLSASMIKRYDEHHQDLTLLKALVRQQLPEKYKEIFFDQSKNGYAGYIDGGASQEEFYKFIKPILEKMDGTEELLVKLNREDLLRKQRTFDNGSIPHQIHLGELHAILRRQEDFYPFLKDNREKIEKILTFRIPYYVGPLARGNSRFAWMTRKSEETITPWNFEEVVDKGASAQSFIERMTNFDKNLPNEKVLPKHSLLYEYFTVYNELTKVKYVTEGMRKPAFLSGEQKKAIVDLLFKTNRKVTVKQLKEDYFKKIECFDSVEISGVEDRFNASLGTYHDLLKIIKDKDFLDNEENEDILEDIVLTLTLFEDREMIEERLKTYAHLFDDKVMKQLKRRRYTGWGRLSRKLINGIRDKQSGKTILDFLKSDGFANRNFMQLIHDDSLTFKEDIQKAQVSGQGDSLHEHIANLAGSPAIKKGILQTVKVVDELVKVMGRHKPENIVIEMARENQTTQKGQKNSRERMKRIEEGIKELGSQILKEHPVENTQLQNEKLYLYYLQNGRDMYVDQELDINRLSDYDVDHIVPQSFLKDDSIDNKVLTRSDKARGKSDNVPSEEVVKKMKNYWRQLLNAKLITQRKFDNLTKAERGGLSELDKAGFIKRQLVETRQITKHVAQILDSRMNTKYDENDKLIREVKVITLKSKLVSDFRKDFQFYKVREINNYHHAHDAYLNAVVGTALIKKYPKLESEFVYGDYKVYDVRKMIAKSEQEIGKATAKYFFYSNIMNFFKTEITLANGEIRKRPLIETNGETGEIVWDKGRDFATVRKVLSMPQVNIVKKTEVQTGGFSKESILPKRNSDKLIARKKDWDPKKYGGFDSPTVAYSVLVVAKVEKGKSKKLKSVKELLGITIMERSSFEKNPIDFLEAKGYKEVKKDLIIKLPKYSLFELENGRKRMLASAGELQKGNELALPSKYVNFLYLASHYEKLKGSPEDNEQKQLFVEQHKHYLDEIIEQISEFSKRVILADANLDKVLSAYNKHRDKPIREQAENIIHLFTLTNLGAPAAFKYFDTTIDRKRYTSTKEVLDATLIHQSITGLYETRIDLSQLGGDGGEAAAKEAAAKEAAAKEAAAKEAAAKGGTLNIEDEYRLHETSKEPDVSLGSTWLSDFPQAWAETGGMGLAVRQAPLIIPLKATSTPVSIKQYPMSQEARLGIKPHIQRLLDQGILVPCQSPWNTPLLPVKKPGTNDYRPVQDLREVNKRVEDIHPTVPNPYNLLSGLPPSHQWYTVLDLKDAFFCLRLHPTSQPLFAFEWRDPEMGISGQLTWTRLPQGFKNSPTLFNEALHRDLAGFRIQHPDLILLQYVDDLLLAATSELDCQQGTRALLQTLGDLGYRASAKKAQICQKQVKYLGYLLKEGQRWLTEARKETVMGQPIPKTPRQLREFLGTAGFCRLWIPGFAEMAAPLYPLTKPGTLFNWGPDQQKAFQEIKQALLTAPALGLPDLTKPFELFVDEKQGYAKGVLTQKLGPWRRPVAYLSKKLDPVAAGWPPCLRMVAAIAVLTKDAGKLTMGQPLVILAPHAVEALVKQPPDRWLSNARMTHYQALLLDTDRVQFGPVVALNPATLLPLPEEGLQHDCLDILAEAHGTRSDLMDQPLPDADHTWYTDGSSFLQEGQRKAGAAVTTETEVIWARALPAGTSAQRAELIALTQALKMAEGKKLNVYTDSRYAFATAHIHGEIYRRRGWLTSEGKEIKNKDEILALLKALFLPKRLSIIHCPGHQKGNSAEARGNRMADQAAREVATRETPETSTLLAGKRTADGSEFEKRTADGSEFESPKKKAKVE

SEQ ID NO: 4508 - protein, 2112 aa, synthetic construct
MPAAKRVKLDGGDKKYSIGLDIGTNSVGWAVITDEYKVPSKKFKVLGNTDRHSIKKNLIGALLFDSGETAEATRLKRTARRRYTRRKNRICYLQEIFSNEMAKVDDSFFHRLEESFLVEEDKKHERHPIFGNIVDEVAYHEKYPTIYHLRKKLVDSTDKADLRLIYLALAHMIKFRGHFLIEGDLNPDNSDVDKLFIQLVQTYNQLFEENPINASGVDAKAILSARLSKSRRLENLIAQLPGEKKNGLFGNLIALSLGLTPNFKSNFDLAEDAKLQLSKDTYDDDLDNLLAQIGDQYADLFLAAKNLSDAILLSDILRVNTEITKAPLSASMIKRYDEHHQDLTLLKALVRQQLPEKYKEIFFDQSKNGYAGYIDGGASQEEFYKFIKPILEKMDGTEELLVKLNREDLLRKQRTFDNGSIPHQIHLGELHAILRRQEDFYPFLKDNREKIEKILTFRIPYYVGPLARGNSRFAWMTRKSEETITPWNFEEVVDKGASAQSFIERMTNFDKNLPNEKVLPKHSLLYEYFTVYNELTKVKYVTEGMRKPAFLSGEQKKAIVDLLFKTNRKVTVKQLKEDYFKKIECFDSVEISGVEDRFNASLGTYHDLLKIIKDKDFLDNEENEDILEDIVLTLTLFEDREMIEERLKTYAHLFDDKVMKQLKRRRYTGWGRLSRKLINGIRDKQSGKTILDFLKSDGFANRNFMQLIHDDSLTFKEDIQKAQVSGQGDSLHEHIANLAGSPAIKKGILQTVKVVDELVKVMGRHKPENIVIEMARENQTTQKGQKNSRERMKRIEEGIKELGSQILKEHPVENTQLQNEKLYLYYLQNGRDMYVDQELDINRLSDYDVDHIVPQSFLKDDSIDNKVLTRSDKARGKSDNVPSEEVVKKMKNYWRQLLNAKLITQRKFDNLTKAERGGLSELDKAGFIKRQLVETRQITKHVAQILDSRMNTKYDENDKLIREVKVITLKSKLVSDFRKDFQFYKVREINNYHHAHDAYLNAVVGTALIKKYPKLESEFVYGDYKVYDVRKMIAKSEQEIGKATAKYFFYSNIMNFFKTEITLANGEIRKRPLIETNGETGEIVWDKGRDFATVRKVLSMPQVNIVKKTEVQTGGFSKESILPKRNSDKLIARKKDWDPKKYGGFDSPTVAYSVLVVAKVEKGKSKKLKSVKELLGITIMERSSFEKNPIDFLEAKGYKEVKKDLIIKLPKYSLFELENGRKRMLASAGELQKGNELALPSKYVNFLYLASHYEKLKGSPEDNEQKQLFVEQHKHYLDEIIEQISEFSKRVILADANLDKVLSAYNKHRDKPIREQAENIIHLFTLTNLGAPAAFKYFDTTIDRKRYTSTKEVLDATLIHQSITGLYETRIDLSQLGGDGGPAPAPAPGGTLNIEDEYRLHETSKEPDVSLGSTWLSDFPQAWAETGGMGLAVRQAPLIIPLKATSTPVSIKQYPMSQEARLGIKPHIQRLLDQGILVPCQSPWNTPLLPVKKPGTNDYRPVQDLREVNKRVEDIHPTVPNPYNLLSGLPPSHQWYTVLDLKDAFFCLRLHPTSQPLFAFEWRDPEMGISGQLTWTRLPQGFKNSPTLFNEALHRDLADFRIQHPDLILLQYVDDLLLAATSELDCQQGTRALLQTLGNLGYRASAKKAQICQKQVKYLGYLLKEGQRWLTEARKETVMGQPTPKTPRQLREFLGKAGFCRLFIPGFAEMAAPLYPLTKPGTLFNWGPDQQKAYQEIKQALLTAPALGLPDLTKPFELFVDEKQGYAKGVLTQKLGPWRRPVAYLSKKLDPVAAGWPPCLRMVAAIAVLTKDAGKLTMGQPLVILAPHAVEALVKQPPDRWLSNARMTHYQALLLDTDRVQFGPVVALNPATLLPLPEEGLQHNCLDILAEAHGTRPDLTDQPLPDADHTWYTDGSSLLQEGQRKAGAAVTTETEVIWAKALPAGTSAQRAELIALTQALKMAEGKKLNVYTDSRYAFATAHIHGEIYRRRGWLTSEGKEIKNKDEILALLKALFLPKRLSIIHCPGHQKGHSAEARGNRMADQAARKAAITETPDTSTLLIENSSPSGGSKRTADGSEFEAGKRTADGSEFEKRTADGSEFESPKKKAKVE

SEQ ID NO: 4509 - protein, 2096 aa, synthetic construct
MPAAKRVKLDGGDKKYSIGLDIGTNSVGWAVITDEYKVPSKKFKVLGNTDRHSIKKNLIGALLFDSGETAEATRLKRTARRRYTRRKNRICYLQEIFSNEMAKVDDSFFHRLEESFLVEEDKKHERHPIFGNIVDEVAYHEKYPTIYHLRKKLVDSTDKADLRLIYLALAHMIKFRGHFLIEGDLNPDNSDVDKLFIQLVQTYNQLFEENPINASGVDAKAILSARLSKSRRLENLIAQLPGEKKNGLFGNLIALSLGLTPNFKSNFDLAEDAKLQLSKDTYDDDLDNLLAQIGDQYADLFLAAKNLSDAILLSDILRVNTEITKAPLSASMIKRYDEHHQDLTLLKALVRQQLPEKYKEIFFDQSKNGYAGYIDGGASQEEFYKFIKPILEKMDGTEELLVKLNREDLLRKQRTFDNGSIPHQIHLGELHAILRRQEDFYPFLKDNREKIEKILTFRIPYYVGPLARGNSRFAWMTRKSEETITPWNFEEVVDKGASAQSFIERMTNFDKNLPNEKVLPKHSLLYEYFTVYNELTKVKYVTEGMRKPAFLSGEQKKAIVDLLFKTNRKVTVKQLKEDYFKKIECFDSVEISGVEDRFNASLGTYHDLLKIIKDKDFLDNEENEDILEDIVLTLTLFEDREMIEERLKTYAHLFDDKVMKQLKRRRYTGWGRLSRKLINGIRDKQSGKTILDFLKSDGFANRNFMQLIHDDSLTFKEDIQKAQVSGQGDSLHEHIANLAGSPAIKKGILQTVKVVDELVKVMGRHKPENIVIEMARENQTTQKGQKNSRERMKRIEEGIKELGSQILKEHPVENTQLQNEKLYLYYLQNGRDMYVDQELDINRLSDYDVDHIVPQSFLKDDSIDNKVLTRSDKARGKSDNVPSEEVVKKMKNYWRQLLNAKLITQRKFDNLTKAERGGLSELDKAGFIKRQLVETRQITKHVAQILDSRMNTKYDENDKLIREVKVITLKSKLVSDFRKDFQFYKVREINNYHHAHDAYLNAVVGTALIKKYPKLESEFVYGDYKVYDVRKMIAKSEQEIGKATAKYFFYSNIMNFFKTEITLANGEIRKRPLIETNGETGEIVWDKGRDFATVRKVLSMPQVNIVKKTEVQTGGFSKESILPKRNSDKLIARKKDWDPKKYGGFDSPTVAYSVLVVAKVEKGKSKKLKSVKELLGITIMERSSFEKNPIDFLEAKGYKEVKKDLIIKLPKYSLFELENGRKRMLASAGELQKGNELALPSKYVNFLYLASHYEKLKGSPEDNEQKQLFVEQHKHYLDEIIEQISEFSKRVILADANLDKVLSAYNKHRDKPIREQAENIIHLFTLTNLGAPAAFKYFDTTIDRKRYTSTKEVLDATLIHQSITGLYETRIDLSQLGGDGGPAPAPAPAPAPAPGGVLNLEEEYRLHEKPVPSSIDPSWLQLFPTVWAERAGMGLANQVPPVVVELRSGASPVAVRQYPMSKEAREGIRPHIQRFLDLGVLVPCQSPWNTPLLPVKKPGTNDYRPVQDLREINKRVQDIHPTVPNPYNLLSSLPPSHTWYSVLDLKDAFFCLKLHPNSQPLFAFEWRDPEKGNTGQLTWTRLPQGFKNSPTLFNEALHRDLAPFRALNPQVVLLQYVDDLLVAAPTYRDCKEGTQKLLQELSKLGYRVSAKKAQLCQKEVTYLGYLLKEGKRWLTPARKATVMKIPPPTTPRQVREFLGTAGFCRLWIPGFASLAAPLYPLTKPSIPFIWTEEHQKAFDRIKEALLSAPALALPDLTKPFTLYVDERAGVARGVLTQTLGPWRRPVAYLSKKLDPVASGWPTCLKAVAAVALLLKDADKLTLGQNVTVIASHSLESIVRQPPDRWMTNARMTHYQSLLLNERVSFAPPAVLNPATLLPVESEATPVHRCSEILAEETGTRRDLKDQPLPGVPAWYTDGSSFIAEGKRRAGAAIVDGKRTVWASSLPEGTSAQKAELVALTQALRLAEGKDINIYTDSRYAFATAHIHGAIYKQRGWLTSAGKDIKNKEEILALLEAIHLPKRVAIIHCPGHQKGNDPVATGNRRADEAAKQAALSTRVLAETTKPAGKRTADGSEFEKRTADGSEFESPKKKAKVE

SEQ ID NO: 4510 - protein, 2098 aa, synthetic construct
MPAAKRVKLDGGDKKYSIGLDIGTNSVGWAVITDEYKVPSKKFKVLGNTDRHSIKKNLIGALLFDSGETAEATRLKRTARRRYTRRKNRICYLQEIFSNEMAKVDDSFFHRLEESFLVEEDKKHERHPIFGNIVDEVAYHEKYPTIYHLRKKLVDSTDKADLRLIYLALAHMIKFRGHFLIEGDLNPDNSDVDKLFIQLVQTYNQLFEENPINASGVDAKAILSARLSKSRRLENLIAQLPGEKKNGLFGNLIALSLGLTPNFKSNFDLAEDAKLQLSKDTYDDDLDNLLAQIGDQYADLFLAAKNLSDAILLSDILRVNTEITKAPLSASMIKRYDEHHQDLTLLKALVRQQLPEKYKEIFFDQSKNGYAGYIDGGASQEEFYKFIKPILEKMDGTEELLVKLNREDLLRKQRTFDNGSIPHQIHLGELHAILRRQEDFYPFLKDNREKIEKILTFRIPYYVGPLARGNSRFAWMTRKSEETITPWNFEEVVDKGASAQSFIERMTNFDKNLPNEKVLPKHSLLYEYFTVYNELTKVKYVTEGMRKPAFLSGEQKKAIVDLLFKTNRKVTVKQLKEDYFKKIECFDSVEISGVEDRFNASLGTYHDLLKIIKDKDFLDNEENEDILEDIVLTLTLFEDREMIEERLKTYAHLFDDKVMKQLKRRRYTGWGRLSRKLINGIRDKQSGKTILDFLKSDGFANRNFMQLIHDDSLTFKEDIQKAQVSGQGDSLHEHIANLAGSPAIKKGILQTVKVVDELVKVMGRHKPENIVIEMARENQTTQKGQKNSRERMKRIEEGIKELGSQILKEHPVENTQLQNEKLYLYYLQNGRDMYVDQELDINRLSDYDVDHIVPQSFLKDDSIDNKVLTRSDKARGKSDNVPSEEVVKKMKNYWRQLLNAKLITQRKFDNLTKAERGGLSELDKAGFIKRQLVETRQITKHVAQILDSRMNTKYDENDKLIREVKVITLKSKLVSDFRKDFQFYKVREINNYHHAHDAYLNAVVGTALIKKYPKLESEFVYGDYKVYDVRKMIAKSEQEIGKATAKYFFYSNIMNFFKTEITLANGEIRKRPLIETNGETGEIVWDKGRDFATVRKVLSMPQVNIVKKTEVQTGGFSKESILPKRNSDKLIARKKDWDPKKYGGFDSPTVAYSVLVVAKVEKGKSKKLKSVKELLGITIMERSSFEKNPIDFLEAKGYKEVKKDLIIKLPKYSLFELENGRKRMLASAGELQKGNELALPSKYVNFLYLASHYEKLKGSPEDNEQKQLFVEQHKHYLDEIIEQISEFSKRVILADANLDKVLSAYNKHRDKPIREQAENIIHLFTLTNLGAPAAFKYFDTTIDRKRYTSTKEVLDATLIHQSITGLYETRIDLSQLGGDGGPAPAPAPAPAPAPGGTLNIEDEYRLHETSKEPDVPLGSTWLSDFPQAWAETGGMGLAVRQAPLIIPLKATSTPVSIKQYPMSQEARLGIKPHIQRLLDQGILVPCQSPWNTPLLPVKKPGTNDYRPVQDLREVNKRVEDIHPTVPNPYNLLSGLPPSHQWYTVLDLKDAFFCLRLHPTSQPLFAFEWRDPEMGISGQLTWTRLPQGFKNSPTLFNEALHRDLADFRIQHPDLILLQYVDDLLLAATSEQDCQRGTRALLQTLGNLGYRASAKKAQICQKQVKYLGYLLKEGQRWLTEARKETVMGQPTPKTPRQLREFLGTAGFCRLWIPGFAEMAAPLYPLTKPGTLFNWGPDQQKAYQEIKQALLTAPALGLPDLTKPFELFVDEKQGYAKGVLTQKLGPWRRPVAYLSKKLDPVAAGWPPCLRMVAAIAVLTKDAGKLTMGQPLVILAPHAVEALVKQPPDRWLSNARMTHYQAMLLDTDRVQFGPVVALNPATLLPLPEKEAPHDCLEILAETHGTRPDLTDQPIPDADYTWYTDGSSFLQEGQRRAGAAVTTETEVIWARALPAGTSAQRAELIALTQALKMAEGKKLNVYTDSRYAFATAHVHGEIYRRRGWLTSEGREIKNKNEILALLKALFLPKRLSIIHCPGHQKGNSAEARGNRMADQAAREAAMKAVLETSTLLAGKRTADGSEFEKRTADGSEFESPKKKAKVE

SEQ ID NO: 4511 - protein, 2091 aa, synthetic construct
MPAAKRVKLDGGDKKYSIGLDIGTNSVGWAVITDEYKVPSKKFKVLGNTDRHSIKKNLIGALLFDSGETAEATRLKRTARRRYTRRKNRICYLQEIFSNEMAKVDDSFFHRLEESFLVEEDKKHERHPIFGNIVDEVAYHEKYPTIYHLRKKLVDSTDKADLRLIYLALAHMIKFRGHFLIEGDLNPDNSDVDKLFIQLVQTYNQLFEENPINASGVDAKAILSARLSKSRRLENLIAQLPGEKKNGLFGNLIALSLGLTPNFKSNFDLAEDAKLQLSKDTYDDDLDNLLAQIGDQYADLFLAAKNLSDAILLSDILRVNTEITKAPLSASMIKRYDEHHQDLTLLKALVRQQLPEKYKEIFFDQSKNGYAGYIDGGASQEEFYKFIKPILEKMDGTEELLVKLNREDLLRKQRTFDNGSIPHQIHLGELHAILRRQEDFYPFLKDNREKIEKILTFRIPYYVGPLARGNSRFAWMTRKSEETITPWNFEEVVDKGASAQSFIERMTNFDKNLPNEKVLPKHSLLYEYFTVYNELTKVKYVTEGMRKPAFLSGEQKKAIVDLLFKTNRKVTVKQLKEDYFKKIECFDSVEISGVEDRFNASLGTYHDLLKIIKDKDFLDNEENEDILEDIVLTLTLFEDREMIEERLKTYAHLFDDKVMKQLKRRRYTGWGRLSRKLINGIRDKQSGKTILDFLKSDGFANRNFMQLIHDDSLTFKEDIQKAQVSGQGDSLHEHIANLAGSPAIKKGILQTVKVVDELVKVMGRHKPENIVIEMARENQTTQKGQKNSRERMKRIEEGIKELGSQILKEHPVENTQLQNEKLYLYYLQNGRDMYVDQELDINRLSDYDVDHIVPQSFLKDDSIDNKVLTRSDKARGKSDNVPSEEVVKKMKNYWRQLLNAKLITQRKFDNLTKAERGGLSELDKAGFIKRQLVETRQITKHVAQILDSRMNTKYDENDKLIREVKVITLKSKLVSDFRKDFQFYKVREINNYHHAHDAYLNAVVGTALIKKYPKLESEFVYGDYKVYDVRKMIAKSEQEIGKATAKYFFYSNIMNFFKTEITLANGEIRKRPLIETNGETGEIVWDKGRDFATVRKVLSMPQVNIVKKTEVQTGGFSKESILPKRNSDKLIARKKDWDPKKYGGFDSPTVAYSVLVVAKVEKGKSKKLKSVKELLGITIMERSSFEKNPIDFLEAKGYKEVKKDLIIKLPKYSLFELENGRKRMLASAGELQKGNELALPSKYVNFLYLASHYEKLKGSPEDNEQKQLFVEQHKHYLDEIIEQISEFSKRVILADANLDKVLSAYNKHRDKPIREQAENIIHLFTLTNLGAPAAFKYFDTTIDRKRYTSTKEVLDATLIHQSITGLYETRIDLSQLGGDGGGGGGGSGGLGIEDEYRLHETSTEPDVSLGSTWLSDFPQAWAETGGMGLAVRQAPLIIPLKATSTPVSIQQYPMSHEARLGIKPHIQRLLDQGILVPCQSPWNTPLLPVKKPGTNDYRPVQDLREVNKRVEDIHPTVPNPYNLLSGLPPSHQWYTVLDLKDAFFCLRLHPTSQPLFAFEWRDPGMGISGQLTWTRLPQGFKNSPTLFNEALHRDLADFRIQHPDLILLQYVDDILLAATSELDCQQGTRALLQTLGDLGYRASAKKAQICQKQVKYLGYLLREGQRWLTEARKETVMGQPVPKTPRQLREFLGKAGFCRLFIPGFAEMAAPLYPLTKPGTLFSWGPDQQKAYQEIKQALLTAPALGLPDLTKPFELFVDEKQGYAKGVLTQKLGPWRRPVAYLSKKLDPVAAGWPPCLRMVAAIAVLTKDAGKLTMGQPLVILAPHAVEALVKQPPDRWLSNARMTHYQAMLLDTDRVQFGPVVALNPATLLPLPEEGAPHDCLEILAETHGTRPDLTDQPIPDADHTWYTDGSSFLQEGQRKAGAAVTTETEVIWAGALPAGTSAQRAELIALTQALKMAEGKRLNVYTDSRYAFATAHIHGEIYRRRGWLTSEGREIKNKSEILALLKALFLPKRLSIIHCLGHQKGDSAEARGNRLADQAAREAAIKTPPDTSTLLIAGKRTADGSEFEKRTADGSEFESPKKKAKVE

SEQ ID NO: 4512 - protein, 2093 aa, synthetic construct
MPAAKRVKLDGGDKKYSIGLDIGTNSVGWAVITDEYKVPSKKFKVLGNTDRHSIKKNLIGALLFDSGETAEATRLKRTARRRYTRRKNRICYLQEIFSNEMAKVDDSFFHRLEESFLVEEDKKHERHPIFGNIVDEVAYHEKYPTIYHLRKKLVDSTDKADLRLIYLALAHMIKFRGHFLIEGDLNPDNSDVDKLFIQLVQTYNQLFEENPINASGVDAKAILSARLSKSRRLENLIAQLPGEKKNGLFGNLIALSLGLTPNFKSNFDLAEDAKLQLSKDTYDDDLDNLLAQIGDQYADLFLAAKNLSDAILLSDILRVNTEITKAPLSASMIKRYDEHHQDLTLLKALVRQQLPEKYKEIFFDQSKNGYAGYIDGGASQEEFYKFIKPILEKMDGTEELLVKLNREDLLRKQRTFDNGSIPHQIHLGELHAILRRQEDFYPFLKDNREKIEKILTFRIPYYVGPLARGNSRFAWMTRKSEETITPWNFEEVVDKGASAQSFIERMTNFDKNLPNEKVLPKHSLLYEYFTVYNELTKVKYVTEGMRKPAFLSGEQKKAIVDLLFKTNRKVTVKQLKEDYFKKIECFDSVEISGVEDRFNASLGTYHDLLKIIKDKDFLDNEENEDILEDIVLTLTLFEDREMIEERLKTYAHLFDDKVMKQLKRRRYTGWGRLSRKLINGIRDKQSGKTILDFLKSDGFANRNFMQLIHDDSLTFKEDIQKAQVSGQGDSLHEHIANLAGSPAIKKGILQTVKVVDELVKVMGRHKPENIVIEMARENQTTQKGQKNSRERMKRIEEGIKELGSQILKEHPVENTQLQNEKLYLYYLQNGRDMYVDQELDINRLSDYDVDHIVPQSFLKDDSIDNKVLTRSDKARGKSDNVPSEEVVKKMKNYWRQLLNAKLITQRKFDNLTKAERGGLSELDKAGFIKRQLVETRQITKHVAQILDSRMNTKYDENDKLIREVKVITLKSKLVSDFRKDFQFYKVREINNYHHAHDAYLNAVVGTALIKKYPKLESEFVYGDYKVYDVRKMIAKSEQEIGKATAKYFFYSNIMNFFKTEITLANGEIRKRPLIETNGETGEIVWDKGRDFATVRKVLSMPQVNIVKKTEVQTGGFSKESILPKRNSDKLIARKKDWDPKKYGGFDSPTVAYSVLVVAKVEKGKSKKLKSVKELLGITIMERSSFEKNPIDFLEAKGYKEVKKDLIIKLPKYSLFELENGRKRMLASAGELQKGNELALPSKYVNFLYLASHYEKLKGSPEDNEQKQLFVEQHKHYLDEIIEQISEFSKRVILADANLDKVLSAYNKHRDKPIREQAENIIHLFTLTNLGAPAAFKYFDTTIDRKRYTSTKEVLDATLIHQSITGLYETRIDLSQLGGDGGEAAAKGSSGGLGIEDEYRLHETSTEPDVSLGSTWLSDFPQAWAETGGMGLAVRQAPLIIPLKATSTPVSIQQYPMSHEARLGIKPHIQRLLDQGILVPCQSPWNTPLLPVKKPGTNDYRPVQDLREVNKRVEDIHPTVPNPYNLLSGLPPSHQWYTVLDLKDAFFCLRLHPTSQPLFAFEWRDPGMGISGQLTWTRLPQGFKNSPTLFNEALHRDLADFRIQHPDLILLQYVDDILLAATSELDCQQGTRALLQTLGDLGYRASAKKAQICQKQVKYLGYLLREGQRWLTEARKETVMGQPVPKTPRQLREFLGKAGFCRLFIPGFAEMAAPLYPLTKPGTLFSWGPDQQKAYQEIKQALLTAPALGLPDLTKPFELFVDEKQGYAKGVLTQKLGPWRRPVAYLSKKLDPVAAGWPPCLRMVAAIAVLTKDAGKLTMGQPLVILAPHAVEALVKQPPDRWLSNARMTHYQAMLLDTDRVQFGPVVALNPATLLPLPEEGAPHDCLEILAETHGTRPDLTDQPIPDADHTWYTDGSSFLQEGQRKAGAAVTTETEVIWAGALPAGTSAQRAELIALTQALKMAEGKRLNVYTDSRYAFATAHIHGEIYRRRGWLTSEGREIKNKSEILALLKALFLPKRLSIIHCLGHQKGDSAEARGNRLADQAAREAAIKTPPDTSTLLIAGKRTADGSEFEKRTADGSEFESPKKKAKVE

SEQ ID NO: 4513 - protein, 2091 aa, synthetic construct
MPAAKRVKLDGGDKKYSIGLDIGTNSVGWAVITDEYKVPSKKFKVLGNTDRHSIKKNLIGALLFDSGETAEATRLKRTARRRYTRRKNRICYLQEIFSNEMAKVDDSFFHRLEESFLVEEDKKHERHPIFGNIVDEVAYHEKYPTIYHLRKKLVDSTDKADLRLIYLALAHMIKFRGHFLIEGDLNPDNSDVDKLFIQLVQTYNQLFEENPINASGVDAKAILSARLSKSRRLENLIAQLPGEKKNGLFGNLIALSLGLTPNFKSNFDLAEDAKLQLSKDTYDDDLDNLLAQIGDQYADLFLAAKNLSDAILLSDILRVNTEITKAPLSASMIKRYDEHHQDLTLLKALVRQQLPEKYKEIFFDQSKNGYAGYIDGGASQEEFYKFIKPILEKMDGTEELLVKLNREDLLRKQRTFDNGSIPHQIHLGELHAILRRQEDFYPFLKDNREKIEKILTFRIPYYVGPLARGNSRFAWMTRKSEETITPWNFEEVVDKGASAQSFIERMTNFDKNLPNEKVLPKHSLLYEYFTVYNELTKVKYVTEGMRKPAFLSGEQKKAIVDLLFKTNRKVTVKQLKEDYFKKIECFDSVEISGVEDRFNASLGTYHDLLKIIKDKDFLDNEENEDILEDIVLTLTLFEDREMIEERLKTYAHLFDDKVMKQLKRRRYTGWGRLSRKLINGIRDKQSGKTILDFLKSDGFANRNFMQLIHDDSLTFKEDIQKAQVSGQGDSLHEHIANLAGSPAIKKGILQTVKVVDELVKVMGRHKPENIVIEMARENQTTQKGQKNSRERMKRIEEGIKELGSQILKEHPVENTQLQNEKLYLYYLQNGRDMYVDQELDINRLSDYDVDHIVPQSFLKDDSIDNKVLTRSDKARGKSDNVPSEEVVKKMKNYWRQLLNAKLITQRKFDNLTKAERGGLSELDKAGFIKRQLVETRQITKHVAQILDSRMNTKYDENDKLIREVKVITLKSKLVSDFRKDFQFYKVREINNYHHAHDAYLNAVVGTALIKKYPKLESEFVYGDYKVYDVRKMIAKSEQEIGKATAKYFFYSNIMNFFKTEITLANGEIRKRPLIETNGETGEIVWDKGRDFATVRKVLSMPQVNIVKKTEVQTGGFSKESILPKRNSDKLIARKKDWDPKKYGGFDSPTVAYSVLVVAKVEKGKSKKLKSVKELLGITIMERSSFEKNPIDFLEAKGYKEVKKDLIIKLPKYSLFELENGRKRMLASAGELQKGNELALPSKYVNFLYLASHYEKLKGSPEDNEQKQLFVEQHKHYLDEIIEQISEFSKRVILADANLDKVLSAYNKHRDKPIREQAENIIHLFTLTNLGAPAAFKYFDTTIDRKRYTSTKEVLDATLIHQSITGLYETRIDLSQLGGDGGPAPGSSGGTLNIEDEHRLHETSKEPDVSLGSTWLSDFPQAWAETGGMGLAVRQAPLIIPLKATSTPVSIKQYPMSQEARLGIKPHIQRLLDQGILVPCQSPWNTPLLPVKKPGTNDYRPVQDLREVNKRVEDIHPTVPNPYNLLSGLPPSHQWYTVLDLKDAFFCLRLHPTSQPLFAFEWRDPEMGISGQLTWTRLPQGFKNSPTLFNEALHRDLADFRIQHPDLILLQYVDDLLLAATSELDCQQGTRALLQTLGNLGYRASAKKAQICQKQVKYLGYLLKEGQRWLTEARKETVMGQPTPKTPRQLREFLGKAGFCRLFIPGFAEMAAPLYPLTKPGTLFNWGPDQQKAYQEIKQALLTAPALGLPDLTKPFELFVDEKQGYAKGVLTQKLGPWRRPVAYLSKKLDPVAAGWPPCLRMVAAIAVLTKDAGKLTMGQPLVILAPHAVEALVKQPPDRWLSNARMTHYQALLLDTDRVQFGPVVALNPATLLPLPEEGLQHNCLDILAEAHGTRPDLTDQPLPDADHTWYTDGSSLLQEGQRKAGAAVTTETEVIWAKALPAGTSAQRAELIALTQALKMAEGKKLNVYTDSRYAFATAHIHGEIYRRRGWLTSEGKEIKNKDEILALLKALFLPKRLSIIHCPGHQKGHSAEARGNRMADQAARKAAITETPDTSTLLAGKRTADGSEFEKRTADGSEFESPKKKAKVE

SEQ ID NO: 4514 - protein, 2091 aa, synthetic construct; identical to SEQ ID NO: 4513

SEQ ID NO: 4515 - protein, 2091 aa, synthetic construct
MPAAKRVKLDGGDKKYSIGLDIGTNSVGWAVITDEYKVPSKKFKVLGNTDRHSIKKNLIGALLFDSGETAEATRLKRTARRRYTRRKNRICYLQEIFSNEMAKVDDSFFHRLEESFLVEEDKKHERHPIFGNIVDEVAYHEKYPTIYHLRKKLVDSTDKADLRLIYLALAHMIKFRGHFLIEGDLNPDNSDVDKLFIQLVQTYNQLFEENPINASGVDAKAILSARLSKSRRLENLIAQLPGEKKNGLFGNLIALSLGLTPNFKSNFDLAEDAKLQLSKDTYDDDLDNLLAQIGDQYADLFLAAKNLSDAILLSDILRVNTEITKAPLSASMIKRYDEHHQDLTLLKALVRQQLPEKYKEIFFDQSKNGYAGYIDGGASQEEFYKFIKPILEKMDGTEELLVKLNREDLLRKQRTFDNGSIPHQIHLGELHAILRRQEDFYPFLKDNREKIEKILTFRIPYYVGPLARGNSRFAWMTRKSEETITPWNFEEVVDKGASAQSFIERMTNFDKNLPNEKVLPKHSLLYEYFTVYNELTKVKYVTEGMRKPAFLSGEQKKAIVDLLFKTNRKVTVKQLKEDYFKKIECFDSVEISGVEDRFNASLGTYHDLLKIIKDKDFLDNEENEDILEDIVLTLTLFEDREMIEERLKTYAHLFDDKVMKQLKRRRYTGWGRLSRKLINGIRDKQSGKTILDFLKSDGFANRNFMQLIHDDSLTFKEDIQKAQVSGQGDSLHEHIANLAGSPAIKKGILQTVKVVDELVKVMGRHKPENIVIEMARENQTTQKGQKNSRERMKRIEEGIKELGSQILKEHPVENTQLQNEKLYLYYLQNGRDMYVDQELDINRLSDYDVDHIVPQSFLKDDSIDNKVLTRSDKARGKSDNVPSEEVVKKMKNYWRQLLNAKLITQRKFDNLTKAERGGLSELDKAGFIKRQLVETRQITKHVAQILDSRMNTKYDENDKLIREVKVITLKSKLVSDFRKDFQFYKVREINNYHHAHDAYLNAVVGTALIKKYPKLESEFVYGDYKVYDVRKMIAKSEQEIGKATAKYFFYSNIMNFFKTEITLANGEIRKRPLIETNGETGEIVWDKGRDFATVRKVLSMPQVNIVKKTEVQTGGFSKESILPKRNSDKLIARKKDWDPKKYGGFDSPTVAYSVLVVAKVEKGKSKKLKSVKELLGITIMERSSFEKNPIDFLEAKGYKEVKKDLIIKLPKYSLFELENGRKRMLASAGELQKGNELALPSKYVNFLYLASHYEKLKGSPEDNEQKQLFVEQHKHYLDEIIEQISEFSKRVILADANLDKVLSAYNKHRDKPIREQAENIIHLFTLTNLGAPAAFKYFDTTIDRKRYTSTKEVLDATLIHQSITGLYETRIDLSQLGGDGGEAAAKPAPGGVLNLEEEYRLHEKPVPSSIDPSWLQLFPTVWAERAGMGLANQVPPVVVELRSGASPVAVRQYPMSKEAREGIRPHIQRFLDLGVLVPCQSPWNTPLLPVKKPGTNDYRPVQDLREINKRVQDIHPTVPNPYNLLSSLPPSHTWYSVLDLKDAFFCLKLHPNSQPLFAFEWRDPEKGNTGQLTWTRLPQGFKNSPTLFNEALHRDLAPFRALNPQVVLLQYVDDLLVAAPTYRDCKEGTQKLLQELSKLGYRVSAKKAQLCQKEVTYLGYLLKEGKRWLTPARKATVMKIPPPTTPRQVREFLGKAGFCRLFIPGFASLAAPLYPLTKPSIPFIWTEEHQKAFDRIKEALLSAPALALPDLTKPFTLYVDERAGVARGVLTQTLGPWRRPVAYLSKKLDPVASGWPTCLKAVAAVALLLKDADKLTLGQNVTVIASHSLESIVRQPPDRWMTNARMTHYQSLLLNERVSFAPPAVLNPATLLPVESEATPVHRCSEILAEETGTRRDLKDQPLPGVPAWYTDGSSFIAEGKRRAGAAIVDGKRTVWASSLPEGTSAQKAELVALTQALRLAEGKDINIYTDSRYAFATAHIHGAIYKQRGWLTSAGKDIKNKEEILALLEAIHLPKRVAIIHCPGHQKGNDPVATGNRRADEAAKQAALSTRVLAETTKPAGKRTADGSEFEKRTADGSEFESPKKKAKVE

SEQ ID NO: 4516 - protein, 2093 aa, synthetic construct
MPAAKRVKLDGGDKKYSIGLDIGTNSVGWAVITDEYKVPSKKFKVLGNTDRHSIKKNLIGALLFDSGETAEATRLKRTARRRYTRRKNRICYLQEIFSNEMAKVDDSFFHRLEESFLVEEDKKHERHPIFGNIVDEVAYHEKYPTIYHLRKKLVDSTDKADLRLIYLALAHMIKFRGHFLIEGDLNPDNSDVDKLFIQLVQTYNQLFEENPINASGVDAKAILSARLSKSRRLENLIAQLPGEKKNGLFGNLIALSLGLTPNFKSNFDLAEDAKLQLSKDTYDDDLDNLLAQIGDQYADLFLAAKNLSDAILLSDILRVNTEITKAPLSASMIKRYDEHHQDLTLLKALVRQQLPEKYKEIFFDQSKNGYAGYIDGGASQEEFYKFIKPILEKMDGTEELLVKLNREDLLRKQRTFDNGSIPHQIHLGELHAILRRQEDFYPFLKDNREKIEKILTFRIPYYVGPLARGNSRFAWMTRKSEETITPWNFEEVVDKGASAQSFIERMTNFDKNLPNEKVLPKHSLLYEYFTVYNELTKVKYVTEGMRKPAFLSGEQKKAIVDLLFKTNRKVTVKQLKEDYFKKIECFDSVEISGVEDRFNASLGTYHDLLKIIKDKDFLDNEENEDILEDIVLTLTLFEDREMIEERLKTYAHLFDDKVMKQLKRRRYTGWGRLSRKLINGIRDKQSGKTILDFLKSDGFANRNFMQLIHDDSLTFKEDIQKAQVSGQGDSLHEHIANLAGSPAIKKGILQTVKVVDELVKVMGRHKPENIVIEMARENQTTQKGQKNSRERMKRIEEGIKELGSQILKEHPVENTQLQNEKLYLYYLQNGRDMYVDQELDINRLSDYDVDHIVPQSFLKDDSIDNKVLTRSDKARGKSDNVPSEEVVKKMKNYWRQLLNAKLITQRKFDNLTKAERGGLSELDKAGFIKRQLVETRQITKHVAQILDSRMNTKYDENDKLIREVKVITLKSKLVSDFRKDFQFYKVREINNYHHAHDAYLNAVVGTALIKKYPKLESEFVYGDYKVYDVRKMIAKSEQEIGKATAKYFFYSNIMNFFKTEITLANGEIRKRPLIETNGETGEIVWDKGRDFATVRKVLSMPQVNIVKKTEVQTGGFSKESILPKRNSDKLIARKKDWDPKKYGGFDSPTVAYSVLVVAKVEKGKSKKLKSVKELLGITIMERSSFEKNPIDFLEAKGYKEVKKDLIIKLPKYSLFELENGRKRMLASAGELQKGNELALPSKYVNFLYLASHYEKLKGSPEDNEQKQLFVEQHKHYLDEIIEQISEFSKRVILADANLDKVLSAYNKHRDKPIREQAENIIHLFTLTNLGAPAAFKYFDTTIDRKRYTSTKEVLDATLIHQSITGLYETRIDLSQLGGDGGPAPEAAAKGGLGIEDEYRLHETSTEPDVSLGSTWLSDFPQAWAETGGMGLAVRQAPLIIPLKATSTPVSIQQYPMSHEARLGIKPHIQRLLDQGILVPCQSPWNTPLLPVKKPGTNDYRPVQDLREVNKRVEDIHPTVPNPYNLLSGLPPSHQWYTVLDLKDAFFCLRLHPTSQPLFAFEWRDPGMGISGQLTWTRLPQGFKNSPTLFNEALHRDLADFRIQHPDLILLQYVDDILLAATSELDCQQGTRALLQTLGDLGYRASAKKAQICQKQVKYLGYLLREGQRWLTEARKETVMGQPVPKTPRQLREFLGKAGFCRLFIPGFAEMAAPLYPLTKPGTLFSWGPDQQKAYQEIKQALLTAPALGLPDLTKPFELFVDEKQGYAKGVLTQKLGPWRRPVAYLSKKLDPVAAGWPPCLRMVAAIAVLTKDAGKLTMGQPLVILAPHAVEALVKQPPDRWLSNARMTHYQAMLLDTDRVQFGPVVALNPATLLPLPEEGAPHDCLEILAETHGTRPDLTDQPIPDADHTWYTDGSSFLQEGQRKAGAAVTTETEVIWAGALPAGTSAQRAELIALTQALKMAEGKRLNVYTDSRYAFATAHIHGEIYRRRGWLTSEGREIKNKSEILALLKALFLPKRLSIIHCLGHQKGDSAEARGNRLADQAAREAAIKTPPDTSTLLIAGKRTADGSEFEKRTADGSEFESPKKKAKVE

SEQ ID NO: 4517 - protein, 2094 aa, synthetic construct
MPAAKRVKLDGGDKKYSIGLDIGTNSVGWAVITDEYKVPSKKFKVLGNTDRHSIKKNLIGALLFDSGETAEATRLKRTARRRYTRRKNRICYLQEIFSNEMAKVDDSFFHRLEESFLVEEDKKHERHPIFGNIVDEVAYHEKYPTIYHLRKKLVDSTDKADLRLIYLALAHMIKFRGHFLIEGDLNPDNSDVDKLFIQLVQTYNQLFEENPINASGVDAKAILSARLSKSRRLENLIAQLPGEKKNGLFGNLIALSLGLTPNFKSNFDLAEDAKLQLSKDTYDDDLDNLLAQIGDQYADLFLAAKNLSDAILLSDILRVNTEITKAPLSASMIKRYDEHHQDLTLLKALVRQQLPEKYKEIFFDQSKNGYAGYIDGGASQEEFYKFIKPILEKMDGTEELLVKLNREDLLRKQRTFDNGSIPHQIHLGELHAILRRQEDFYPFLKDNREKIEKILTFRIPYYVGPLARGNSRFAWMTRKSEETITPWNFEEVVDKGASAQSFIERMTNFDKNLPNEKVLPKHSLLYEYFTVYNELTKVKYVTEGMRKPAFLSGEQKKAIVDLLFKTNRKVTVKQLKEDYFKKIECFDSVEISGVEDRFNASLGTYHDLLKIIKDKDFLDNEENEDILEDIVLTLTLFEDREMIEERLKTYAHLFDDKVMKQLKRRRYTGWGRLSRKLINGIRDKQSGKTILDFLKSDGFANRNFMQLIHDDSLTFKEDIQKAQVSGQGDSLHEHIANLAGSPAIKKGILQTVKVVDELVKVMGRHKPENIVIEMARENQTTQKGQKNSRERMKRIEEGIKELGSQILKEHPVENTQLQNEKLYLYYLQNGRDMYVDQELDINRLSDYDVDHIVPQSFLKDDSIDNKVLTRSDKARGKSDNVPSEEVVKKMKNYWRQLLNAKLITQRKFDNLTKAERGGLSELDKAGFIKRQLVETRQITKHVAQILDSRMNTKYDENDKLIREVKVITLKSKLVSDFRKDFQFYKVREINNYHHAHDAYLNAVVGTALIKKYPKLESEFVYGDYKVYDVRKMIAKSEQEIGKATAKYFFYSNIMNFFKTEITLANGEIRKRPLIETNGETGEIVWDKGRDFATVRKVLSMPQVNIVKKTEVQTGGFSKESILPKRNSDKLIARKKDWDPKKYGGFDSPTVAYSVLVVAKVEKGKSKKLKSVKELLGITIMERSSFEKNPIDFLEAKGYKEVKKDLIIKLPKYSLFELENGRKRMLASAGELQKGNELALPSKYVNFLYLASHYEKLKGSPEDNEQKQLFVEQHKHYLDEIIEQISEFSKRVILADANLDKVLSAYNKHRDKPIREQAENIIHLFTLTNLGAPAAFKYFDTTIDRKRYTSTKEVLDATLIHQSITGLYETRIDLSQLGGDGGGSSGGGGGSGGLGIEDEYRLHETSTEPDVSLGSTWLSDFPQAWAETGGMGLAVRQAPLIIPLKATSTPVSIQQYPMSHEARLGIKPHIQRLLDQGILVPCQSPWNTPLLPVKKPGTNDYRPVQDLREVNKRVEDIHPTVPNPYNLLSGLPPSHQWYTVLDLKDAFFCLRLHPTSQPLFAFEWRDPGMGISGQLTWTRLPQGFKNSPTLFNEALHRDLADFRIQHPDLILLQYVDDILLAATSELDCQQGTRALLQTLGDLGYRASAKKAQICQKQVKYLGYLLREGQRWLTEARKETVMGQPVPKTPRQLREFLGKAGFCRLFIPGFAEMAAPLYPLTKPGTLFSWGPDQQKAYQEIKQALLTAPALGLPDLTKPFELFVDEKQGYAKGVLTQKLGPWRRPVAYLSKKLDPVAAGWPPCLRMVAAIAVLTKDAGKLTMGQPLVILAPHAVEALVKQPPDRWLSNARMTHYQAMLLDTDRVQFGPVVALNPATLLPLPEEGAPHDCLEILAETHGTRPDLTDQPIPDADHTWYTDGSSFLQEGQRKAGAAVTTETEVIWAGALPAGTSAQRAELIALTQALKMAEGKRLNVYTDSRYAFATAHIHGEIYRRRGWLTSEGREIKNKSEILALLKALFLPKRLSIIHCLGHQKGDSAEARGNRLADQAAREAAIKTPPDTSTLLIAGKRTADGSEFEKRTADGSEFESPKKKAKVE

SEQ ID NO: 4518 - protein, 2094 aa, synthetic construct
MPAAKRVKLDGGDKKYSIGLDIGTNSVGWAVITDEYKVPSKKFKVLGNTDRHSIKKNLIGALLFDSGETAEATRLKRTARRRYTRRKNRICYLQEIFSNEMAKVDDSFFHRLEESFLVEEDKKHERHPIFGNIVDEVAYHEKYPTIYHLRKKLVDSTDKADLRLIYLALAHMIKFRGHFLIEGDLNPDNSDVDKLFIQLVQTYNQLFEENPINASGVDAKAILSARLSKSRRLENLIAQLPGEKKNGLFGNLIALSLGLTPNFKSNFDLAEDAKLQLSKDTYDDDLDNLLAQIGDQYADLFLAAKNLSDAILLSDILRVNTEITKAPLSASMIKRYDEHHQDLTLLKALVRQQLPEKYKEIFFDQSKNGYAGYIDGGASQEEFYKFIKPILEKMDGTEELLVKLNREDLLRKQRTFDNGSIPHQIHLGELHAILRRQEDFYPFLKDNREKIEKILTFRIPYYVGPLARGNSRFAWMTRKSEETITPWNFEEVVDKGASAQSFIERMTNFDKNLPNEKVLPKHSLLYEYFTVYNELTKVKYVTEGMRKPAFLSGEQKKAIVDLLFKTNRKVTVKQLKEDYFKKIECFDSVEISGVEDRFNASLGTYHDLLKIIKDKDFLDNEENEDILEDIVLTLTLFEDREMIEERLKTYAHLFDDKVMKQLKRRRYTGWGRLSRKLINGIRDKQSGKTILDFLKSDGFANRNFMQLIHDDSLTFKEDIQKAQVSGQGDSLHEHIANLAGSPAIKKGILQTVKVVDELVKVMGRHKPENIVIEMARENQTTQKGQKNSRERMKRIEEGIKELGSQILKEHPVENTQLQNEKLYLYYLQNGRDMYVDQELDINRLSDYDVDHIVPQSFLKDDSIDNKVLTRSDKARGKSDNVPSEEVVKKMKNYWRQLLNAKLITQRKFDNLTKAERGGLSELDKAGFIKRQLVETRQITKHVAQILDSRMNTKYDENDKLIREVKVITLKSKLVSDFRKDFQFYKVREINNYHHAHDAYLNAVVGTALIKKYPKLESEFVYGDYKVYDVRKMIAKSEQEIGKATAKYFFYSNIMNFFKTEITLANGEIRKRPLIETNGETGEIVWDKGRDFATVRKVLSMPQVNIVKKTEVQTGGFSKESILPKRNSDKLIARKKDWDPKKYGGFDSPTVAYSVLVVAKVEKGKSKKLKSVKELLGITIMERSSFEKNPIDFLEAKGYKEVKKDLIIKLPKYSLFELENGRKRMLASAGELQKGNELALPSKYVNFLYLASHYEKLKGSPEDNEQKQLFVEQHKHYLDEIIEQISEFSKRVILADANLDKVLSAYNKHRDKPIREQAENIIHLFTLTNLGAPAAFKYFDTTIDRKRYTSTKEVLDATLIHQSITGLYETRIDLSQLGGDGGGSSGGGGGSGGTLNIEDEYRLHETSKEPDVPLGSTWLSDFPQAWAETGGMGLAVRQAPLIIPLKATSTPVSIKQYPMSQEARLGIKPHIQRLLDQGILVPCQSPWNTPLLPVKKPGTNDYRPVQDLREVNKRVEDIHPTVPNPYNLLSGLPPSHQWYTVLDLKDAFFCLRLHPTSQPLFAFEWRDPEMGISGQLTWTRLPQGFKNSPTLFNEALHRDLADFRIQHPDLILLQYVDDLLLAATSEQDCQRGTRALLQTLGNLGYRASAKKAQICQKQVKYLGYLLKEGQRWLTEARKETVMGQPTPKTPRQLREFLGKAGFCRLFIPGFAEMAAPLYPLTKPGTLFNWGPDQQKAYQEIKQALLTAPALGLPDLTKPFELFVDEKQGYAKGVLTQKLGPWRRPVAYLSKKLDPVAAGWPPCLRMVAAIAVLTKDAGKLTMGQPLVILAPHAVEALVKQPPDRWLSNARMTHYQAMLLDTDRVQFGPVVALNPATLLPLPEKEAPHDCLEILAETHGTRPDLTDQPIPDADYTWYTDGSSFLQEGQRRAGAAVTTETEVIWARALPAGTSAQRAELIALTQALKMAEGKKLNVYTDSRYAFATAHVHGEIYRRRGWLTSEGREIKNKNEILALLKALFLPKRLSIIHCPGHQKGNSAEARGNRMADQAAREAAMKAVLETSTLLAGKRTADGSEFEKRTADGSEFESPKKKAKVE

SEQ ID NO: 4519 - protein, 2096 aa, synthetic construct
MPAAKRVKLDGGDKKYSIGLDIGTNSVGWAVITDEYKVPSKKFKVLGNTDRHSIKKNLIGALLFDSGETAEATRLKRTARRRYTRRKNRICYLQEIFSNEMAKVDDSFFHRLEESFLVEEDKKHERHPIFGNIVDEVAYHEKYPTIYHLRKKLVDSTDKADLRLIYLALAHMIKFRGHFLIEGDLNPDNSDVDKLFIQLVQTYNQLFEENPINASGVDAKAILSARLSKSRRLENLIAQLPGEKKNGLFGNLIALSLGLTPNFKSNFDLAEDAKLQLSKDTYDDDLDNLLAQIGDQYADLFLAAKNLSDAILLSDILRVNTEITKAPLSASMIKRYDEHHQDLTLLKALVRQQLPEKYKEIFFDQSKNGYAGYIDGGASQEEFYKFIKPILEKMDGTEELLVKLNREDLLRKQRTFDNGSIPHQIHLGELHAILRRQEDFYPFLKDNREKIEKILTFRIPYYVGPLARGNSRFAWMTRKSEETITPWNFEEVVDKGASAQSFIERMTNFDKNLPNEKVLPKHSLLYEYFTVYNELTKVKYVTEGMRKPAFLSGEQKKAIVDLLFKTNRKVTVKQLKEDYFKKIECFDSVEISGVEDRFNASLGTYHDLLKIIKDKDFLDNEENEDILEDIVLTLTLFEDREMIEERLKTYAHLFDDKVMKQLKRRRYTGWGRLSRKLINGIRDKQSGKTILDFLKSDGFANRNFMQLIHDDSLTFKEDIQKAQVSGQGDSLHEHIANLAGSPAIKKGILQTVKVVDELVKVMGRHKPENIVIEMARENQTTQKGQKNSRERMKRIEEGIKELGSQILKEHPVENTQLQNEKLYLYYLQNGRDMYVDQELDINRLSDYDVDHIVPQSFLKDDSIDNKVLTRSDKARGKSDNVPSEEVVKKMKNYWRQLLNAKLITQRKFDNLTKAERGGLSELDKAGFIKRQLVETRQITKHVAQILDSRMNTKYDENDKLIREVKVITLKSKLVSDFRKDFQFYKVREINNYHHAHDAYLNAVVGTALIKKYPKLESEFVYGDYKVYDVRKMIAKSEQEIGKATAKYFFYSNIMNFFKTEITLANGEIRKRPLIETNGETGEIVWDKGRDFATVRKVLSMPQVNIVKKTEVQTGGFSKESILPKRNSDKLIARKKDWDPKKYGGFDSPTVAYSVLVVAKVEKGKSKKLKSVKELLGITIMERSSFEKNPIDFLEAKGYKEVKKDLIIKLPKYSLFELENGRKRMLASAGELQKGNELALPSKYVNFLYLASHYEKLKGSPEDNEQKQLFVEQHKHYLDEIIEQISEFSKRVILADANLDKVLSAYNKHRDKPIREQAENIIHLFTLTNLGAPAAFKYFDTTIDRKRYTSTKEVLDATLIHQSITGLYETRIDLSQLGGDGGGGGGGSEAAAKGGTLNIEDEYRLHETSKEPDVPLGSTWLSDFPQAWAETGGMGLAVRQAPLIIPLKATSTPVSIKQYPMSQEARLGIKPHIQRLLDQGILVPCQSPWNTPLLPVKKPGTNDYRPVQDLREVNKRVEDIHPTVPNPYNLLSGLPPSHQWYTVLDLKDAFFCLRLHPTSQPLFAFEWRDPEMGISGQLTWTRLPQGFKNSPTLFNEALHRDLADFRIQHPDLILLQYVDDLLLAATSEQDCQRGTRALLQTLGNLGYRASAKKAQICQKQVKYLGYLLKEGQRWLTEARKETVMGQPTPKTPRQLREFLGKAGFCRLFIPGFAEMAAPLYPLTKPGTLFNWGPDQQKAYQEIKQALLTAPALGLPDLTKPFELFVDEKQGYAKGVLTQKLGPWRRPVAYLSKKLDPVAAGWPPCLRMVAAIAVLTKDAGKLTMGQPLVILAPHAVEALVKQPPDRWLSNARMTHYQAMLLDTDRVQFGPVVALNPATLLPLPEKEAPHDCLEILAETHGTRPDLTDQPIPDADYTWYTDGSSFLQEGQRRAGAAVTTETEVIWARALPAGTSAQRAELIALTQALKMAEGKKLNVYTDSRYAFATAHVHGEIYRRRGWLTSEGREIKNKNEILALLKALFLPKRLSIIHCPGHQKGNSAEARGNRMADQAAREAAMKAVLETSTLLAGKRTADGSEFEKRTADGSEFESPKKKAKVE

SEQ ID NO: 4520 - protein, 2094 aa, synthetic construct
MPAAKRVKLDGGDKKYSIGLDIGTNSVGWAVITDEYKVPSKKFKVLGNTDRHSIKKNLIGALLFDSGETAEATRLKRTARRRYTRRKNRICYLQEIFSNEMAKVDDSFFHRLEESFLVEEDKKHERHPIFGNIVDEVAYHEKYPTIYHLRKKLVDSTDKADLRLIYLALAHMIKFRGHFLIEGDLNPDNSDVDKLFIQLVQTYNQLFEENPINASGVDAKAILSARLSKSRRLENLIAQLPGEKKNGLFGNLIALSLGLTPNFKSNFDLAEDAKLQLSKDTYDDDLDNLLAQIGDQYADLFLAAKNLSDAILLSDILRVNTEITKAPLSASMIKRYDEHHQDLTLLKALVRQQLPEKYKEIFFDQSKNGYAGYIDGGASQEEFYKFIKPILEKMDGTEELLVKLNREDLLRKQRTFDNGSIPHQIHLGELHAILRRQEDFYPFLKDNREKIEKILTFRIPYYVGPLARGNSRFAWMTRKSEETITPWNFEEVVDKGASAQSFIERMTNFDKNLPNEKVLPKHSLLYEYFTVYNELTKVKYVTEGMRKPAFLSGEQKKAIVDLLFKTNRKVTVKQLKEDYFKKIECFDSVEISGVEDRFNASLGTYHDLLKIIKDKDFLDNEENEDILEDIVLTLTLFEDREMIEERLKTYAHLFDDKVMKQLKRRRYTGWGRLSRKLINGIRDKQSGKTILDFLKSDGFANRNFMQLIHDDSLTFKEDIQKAQVSGQGDSLHEHIANLAGSPAIKKGILQTVKVVDELVKVMGRHKPENIVIEMARENQTTQKGQKNSRERMKRIEEGIKELGSQILKEHPVENTQLQNEKLYLYYLQNGRDMYVDQELDINRLSDYDVDHIVPQSFLKDDSIDNKVLTRSDKARGKSDNVPSEEVVKKMKNYWRQLLNAKLITQRKFDNLTKAERGGLSELDKAGFIKRQLVETRQITKHVAQILDSRMNTKYDENDKLIREVKVITLKSKLVSDFRKDFQFYKVREINNYHHAHDAYLNAVVGTALIKKYPKLESEFVYGDYKVYDVRKMIAKSEQEIGKATAKYFFYSNIMNFFKTEITLANGEIRKRPLIETNGETGEIVWDKGRDFATVRKVLSMPQVNIVKKTEVQTGGFSKESILPKRNSDKLIARKKDWDPKKYGGFDSPTVAYSVLVVAKVEKGKSKKLKSVKELLGITIMERSSFEKNPIDFLEAKGYKEVKKDLIIKLPKYSLFELENGRKRMLASAGELQKGNELALPSKYVNFLYLASHYEKLKGSPEDNEQKQLFVEQHKHYLDEIIEQISEFSKRVILADANLDKVLSAYNKHRDKPIREQAENIIHLFTLTNLGAPAAFKYFDTTIDRKRYTSTKEVLDATLIHQSITGLYETRIDLSQLGGDGGGGGGGSPAPGGTLNLEDEYRLYETSAEPEVSPGSTWLSDFPQAWAETGGMGLAVRQAPLIIPLKATSTPVSIKQYPMSQEAKLGIKPHIQRLLDQGILVPCQSPWNTPLLPVKKPGTNDYRPVQDLREVNKRVEDIHPTVPNPYNLLSGLPPSHRWYTVLDLKDAFFCLRLHPTSQPLFAFEWRDPGMGISGQLTWTRLPQGFKNSPTLFNEALHRDLADFRIQHPDLILLQYVDDILLAATSELDCQQGTRALLLTLGNLGYRASAKKAQLCQKQVKYLGYLLKEGQRWLTEARKETVMGQPTPKTPRQLREFLGKAGFCRLFIPGFAEMAAPLYPLTKPGTLFNWGPDQQKAYQEIKQALLTAPALGLPDLTKPFELFVDEKQGYAKGVLTQKLGPWRRPVAYLSKKLDPVAAGWPPCLRMVAAIAVLRKDAGKLTMGQPLVILAPHAVEALVKQPPDRWLSNARMTHYQAMLLDTDRVQFGPVVALNPATLLPLPEEGAPHDCLEILAETHGTRPDLTDQPIPDADHTWYTDGSSFLQEGQRKAGAAVTTETEVIWARALPAGTSAQRAELIALTQALKMAEGKRLNVYTDSRYAFATAHIHGEIYRRRGWLTSEGREIKNKSEILALLKALFLPKRLSIIHCLGHQKGDSAEARGNRLADQAAREAAIKTPPDTSTLLAGKRTADGSEFEKRTADGSEFESPKKKAKVE

SEQ ID NO: 4521 - protein, 2094 aa, synthetic construct
MPAAKRVKLDGGDKKYSIGLDIGTNSVGWAVITDEYKVPSKKFKVLGNTDRHSIKKNLIGALLFDSGETAEATRLKRTARRRYTRRKNRICYLQEIFSNEMAKVDDSFFHRLEESFLVEEDKKHERHPIFGNIVDEVAYHEKYPTIYHLRKKLVDSTDKADLRLIYLALAHMIKFRGHFLIEGDLNPDNSDVDKLFIQLVQTYNQLFEENPINASGVDAKAILSARLSKSRRLENLIAQLPGEKKNGLFGNLIALSLGLTPNFKSNFDLAEDAKLQLSKDTYDDDLDNLLAQIGDQYADLFLAAKNLSDAILLSDILRVNTEITKAPLSASMIKRYDEHHQDLTLLKALVRQQLPEKYKEIFFDQSKNGYAGYIDGGASQEEFYKFIKPILEKMDGTEELLVKLNREDLLRKQRTFDNGSIPHQIHLGELHAILRRQEDFYPFLKDNREKIEKILTFRIPYYVGPLARGNSRFAWMTRKSEETITPWNFEEVVDKGASAQSFIERMTNFDKNLPNEKVLPKHSLLYEYFTVYNELTKVKYVTEGMRKPAFLSGEQKKAIVDLLFKTNRKVTVKQLKEDYFKKIECFDSVEISGVEDRFNASLGTYHDLLKIIKDKDFLDNEENEDILEDIVLTLTLFEDREMIEERLKTYAHLFDDKVMKQLKRRRYTGWGRLSRKLINGIRDKQSGKTILDFLKSDGFANRNFMQLIHDDSLTFKEDIQKAQVSGQGDSLHEHIANLAGSPAIKKGILQTVKVVDELVKVMGRHKPENIVIEMARENQTTQKGQKNSRERMKRIEEGIKELGSQILKEHPVENTQLQNEKLYLYYLQNGRDMYVDQELDINRLSDYDVDHIVPQSFLKDDSIDNKVLTRSDKARGKSDNVPSEEVVKKMKNYWRQLLNAKLITQRKFDNLTKAERGGLSELDKAGFIKRQLVETRQITKHVAQILDSRMNTKYDENDKLIREVKVITLKSKLVSDFRKDFQFYKVREINNYHHAHDAYLNAVVGTALIKKYPKLESEFVYGDYKVYDVRKMIAKSEQEIGKATAKYFFYSNIMNFFKTEITLANGEIRKRPLIETNGETGEIVWDKGRDFATVRKVLSMPQVNIVKKTEVQTGGFSKESILPKRNSDKLIARKKDWDPKKYGGFDSPTVAYSVLVVAKVEKGKSKKLKSVKELLGITIMERSSFEKNPIDFLEAKGYKEVKKDLIIKLPKYSLFELENGRKRMLASAGELQKGNELALPSKYVNFLYLASHYEKLKGSPEDNEQKQLFVEQHKHYLDEIIEQISEFSKRVILADANLDKVLSAYNKHRDKPIREQAENIIHLFTLTNLGAPAAFKYFDTTIDRKRYTSTKEVLDATLIHQSITGLYETRIDLSQLGGDGGPAPGGGGGSGGTLNIEDEHRLHETSKEPDVSLGSTWLSDFPQAWAETGGMGLAVRQAPLIIPLKATSTPVSIKQYPMSQEARLGIKPHIQRLLDQGILVPCQSPWNTPLLPVKKPGTNDYRPVQDLREVNKRVEDIHPTVPNPYNLLSGLPPSHQWYTVLDLKDAFFCLRLHPTSQPLFAFEWRDPEMGISGQLTWTRLPQGFKNSPTLFNEALHRDLADFRIQHPDLILLQYVDDLLLAATSELDCQQGTRALLQTLGNLGYRASAKKAQICQKQVKYLGYLLKEGQRWLTEARKETVMGQPTPKTPRQLREFLGKAGFCRLFIPGFAEMAAPLYPLTKPGTLFNWGPDQQKAYQEIKQALLTAPALGLPDLTKPFELFVDEKQGYAKGVLTQKLGPWRRPVAYLSKKLDPVAAGWPPCLRMVAAIAVLTKDAGKLTMGQPLVILAPHAVEALVKQPPDRWLSNARMTHYQALLLDTDRVQFGPVVALNPATLLPLPEEGLQHNCLDILAEAHGTRPDLTDQPLPDADHTWYTDGSSLLQEGQRKAGAAVTTETEVIWAKALPAGTSAQRAELIALTQALKMAEGKKLNVYTDSRYAFATAHIHGEIYRRRGWLTSEGKEIKNKDEILALLKALFLPKRLSIIHCPGHQKGHSAEARGNRMADQAARKAAITETPDTSTLLAGKRTADGSEFEKRTADGSEFESPKKKAKVE

SEQ ID NO: 4522 - protein, 2096 aa, synthetic construct
MPAAKRVKLDGGDKKYSIGLDIGTNSVGWAVITDEYKVPSKKFKVLGNTDRHSIKKNLIGALLFDSGETAEATRLKRTARRRYTRRKNRICYLQEIFSNEMAKVDDSFFHRLEESFLVEEDKKHERHPIFGNIVDEVAYHEKYPTIYHLRKKLVDSTDKADLRLIYLALAHMIKFRGHFLIEGDLNPDNSDVDKLFIQLVQTYNQLFEENPINASGVDAKAILSARLSKSRRLENLIAQLPGEKKNGLFGNLIALSLGLTPNFKSNFDLAEDAKLQLSKDTYDDDLDNLLAQIGDQYADLFLAAKNLSDAILLSDILRVNTEITKAPLSASMIKRYDEHHQDLTLLKALVRQQLPEKYKEIFFDQSKNGYAGYIDGGASQEEFYKFIKPILEKMDGTEELLVKLNREDLLRKQRTFDNGSIPHQIHLGELHAILRRQEDFYPFLKDNREKIEKILTFRIPYYVGPLARGNSRFAWMTRKSEETITPWNFEEVVDKGASAQSFIERMTNFDKNLPNEKVLPKHSLLYEYFTVYNELTKVKYVTEGMRKPAFLSGEQKKAIVDLLFKTNRKVTVKQLKEDYFKKIECFDSVEISGVEDRFNASLGTYHDLLKIIKDKDFLDNEENEDILEDIVLTLTLFEDREMIEERLKTYAHLFDDKVMKQLKRRRYTGWGRLSRKLINGIRDKQSGKTILDFLKSDGFANRNFMQLIHDDSLTFKEDIQKAQVSGQGDSLHEHIANLAGSPAIKKGILQTVKVVDELVKVMGRHKPENIVIEMARENQTTQKGQKNSRERMKRIEEGIKELGSQILKEHPVENTQLQNEKLYLYYLQNGRDMYVDQELDINRLSDYDVDHIVPQSFLKDDSIDNKVLTRSDKARGKSDNVPSEEVVKKMKNYWRQLLNAKLITQRKFDNLTKAERGGLSELDKAGFIKRQLVETRQITKHVAQILDSRMNTKYDENDKLIREVKVITLKSKLVSDFRKDFQFYKVREINNYHHAHDAYLNAVVGTALIKKYPKLESEFVYGDYKVYDVRKMIAKSEQEIGKATAKYFFYSNIMNFFKTEITLANGEIRKRPLIETNGETGEIVWDKGRDFATVRKVLSMPQVNIVKKTEVQTGGFSKESILPKRNSDKLIARKKDWDPKKYGGFDSPTVAYSVLVVAKVEKGKSKKLKSVKELLGITIMERSSFEKNPIDFLEAKGYKEVKKDLIIKLPKYSLFELENGRKRMLASAGELQKGNELALPSKYVNFLYLASHYEKLKGSPEDNEQKQLFVEQHKHYLDEIIEQISEFSKRVILADANLDKVLSAYNKHRDKPIREQAENIIHLFTLTNLGAPAAFKYFDTTIDRKRYTSTKEVLDATLIHQSITGLYETRIDLSQLGGDGGGGSEAAAKGSSGGTLNIEDEYRLHETSKEPDVPLGSTWLSDFPQAWAETGGMGLAVRQAPLIIPLKATSTPVSIKQYPMSQEARLGIKPHIQRLLDQGILVPCQSPWNTPLLPVKKPGTNDYRPVQDLREVNKRVEDIHPTVPNPYNLLSGLPPSHQWYTVLDLKDAFFCLRLHPTSQPLFAFEWRDPEMGISGQLTWTRLPQGFKNSPTLFNEALHRDLADFRIQHPDLILLQYVDDLLLAATSEQDCQRGTRALLQTLGNLGYRASAKKAQICQKQVKYLGYLLKEGQRWLTEARKETVMGQPTPKTPRQLREFLGKAGFCRLFIPGFAEMAAPLYPLTKPGTLFNWGPDQQKAYQEIKQALLTAPALGLPDLTKPFELFVDEKQGYAKGVLTQKLGPWRRPVAYLSKKLDPVAAGWPPCLRMVAAIAVLTKDAGKLTMGQPLVILAPHAVEALVKQPPDRWLSNARMTHYQAMLLDTDRVQFGPVVALNPATLLPLPEKEAPHDCLEILAETHGTRPDLTDQPIPDADYTWYTDGSSFLQEGQRRAGAAVTTETEVIWARALPAGTSAQRAELIALTQALKMAEGKKLNVYTDSRYAFATAHVHGEIYRRRGWLTSEGREIKNKNEILALLKALFLPKRLSIIHCPGHQKGNSAEARGNRMADQAAREAAMKAVLETSTLLAGKRTADGSEFEKRTADGSEFESPKKKAKVE

SEQ ID NO: 4523 - protein, 2096 aa, synthetic construct
MPAAKRVKLDGGDKKYSIGLDIGTNSVGWAVITDEYKVPSKKFKVLGNTDRHSIKKNLIGALLFDSGETAEATRLKRTARRRYTRRKNRICYLQEIFSNEMAKVDDSFFHRLEESFLVEEDKKHERHPIFGNIVDEVAYHEKYPTIYHLRKKLVDSTDKADLRLIYLALAHMIKFRGHFLIEGDLNPDNSDVDKLFIQLVQTYNQLFEENPINASGVDAKAILSARLSKSRRLENLIAQLPGEKKNGLFGNLIALSLGLTPNFKSNFDLAEDAKLQLSKDTYDDDLDNLLAQIGDQYADLFLAAKNLSDAILLSDILRVNTEITKAPLSASMIKRYDEHHQDLTLLKALVRQQLPEKYKEIFFDQSKNGYAGYIDGGASQEEFYKFIKPILEKMDGTEELLVKLNREDLLRKQRTFDNGSIPHQIHLGELHAILRRQEDFYPFLKDNREKIEKILTFRIPYYVGPLARGNSRFAWMTRKSEETITPWNFEEVVDKGASAQSFIERMTNFDKNLPNEKVLPKHSLLYEYFTVYNELTKVKYVTEGMRKPAFLSGEQKKAIVDLLFKTNRKVTVKQLKEDYFKKIECFDSVEISGVEDRFNASLGTYHDLLKIIKDKDFLDNEENEDILEDIVLTLTLFEDREMIEERLKTYAHLFDDKVMKQLKRRRYTGWGRLSRKLINGIRDKQSGKTILDFLKSDGFANRNFMQLIHDDSLTFKEDIQKAQVSGQGDSLHEHIANLAGSPAIKKGILQTVKVVDELVKVMGRHKPENIVIEMARENQTTQKGQKNSRERMKRIEEGIKELGSQILKEHPVENTQLQNEKLYLYYLQNGRDMYVDQELDINRLSDYDVDHIVPQSFLKDDSIDNKVLTRSDKARGKSDNVPSEEVVKKMKNYWRQLLNAKLITQRKFDNLTKAERGGLSELDKAGFIKRQLVETRQITKHVAQILDSRMNTKYDENDKLIREVKVITLKSKLVSDFRKDFQFYKVREINNYHHAHDAYLNAVVGTALIKKYPKLESEFVYGDYKVYDVRKMIAKSEQEIGKATAKYFFYSNIMNFFKTEITLANGEIRKRPLIETNGETGEIVWDKGRDFATVRKVLSMPQVNIVKKTEVQTGGFSKESILPKRNSDKLIARKKDWDPKKYGGFDSPTVAYSVLVVAKVEKGKSKKLKSVKELLGITIMERSSFEKNPIDFLEAKGYKEVKKDLIIKLPKYSLFELENGRKRMLASAGELQKGNELALPSKYVNFLYLASHYEKLKGSPEDNEQKQLFVEQHKHYLDEIIEQISEFSKRVILADANLDKVLSAYNKHRDKPIREQAENIIHLFTLTNLGAPAAFKYFDTTIDRKRYTSTKEVLDATLIHQSITGLYETRIDLSQLGGDGGEAAAKGGSGSSGGTLNIEDEYRLHETSKEPDVPLGSTWLSDFPQAWAETGGMGLAVRQAPLIIPLKATSTPVSIKQYPMSQEARLGIKPHIQRLLDQGILVPCQSPWNTPLLPVKKPGTNDYRPVQDLREVNKRVEDIHPTVPNPYNLLSGLPPSHQWYTVLDLKDAFFCLRLHPTSQPLFAFEWRDPEMGISGQLTWTRLPQGFKNSPTLFNEALHRDLADFRIQHPDLILLQYVDDLLLAATSEQDCQRGTRALLQTLGNLGYRASAKKAQICQKQVKYLGYLLKEGQRWLTEARKETVMGQPTPKTPRQLREFLGTAGFCRLWIPGFAEMAAPLYPLTKPGTLFNWGPDQQKAYQEIKQALLTAPALGLPDLTKPFELFVDEKQGYAKGVLTQKLGPWRRPVAYLSKKLDPVAAGWPPCLRMVAAIAVLTKDAGKLTMGQPLVILAPHAVEALVKQPPDRWLSNARMTHYQAMLLDTDRVQFGPVVALNPATLLPLPEKEAPHDCLEILAETHGTRPDLTDQPIPDADYTWYTDGSSFLQEGQRRAGAAVTTETEVIWARALPAGTSAQRAELIALTQALKMAEGKKLNVYTDSRYAFATAHVHGEIYRRRGWLTSEGREIKNKNEILALLKALFLPKRLSIIHCPGHQKGNSAEARGNRMADQAAREAAMKAVLETSTLLAGKRTADGSEFEKRTADGSEFESPKKKAKVE

SEQ ID NO: 4524 - protein, 2096 aa, synthetic construct
MPAAKRVKLDGGDKKYSIGLDIGTNSVGWAVITDEYKVPSKKFKVLGNTDRHSIKKNLIGALLFDSGETAEATRLKRTARRRYTRRKNRICYLQEIFSNEMAKVDDSFFHRLEESFLVEEDKKHERHPIFGNIVDEVAYHEKYPTIYHLRKKLVDSTDKADLRLIYLALAHMIKFRGHFLIEGDLNPDNSDVDKLFIQLVQTYNQLFEENPINASGVDAKAILSARLSKSRRLENLIAQLPGEKKNGLFGNLIALSLGLTPNFKSNFDLAEDAKLQLSKDTYDDDLDNLLAQIGDQYADLFLAAKNLSDAILLSDILRVNTEITKAPLSASMIKRYDEHHQDLTLLKALVRQQLPEKYKEIFFDQSKNGYAGYIDGGASQEEFYKFIKPILEKMDGTEELLVKLNREDLLRKQRTFDNGSIPHQIHLGELHAILRRQEDFYPFLKDNREKIEKILTFRIPYYVGPLARGNSRFAWMTRKSEETITPWNFEEVVDKGASAQSFIERMTNFDKNLPNEKVLPKHSLLYEYFTVYNELTKVKYVTEGMRKPAFLSGEQKKAIVDLLFKTNRKVTVKQLKEDYFKKIECFDSVEISGVEDRFNASLGTYHDLLKIIKDKDFLDNEENEDILEDIVLTLTLFEDREMIEERLKTYAHLFDDKVMKQLKRRRYTGWGRLSRKLINGIRDKQSGKTILDFLKSDGFANRNFMQLIHDDSLTFKEDIQKAQVSGQGDSLHEHIANLAGSPAIKKGILQTVKVVDELVKVMGRHKPENIVIEMARENQTTQKGQKNSRERMKRIEEGIKELGSQILKEHPVENTQLQNEKLYLYYLQNGRDMYVDQELDINRLSDYDVDHIVPQSFLKDDSIDNKVLTRSDKARGKSDNVPSEEVVKKMKNYWRQLLNAKLITQRKFDNLTKAERGGLSELDKAGFIKRQLVETRQITKHVAQILDSRMNTKYDENDKLIREVKVITLKSKLVSDFRKDFQFYKVREINNYHHAHDAYLNAVVGTALIKKYPKLESEFVYGDYKVYDVRKMIAKSEQEIGKATAKYFFYSNIMNFFKTEITLANGEIRKRPLIETNGETGEIVWDKGRDFATVRKVLSMPQVNIVKKTEVQTGGFSKESILPKRNSDKLIARKKDWDPKKYGGFDSPTVAYSVLVVAKVEKGKSKKLKSVKELLGITIMERSSFEKNPIDFLEAKGYKEVKKDLIIKLPKYSLFELENGRKRMLASAGELQKGNELALPSKYVNFLYLASHYEKLKGSPEDNEQKQLFVEQHKHYLDEIIEQISEFSKRVILADANLDKVLSAYNKHRDKPIREQAENIIHLFTLTNLGAPAAFKYFDTTIDRKRYTSTKEVLDATLIHQSITGLYETRIDLSQLGGDGGEAAAKGSSGGSGGTLNIEDEYRLHETSKEPDVPLGSTWLSDFPQAWAETGGMGLAVRQAPLIIPLKATSTPVSIKQYPMSQEARLGIKPHIQRLLDQGILVPCQSPWNTPLLPVKKPGTNDYRPVQDLREVNKRVEDIHPTVPNPYNLLSGLPPSHQWYTVLDLKDAFFCLRLHPTSQPLFAFEWRDPEMGISGQLTWTRLPQGFKNSPTLFNEALHRDLADFRIQHPDLILLQYVDDLLLAATSEQDCQRGTRALLQTLGNLGYRASAKKAQICQKQVKYLGYLLKEGQRWLTEARKETVMGQPTPKTPRQLREFLGTAGFCRLWIPGFAEMAAPLYPLTKPGTLFNWGPDQQKAYQEIKQALLTAPALGLPDLTKPFELFVDEKQGYAKGVLTQKLGPWRRPVAYLSKKLDPVAAGWPPCLRMVAAIAVLTKDAGKLTMGQPLVILAPHAVEALVKQPPDRWLSNARMTHYQAMLLDTDRVQFGPVVALNPATLLPLPEKEAPHDCLEILAETHGTRPDLTDQPIPDADYTWYTDGSSFLQEGQRRAGAAVTTETEVIWARALPAGTSAQRAELIALTQALKMAEGKKLNVYTDSRYAFATAHVHGEIYRRRGWLTSEGREIKNKNEILALLKALFLPKRLSIIHCPGHQKGNSAEARGNRMADQAAREAAMKAVLETSTLLAGKRTADGSEFEKRTADGSEFESPKKKAKVE

SEQ ID NO: 4525 - protein, 2094 aa, synthetic construct
MPAAKRVKLDGGDKKYSIGLDIGTNSVGWAVITDEYKVPSKKFKVLGNTDRHSIKKNLIGALLFDSGETAEATRLKRTARRRYTRRKNRICYLQEIFSNEMAKVDDSFFHRLEESFLVEEDKKHERHPIFGNIVDEVAYHEKYPTIYHLRKKLVDSTDKADLRLIYLALAHMIKFRGHFLIEGDLNPDNSDVDKLFIQLVQTYNQLFEENPINASGVDAKAILSARLSKSRRLENLIAQLPGEKKNGLFGNLIALSLGLTPNFKSNFDLAEDAKLQLSKDTYDDDLDNLLAQIGDQYADLFLAAKNLSDAILLSDILRVNTEITKAPLSASMIKRYDEHHQDLTLLKALVRQQLPEKYKEIFFDQSKNGYAGYIDGGASQEEFYKFIKPILEKMDGTEELLVKLNREDLLRKQRTFDNGSIPHQIHLGELHAILRRQEDFYPFLKDNREKIEKILTFRIPYYVGPLARGNSRFAWMTRKSEETITPWNFEEVVDKGASAQSFIERMTNFDKNLPNEKVLPKHSLLYEYFTVYNELTKVKYVTEGMRKPAFLSGEQKKAIVDLLFKTNRKVTVKQLKEDYFKKIECFDSVEISGVEDRFNASLGTYHDLLKIIKDKDFLDNEENEDILEDIVLTLTLFEDREMIEERLKTYAHLFDDKVMKQLKRRRYTGWGRLSRKLINGIRDKQSGKTILDFLKSDGFANRNFMQLIHDDSLTFKEDIQKAQVSGQGDSLHEHIANLAGSPAIKKGILQTVKVVDELVKVMGRHKPENIVIEMARENQTTQKGQKNSRERMKRIEEGIKELGSQILKEHPVENTQLQNEKLYLYYLQNGRDMYVDQELDINRLSDYDVDHIVPQSFLKDDSIDNKVLTRSDKARGKSDNVPSEEVVKKMKNYWRQLLNAKLITQRKFDNLTKAERGGLSELDKAGFIKRQLVETRQITKHVAQILDSRMNTKYDENDKLIREVKVITLKSKLVSDFRKDFQFYKVREINNYHHAHDAYLNAVVGTALIKKYPKLESEFVYGDYKVYDVRKMIAKSEQEIGKATAKYFFYSNIMNFFKTEITLANGEIRKRPLIETNGETGEIVWDKGRDFATVRKVLSMPQVNIVKKTEVQTGGFSKESILPKRNSDKLIARKKDWDPKKYGGFDSPTVAYSVLVVAKVEKGKSKKLKSVKELLGITIMERSSFEKNPIDFLEAKGYKEVKKDLIIKLPKYSLFELENGRKRMLASAGELQKGNELALPSKYVNFLYLASHYEKLKGSPEDNEQKQLFVEQHKHYLDEIIEQISEFSKRVILADANLDKVLSAYNKHRDKPIREQAENIIHLFTLTNLGAPAAFKYFDTTIDRKRYTSTKEVLDATLIHQSITGLYETRIDLSQLGGDGGGGSPAPGSSGGTLNIEDEYRLHETSKEPDVPLGSTWLSDFPQAWAETGGMGLAVRQAPLIIPLKATSTPVSIKQYPMSQEARLGIKPHIQRLLDQGILVPCQSPWNTPLLPVKKPGTNDYRPVQDLREVNKRVEDIHPTVPNPYNLLSGLPPSHQWYTVLDLKDAFFCLRLHPTSQPLFAFEWRDPEMGISGQLTWTRLPQGFKNSPTLFNEALHRDLADFRIQHPDLILLQYVDDLLLAATSEQDCQRGTRALLQTLGNLGYRASAKKAQICQKQVKYLGYLLKEGQRWLTEARKETVMGQPTPKTPRQLREFLGKAGFCRLFIPGFAEMAAPLYPLTKPGTLFNWGPDQQKAYQEIKQALLTAPALGLPDLTKPFELFVDEKQGYAKGVLTQKLGPWRRPVAYLSKKLDPVAAGWPPCLRMVAAIAVLTKDAGKLTMGQPLVILAPHAVEALVKQPPDRWLSNARMTHYQAMLLDTDRVQFGPVVALNPATLLPLPEKEAPHDCLEILAETHGTRPDLTDQPIPDADYTWYTDGSSFLQEGQRRAGAAVTTETEVIWARALPAGTSAQRAELIALTQALKMAEGKKLNVYTDSRYAFATAHVHGEIYRRRGWLTSEGREIKNKNEILALLKALFLPKRLSIIHCPGHQKGNSAEARGNRMADQAAREAAMKAVLETSTLLAGKRTADGSEFEKRTADGSEFESPKKKAKVE

SEQ ID NO: 4526 - protein, 2125 aa, synthetic construct
MPAAKRVKLDGGDKKYSIGLDIGTNSVGWAVITDEYKVPSKKFKVLGNTDRHSIKKNLIGALLFDSGETAEATRLKRTARRRYTRRKNRICYLQEIFSNEMAKVDDSFFHRLEESFLVEEDKKHERHPIFGNIVDEVAYHEKYPTIYHLRKKLVDSTDKADLRLIYLALAHMIKFRGHFLIEGDLNPDNSDVDKLFIQLVQTYNQLFEENPINASGVDAKAILSARLSKSRRLENLIAQLPGEKKNGLFGNLIALSLGLTPNFKSNFDLAEDAKLQLSKDTYDDDLDNLLAQIGDQYADLFLAAKNLSDAILLSDILRVNTEITKAPLSASMIKRYDEHHQDLTLLKALVRQQLPEKYKEIFFDQSKNGYAGYIDGGASQEEFYKFIKPILEKMDGTEELLVKLNREDLLRKQRTFDNGSIPHQIHLGELHAILRRQEDFYPFLKDNREKIEKILTFRIPYYVGPLARGNSRFAWMTRKSEETITPWNFEEVVDKGASAQSFIERMTNFDKNLPNEKVLPKHSLLYEYFTVYNELTKVKYVTEGMRKPAFLSGEQKKAIVDLLFKTNRKVTVKQLKEDYFKKIECFDSVEISGVEDRFNASLGTYHDLLKIIKDKDFLDNEENEDILEDIVLTLTLFEDREMIEERLKTYAHLFDDKVMKQLKRRRYTGWGRLSRKLINGIRDKQSGKTILDFLKSDGFANRNFMQLIHDDSLTFKEDIQKAQVSGQGDSLHEHIANLAGSPAIKKGILQTVKVVDELVKVMGRHKPENIVIEMARENQTTQKGQKNSRERMKRIEEGIKELGSQILKEHPVENTQLQNEKLYLYYLQNGRDMYVDQELDINRLSDYDVDHIVPQSFLKDDSIDNKVLTRSDKARGKSDNVPSEEVVKKMKNYWRQLLNAKLITQRKFDNLTKAERGGLSELDKAGFIKRQLVETRQITKHVAQILDSRMNTKYDENDKLIREVKVITLKSKLVSDFRKDFQFYKVREINNYHHAHDAYLNAVVGTALIKKYPKLESEFVYGDYKVYDVRKMIAKSEQEIGKATAKYFFYSNIMNFFKTEITLANGEIRKRPLIETNGETGEIVWDKGRDFATVRKVLSMPQVNIVKKTEVQTGGFSKESILPKRNSDKLIARKKDWDPKKYGGFDSPTVAYSVLVVAKVEKGKSKKLKSVKELLGITIMERSSFEKNPIDFLEAKGYKEVKKDLIIKLPKYSLFELENGRKRMLASAGELQKGNELALPSKYVNFLYLASHYEKLKGSPEDNEQKQLFVEQHKHYLDEIIEQISEFSKRVILADANLDKVLSAYNKHRDKPIREQAENIIHLFTLTNLGAPAAFKYFDTTIDRKRYTSTKEVLDATLIHQSITGLYETRIDLSQLGGDGGGSSPAPGGSGGLLGRDLLTKLKAQIQFSTEGPQVTWEDRPAMCLVLNLEEEYRLHEKPVPPSIDPSWLQLFPMVWAEKAGMGLANQVPPVVVELKSDASPVAVRQYPMSKEAREGIRPHIQRFLDLGILVPCQSPWNTPLLPVKKPGTNDYRPVQDLREVNKRVQDIHPTVPNPYNLLSSLPPSHTWYSVLDLKDAFFCLKLHPNSQPLFAFEWRDPEKGNTGQLTWTRLPQGFKNSPTLFNEALHRDLASFRALNPQVVMLQYVDDLLVAAPTYRDCKEGTRRLLQELSKLGYRVSAKKAQLCREEVTYLGYLLKGGKRWLTPARKATVMKIPTPTTPRQVREFLGTAGFCRLWIPGFASLAAPLYPLTRPKVPFTWTEAHQEAFGRIKEALLSAPALALPDLTKPFALYVDEKEGVARGVLTQTLGPWRRPVAYLSKKLDPVASGWPTCLKAIAAVALLLKDADKLTLGQNVLVIAPHNLESIVRQPPDRWMTNARMTHYQSLLLNERVSFAPPAILNPATLLPVESDDTPIHICSEILAEETGTRPDLRDQPLPGVPAWYTDGSSFIMDGRRQAGAAIVDNKRTVWASNLPEGTSAQKAELIALTQALRLAEGKSINIYTDSRYAFATAHVHGAIYKQRGWLTSAGKDIKNKEEILALLEAIHLPKRVAIIHCPGHQRGTDPVATGNRKADEAAKQAAQSTRILTETTKNAGKRTADGSEFEKRTADGSEFESPKKKAKVE

SEQ ID NO: 4527 - protein, 2096 aa, synthetic construct
MPAAKRVKLDGGDKKYSIGLDIGTNSVGWAVITDEYKVPSKKFKVLGNTDRHSIKKNLIGALLFDSGETAEATRLKRTARRRYTRRKNRICYLQEIFSNEMAKVDDSFFHRLEESFLVEEDKKHERHPIFGNIVDEVAYHEKYPTIYHLRKKLVDSTDKADLRLIYLALAHMIKFRGHFLIEGDLNPDNSDVDKLFIQLVQTYNQLFEENPINASGVDAKAILSARLSKSRRLENLIAQLPGEKKNGLFGNLIALSLGLTPNFKSNFDLAEDAKLQLSKDTYDDDLDNLLAQIGDQYADLFLAAKNLSDAILLSDILRVNTEITKAPLSASMIKRYDEHHQDLTLLKALVRQQLPEKYKEIFFDQSKNGYAGYIDGGASQEEFYKFIKPILEKMDGTEELLVKLNREDLLRKQRTFDNGSIPHQIHLGELHAILRRQEDFYPFLKDNREKIEKILTFRIPYYVGPLARGNSRFAWMTRKSEETITPWNFEEVVDKGASAQSFIERMTNFDKNLPNEKVLPKHSLLYEYFTVYNELTKVKYVTEGMRKPAFLSGEQKKAIVDLLFKTNRKVTVKQLKEDYFKKIECFDSVEISGVEDRFNASLGTYHDLLKIIKDKDFLDNEENEDILEDIVLTLTLFEDREMIEERLKTYAHLFDDKVMKQLKRRRYTGWGRLSRKLINGIRDKQSGKTILDFLKSDGFANRNFMQLIHDDSLTFKEDIQKAQVSGQGDSLHEHIANLAGSPAIKKGILQTVKVVDELVKVMGRHKPENIVIEMARENQTTQKGQKNSRERMKRIEEGIKELGSQILKEHPVENTQLQNEKLYLYYLQNGRDMYVDQELDINRLSDYDVDHIVPQSFLKDDSIDNKVLTRSDKARGKSDNVPSEEVVKKMKNYWRQLLNAKLITQRKFDNLTKAERGGLSELDKAGFIKRQLVETRQITKHVAQILDSRMNTKYDENDKLIREVKVITLKSKLVSDFRKDFQFYKVREINNYHHAHDAYLNAVVGTALIKKYPKLESEFVYGDYKVYDVRKMIAKSEQEIGKATAKYFFYSNIMNFFKTEITLANGEIRKRPLIETNGETGEIVWDKGRDFATVRKVLSMPQVNIVKKTEVQTGGFSKESILPKRNSDKLIARKKDWDPKKYGGFDSPTVAYSVLVVAKVEKGKSKKLKSVKELLGITIMERSSFEKNPIDFLEAKGYKEVKKDLIIKLPKYSLFELENGRKRMLASAGELQKGNELALPSKYVNFLYLASHYEKLKGSPEDNEQKQLFVEQHKHYLDEIIEQISEFSKRVILADANLDKVLSAYNKHRDKPIREQAENIIHLFTLTNLGAPAAFKYFDTTIDRKRYTSTKEVLDATLIHQSITGLYETRIDLSQLGGDGGEAAAKPAPGGSGGTLNIEDEYRLHETSKEPDVPLGSTWLSDFPQAWAETGGMGLAVRQAPLIIPLKATSTPVSIKQYPMSQEARLGIKPHIQRLLDQGILVPCQSPWNTPLLPVKKPGTNDYRPVQDLREVNKRVEDIHPTVPNPYNLLSGLPPSHQWYTVLDLKDAFFCLRLHPTSQPLFAFEWRDPEMGISGQLTWTRLPQGFKNSPTLFNEALHRDLADFRIQHPDLILLQYVDDLLLAATSEQDCQRGTRALLQTLGNLGYRASAKKAQICQKQVKYLGYLLKEGQRWLTEARKETVMGQPTPKTPRQLREFLGKAGFCRLFIPGFAEMAAPLYPLTKPGTLFNWGPDQQKAYQEIKQALLTAPALGLPDLTKPFELFVDEKQGYAKGVLTQKLGPWRRPVAYLSKKLDPVAAGWPPCLRMVAAIAVLTKDAGKLTMGQPLVILAPHAVEALVKQPPDRWLSNARMTHYQAMLLDTDRVQFGPVVALNPATLLPLPEKEAPHDCLEILAETHGTRPDLTDQPIPDADYTWYTDGSSFLQEGQRRAGAAVTTETEVIWARALPAGTSAQRAELIALTQALKMAEGKKLNVYTDSRYAFATAHVHGEIYRRRGWLTSEGREIKNKNEILALLKALFLPKRLSIIHCPGHQKGNSAEARGNRMADQAAREAAMKAVLETSTLLAGKRTADGSEFEKRTADGSEFESPKKKAKVE

SEQ ID NO: 4528 - protein, 2096 aa, synthetic construct
MPAAKRVKLDGGDKKYSIGLDIGTNSVGWAVITDEYKVPSKKFKVLGNTDRHSIKKNLIGALLFDSGETAEATRLKRTARRRYTRRKNRICYLQEIFSNEMAKVDDSFFHRLEESFLVEEDKKHERHPIFGNIVDEVAYHEKYPTIYHLRKKLVDSTDKADLRLIYLALAHMIKFRGHFLIEGDLNPDNSDVDKLFIQLVQTYNQLFEENPINASGVDAKAILSARLSKSRRLENLIAQLPGEKKNGLFGNLIALSLGLTPNFKSNFDLAEDAKLQLSKDTYDDDLDNLLAQIGDQYADLFLAAKNLSDAILLSDILRVNTEITKAPLSASMIKRYDEHHQDLTLLKALVRQQLPEKYKEIFFDQSKNGYAGYIDGGASQEEFYKFIKPILEKMDGTEELLVKLNREDLLRKQRTFDNGSIPHQIHLGELHAILRRQEDFYPFLKDNREKIEKILTFRIPYYVGPLARGNSRFAWMTRKSEETITPWNFEEVVDKGASAQSFIERMTNFDKNLPNEKVLPKHSLLYEYFTVYNELTKVKYVTEGMRKPAFLSGEQKKAIVDLLFKTNRKVTVKQLKEDYFKKIECFDSVEISGVEDRFNASLGTYHDLLKIIKDKDFLDNEENEDILEDIVLTLTLFEDREMIEERLKTYAHLFDDKVMKQLKRRRYTGWGRLSRKLINGIRDKQSGKTILDFLKSDGFANRNFMQLIHDDSLTFKEDIQKAQVSGQGDSLHEHIANLAGSPAIKKGILQTVKVVDELVKVMGRHKPENIVIEMARENQTTQKGQKNSRERMKRIEEGIKELGSQILKEHPVENTQLQNEKLYLYYLQNGRDMYVDQELDINRLSDYDVDHIVPQSFLKDDSIDNKVLTRSDKARGKSDNVPSEEVVKKMKNYWRQLLNAKLITQRKFDNLTKAERGGLSELDKAGFIKRQLVETRQITKHVAQILDSRMNTKYDENDKLIREVKVITLKSKLVSDFRKDFQFYKVREINNYHHAHDAYLNAVVGTALIKKYPKLESEFVYGDYKVYDVRKMIAKSEQEIGKATAKYFFYSNIMNFFKTEITLANGEIRKRPLIETNGETGEIVWDKGRDFATVRKVLSMPQVNIVKKTEVQTGGFSKESILPKRNSDKLIARKKDWDPKKYGGFDSPTVAYSVLVVAKVEKGKSKKLKSVKELLGITIMERSSFEKNPIDFLEAKGYKEVKKDLIIKLPKYSLFELENGRKRMLASAGELQKGNELALPSKYVNFLYLASHYEKLKGSPEDNEQKQLFVEQHKHYLDEIIEQISEFSKRVILADANLDKVLSAYNKHRDKPIREQAENIIHLFTLTNLGAPAAFKYFDTTIDRKRYTSTKEVLDATLIHQSITGLYETRIDLSQLGGDGGPAPEAAAKGGSGGTLNLEDEYRLYETSAEPEVSPGSTWLSDFPQAWAETGGMGLAVRQAPLIIPLKATSTPVSIKQYPMSQEAKLGIKPHIQRLLDQGILVPCQSPWNTPLLPVKKPGTNDYRPVQDLREVNKRVEDIHPTVPNPYNLLSGLPPSHRWYTVLDLKDAFFCLRLHPTSQPLFAFEWRDPGMGISGQLTWTRLPQGFKNSPTLFNEALHRDLADFRIQHPDLILLQYVDDILLAATSELDCQQGTRALLLTLGNLGYRASAKKAQLCQKQVKYLGYLLKEGQRWLTEARKETVMGQPTPKTPRQLREFLGKAGFCRLFIPGFAEMAAPLYPLTKPGTLFNWGPDQQKAYQEIKQALLTAPALGLPDLTKPFELFVDEKQGYAKGVLTQKLGPWRRPVAYLSKKLDPVAAGWPPCLRMVAAIAVLRKDAGKLTMGQPLVILAPHAVEALVKQPPDRWLSNARMTHYQAMLLDTDRVQFGPVVALNPATLLPLPEEGAPHDCLEILAETHGTRPDLTDQPIPDADHTWYTDGSSFLQEGQRKAGAAVTTETEVIWARALPAGTSAQRAELIALTQALKMAEGKRLNVYTDSRYAFATAHIHGEIYRRRGWLTSEGREIKNKSEILALLKALFLPKRLSIIHCLGHQKGDSAEARGNRLADQAAREAAIKTPPDTSTLLAGKRTADGSEFEKRTADGSEFESPKKKAKVE

SEQ ID NO: 4529 - protein, 2088 aa, synthetic construct
MPAAKRVKLDGGDKKYSIGLDIGTNSVGWAVITDEYKVPSKKFKVLGNTDRHSIKKNLIGALLFDSGETAEATRLKRTARRRYTRRKNRICYLQEIFSNEMAKVDDSFFHRLEESFLVEEDKKHERHPIFGNIVDEVAYHEKYPTIYHLRKKLVDSTDKADLRLIYLALAHMIKFRGHFLIEGDLNPDNSDVDKLFIQLVQTYNQLFEENPINASGVDAKAILSARLSKSRRLENLIAQLPGEKKNGLFGNLIALSLGLTPNFKSNFDLAEDAKLQLSKDTYDDDLDNLLAQIGDQYADLFLAAKNLSDAILLSDILRVNTEITKAPLSASMIKRYDEHHQDLTLLKALVRQQLPEKYKEIFFDQSKNGYAGYIDGGASQEEFYKFIKPILEKMDGTEELLVKLNREDLLRKQRTFDNGSIPHQIHLGELHAILRRQEDFYPFLKDNREKIEKILTFRIPYYVGPLARGNSRFAWMTRKSEETITPWNFEEVVDKGASAQSFIERMTNFDKNLPNEKVLPKHSLLYEYFTVYNELTKVKYVTEGMRKPAFLSGEQKKAIVDLLFKTNRKVTVKQLKEDYFKKIECFDSVEISGVEDRFNASLGTYHDLLKIIKDKDFLDNEENEDILEDIVLTLTLFEDREMIEERLKTYAHLFDDKVMKQLKRRRYTGWGRLSRKLINGIRDKQSGKTILDFLKSDGFANRNFMQLIHDDSLTFKEDIQKAQVSGQGDSLHEHIANLAGSPAIKKGILQTVKVVDELVKVMGRHKPENIVIEMARENQTTQKGQKNSRERMKRIEEGIKELGSQILKEHPVENTQLQNEKLYLYYLQNGRDMYVDQELDINRLSDYDVDHIVPQSFLKDDSIDNKVLTRSDKARGKSDNVPSEEVVKKMKNYWRQLLNAKLITQRKFDNLTKAERGGLSELDKAGFIKRQLVETRQITKHVAQILDSRMNTKYDENDKLIREVKVITLKSKLVSDFRKDFQFYKVREINNYHHAHDAYLNAVVGTALIKKYPKLESEFVYGDYKVYDVRKMIAKSEQEIGKATAKYFFYSNIMNFFKTEITLANGEIRKRPLIETNGETGEIVWDKGRDFATVRKVLSMPQVNIVKKTEVQTGGFSKESILPKRNSDKLIARKKDWDPKKYGGFDSPTVAYSVLVVAKVEKGKSKKLKSVKELLGITIMERSSFEKNPIDFLEAKGYKEVKKDLIIKLPKYSLFELENGRKRMLASAGELQKGNELALPSKYVNFLYLASHYEKLKGSPEDNEQKQLFVEQHKHYLDEIIEQISEFSKRVILADANLDKVLSAYNKHRDKPIREQAENIIHLFTLTNLGAPAAFKYFDTTIDRKRYTSTKEVLDATLIHQSITGLYETRIDLSQLGGDGGPAPEAAAKGGSGGLDDEYRLYSPLVKPDQNIQFWLEQFPQAWAETAGMGLAKQVPPQVIQLKASATPVSVRQYPLSKEAQEGIRPHVQRLIQQGILVPVQSPWNTPLLPVRKPGTNDYRPVQDLREVNKRVQDIHPTVPNPYNLLCALPPQRSWYTVLDLKDAFFCLRLHPTSQPLFAFEWRDPGTGRTGQLTWTRLPQGFKNSPTIFNEALHRDLANFRIQHPQVTLLQYVDDLLLAGATKQDCLEGTKALLLELSDLGYRASAKKAQICRREVTYLGYSLRDGQRWLTEARKKTVVQIPAPTTAKQVREFLGKAGFCRLFIPGFATLAAPLYPLTKPKGEFSWAPEHQKAFDAIKKALLSAPALALPDVTKPFTLYVDERKGVARGVLTQTLGPWRRPVAYLSKKLDPVASGWPVCLKAIAAVAILVKDADKLTLGQNITVIAPHALENIVRQPPDRWMTNARMTHYQSLLLTERVTFAPPAALNPATLLPEETDEPVTHDCHQLLIEETGVRKDLTDIPLTGEVLTWFTDGSSYVVEGKRMAGAAVVDGTRTIWASSLPEGTSAQKAELMALTQALRLAEGKSINIYTDSRYAFATAHVHGAIYKQRGWLTSAGREIKNKEEILSLLEALHLPKRLAIIHCPGHQKAKDPISRGNQMADRVAKQAAQGVNLLPAGKRTADGSEFEKRTADGSEFESPKKKAKVE

SEQ ID NO: 4530 - protein, 2096 aa, synthetic construct
MPAAKRVKLDGGDKKYSIGLDIGTNSVGWAVITDEYKVPSKKFKVLGNTDRHSIKKNLIGALLFDSGETAEATRLKRTARRRYTRRKNRICYLQEIFSNEMAKVDDSFFHRLEESFLVEEDKKHERHPIFGNIVDEVAYHEKYPTIYHLRKKLVDSTDKADLRLIYLALAHMIKFRGHFLIEGDLNPDNSDVDKLFIQLVQTYNQLFEENPINASGVDAKAILSARLSKSRRLENLIAQLPGEKKNGLFGNLIALSLGLTPNFKSNFDLAEDAKLQLSKDTYDDDLDNLLAQIGDQYADLFLAAKNLSDAILLSDILRVNTEITKAPLSASMIKRYDEHHQDLTLLKALVRQQLPEKYKEIFFDQSKNGYAGYIDGGASQEEFYKFIKPILEKMDGTEELLVKLNREDLLRKQRTFDNGSIPHQIHLGELHAILRRQEDFYPFLKDNREKIEKILTFRIPYYVGPLARGNSRFAWMTRKSEETITPWNFEEVVDKGASAQSFIERMTNFDKNLPNEKVLPKHSLLYEYFTVYNELTKVKYVTEGMRKPAFLSGEQKKAIVDLLFKTNRKVTVKQLKEDYFKKIECFDSVEISGVEDRFNASLGTYHDLLKIIKDKDFLDNEENEDILEDIVLTLTLFEDREMIEERLKTYAHLFDDKVMKQLKRRRYTGWGRLSRKLINGIRDKQSGKTILDFLKSDGFANRNFMQLIHDDSLTFKEDIQKAQVSGQGDSLHEHIANLAGSPAIKKGILQTVKVVDELVKVMGRHKPENIVIEMARENQTTQKGQKNSRERMKRIEEGIKELGSQILKEHPVENTQLQNEKLYLYYLQNGRDMYVDQELDINRLSDYDVDHIVPQSFLKDDSIDNKVLTRSDKARGKSDNVPSEEVVKKMKNYWRQLLNAKLITQRKFDNLTKAERGGLSELDKAGFIKRQLVETRQITKHVAQILDSRMNTKYDENDKLIREVKVITLKSKLVSDFRKDFQFYKVREINNYHHAHDAYLNAVVGTALIKKYPKLESEFVYGDYKVYDVRKMIAKSEQEIGKATAKYFFYSNIMNFFKTEITLANGEIRKRPLIETNGETGEIVWDKGRDFATVRKVLSMPQVNIVKKTEVQTGGFSKESILPKRNSDKLIARKKDWDPKKYGGFDSPTVAYSVLVVAKVEKGKSKKLKSVKELLGITIMERSSFEKNPIDFLEAKGYKEVKKDLIIKLPKYSLFELENGRKRMLASAGELQKGNELALPSKYVNFLYLASHYEKLKGSPEDNEQKQLFVEQHKHYLDEIIEQISEFSKRVILADANLDKVLSAYNKHRDKPIREQAENIIHLFTLTNLGAPAAFKYFDTTIDRKRYTSTKEVLDATLIHQSITGLYETRIDLSQLGGDGGGGGEAAAKGSSGGTLNIEDEHRLHETSKEPDVSLGSTWLSDFPQAWAETGGMGLAVRQAPLIIPLKATSTPVSIKQYPMSQEARLGIKPHIQRLLDQGILVPCQSPWNTPLLPVKKPGTNDYRPVQDLREVNKRVEDIHPTVPNPYNLLSGLPPSHQWYTVLDLKDAFFCLRLHPTSQPLFAFEWRDPEMGISGQLTWTRLPQGFKNSPTLFNEALHRDLADFRIQHPDLILLQYVDDLLLAATSELDCQQGTRALLQTLGNLGYRASAKKAQICQKQVKYLGYLLKEGQRWLTEARKETVMGQPTPKTPRQLREFLGTAGFCRLWIPGFAEMAAPLYPLTKPGTLFNWGPDQQKAYQEIKQALLTAPALGLPDLTKPFELFVDEKQGYAKGVLTQKLGPWRRPVAYLSKKLDPVAAGWPPCLRMVAAIAVLTKDAGKLTMGQPLVILAPHAVEALVKQPPDRWLSNARMTHYQALLLDTDRVQFGPVVALNPATLLPLPEEGLQHNCLDILAEAHGTRPDLTDQPLPDADHTWYTDGSSLLQEGQRKAGAAVTTETEVIWAKALPAGTSAQRAELIALTQALKMAEGKKLNVYTDSRYAFATAHIHGEIYRRRGWLTSEGKEIKNKDEILALLKALFLPKRLSIIHCPGHQKGHSAEARGNRMADQAARKAAITETPDTSTLLAGKRTADGSEFEKRTADGSEFESPKKKAKVE

SEQ ID NO: 4531 - protein, 2094 aa, synthetic construct
MPAAKRVKLDGGDKKYSIGLDIGTNSVGWAVITDEYKVPSKKFKVLGNTDRHSIKKNLIGALLFDSGETAEATRLKRTARRRYTRRKNRICYLQEIFSNEMAKVDDSFFHRLEESFLVEEDKKHERHPIFGNIVDEVAYHEKYPTIYHLRKKLVDSTDKADLRLIYLALAHMIKFRGHFLIEGDLNPDNSDVDKLFIQLVQTYNQLFEENPINASGVDAKAILSARLSKSRRLENLIAQLPGEKKNGLFGNLIALSLGLTPNFKSNFDLAEDAKLQLSKDTYDDDLDNLLAQIGDQYADLFLAAKNLSDAILLSDILRVNTEITKAPLSASMIKRYDEHHQDLTLLKALVRQQLPEKYKEIFFDQSKNGYAGYIDGGASQEEFYKFIKPILEKMDGTEELLVKLNREDLLRKQRTFDNGSIPHQIHLGELHAILRRQEDFYPFLKDNREKIEKILTFRIPYYVGPLARGNSRFAWMTRKSEETITPWNFEEVVDKGASAQSFIERMTNFDKNLPNEKVLPKHSLLYEYFTVYNELTKVKYVTEGMRKPAFLSGEQKKAIVDLLFKTNRKVTVKQLKEDYFKKIECFDSVEISGVEDRFNASLGTYHDLLKIIKDKDFLDNEENEDILEDIVLTLTLFEDREMIEERLKTYAHLFDDKVMKQLKRRRYTGWGRLSRKLINGIRDKQSGKTILDFLKSDGFANRNFMQLIHDDSLTFKEDIQKAQVSGQGDSLHEHIANLAGSPAIKKGILQTVKVVDELVKVMGRHKPENIVIEMARENQTTQKGQKNSRERMKRIEEGIKELGSQILKEHPVENTQLQNEKLYLYYLQNGRDMYVDQELDINRLSDYDVDHIVPQSFLKDDSIDNKVLTRSDKARGKSDNVPSEEVVKKMKNYWRQLLNAKLITQRKFDNLTKAERGGLSELDKAGFIKRQLVETRQITKHVAQILDSRMNTKYDENDKLIREVKVITLKSKLVSDFRKDFQFYKVREINNYHHAHDAYLNAVVGTALIKKYPKLESEFVYGDYKVYDVRKMIAKSEQEIGKATAKYFFYSNIMNFFKTEITLANGEIRKRPLIETNGETGEIVWDKGRDFATVRKVLSMPQVNIVKKTEVQTGGFSKESILPKRNSDKLIARKKDWDPKKYGGFDSPTVAYSVLVVAKVEKGKSKKLKSVKELLGITIMERSSFEKNPIDFLEAKGYKEVKKDLIIKLPKYSLFELENGRKRMLASAGELQKGNELALPSKYVNFLYLASHYEKLKGSPEDNEQKQLFVEQHKHYLDEIIEQISEFSKRVILADANLDKVLSAYNKHRDKPIREQAENIIHLFTLTNLGAPAAFKYFDTTIDRKRYTSTKEVLDATLIHQSITGLYETRIDLSQLGGDGGEAAAKGGGGSSGGVLNLEEEYRLHEKPVPSSIDPSWLQLFPTVWAERAGMGLANQVPPVVVELRSGASPVAVRQYPMSKEAREGIRPHIQRFLDLGVLVPCQSPWNTPLLPVKKPGTNDYRPVQDLREINKRVQDIHPTVPNPYNLLSSLPPSHTWYSVLDLKDAFFCLKLHPNSQPLFAFEWRDPEKGNTGQLTWTRLPQGFKNSPTLFNEALHRDLAPFRALNPQVVLLQYVDDLLVAAPTYRDCKEGTQKLLQELSKLGYRVSAKKAQLCQKEVTYLGYLLKEGKRWLTPARKATVMKIPPPTTPRQVREFLGKAGFCRLFIPGFASLAAPLYPLTKPSIPFIWTEEHQKAFDRIKEALLSAPALALPDLTKPFTLYVDERAGVARGVLTQTLGPWRRPVAYLSKKLDPVASGWPTCLKAVAAVALLLKDADKLTLGQNVTVIASHSLESIVRQPPDRWMTNARMTHYQSLLLNERVSFAPPAVLNPATLLPVESEATPVHRCSEILAEETGTRRDLKDQPLPGVPAWYTDGSSFIAEGKRRAGAAIVDGKRTVWASSLPEGTSAQKAELVALTQALRLAEGKDINIYTDSRYAFATAHIHGAIYKQRGWLTSAGKDIKNKEEILALLEAIHLPKRVAIIHCPGHQKGNDPVATGNRRADEAAKQAALSTRVLAETTKPAGKRTADGSEFEKRTADGSEFESPKKKAKVE

SEQ ID NO: 4532 - protein, 2088 aa, synthetic construct
MPAAKRVKLDGGDKKYSIGLDIGTNSVGWAVITDEYKVPSKKFKVLGNTDRHSIKKNLIGALLFDSGETAEATRLKRTARRRYTRRKNRICYLQEIFSNEMAKVDDSFFHRLEESFLVEEDKKHERHPIFGNIVDEVAYHEKYPTIYHLRKKLVDSTDKADLRLIYLALAHMIKFRGHFLIEGDLNPDNSDVDKLFIQLVQTYNQLFEENPINASGVDAKAILSARLSKSRRLENLIAQLPGEKKNGLFGNLIALSLGLTPNFKSNFDLAEDAKLQLSKDTYDDDLDNLLAQIGDQYADLFLAAKNLSDAILLSDILRVNTEITKAPLSASMIKRYDEHHQDLTLLKALVRQQLPEKYKEIFFDQSKNGYAGYIDGGASQEEFYKFIKPILEKMDGTEELLVKLNREDLLRKQRTFDNGSIPHQIHLGELHAILRRQEDFYPFLKDNREKIEKILTFRIPYYVGPLARGNSRFAWMTRKSEETITPWNFEEVVDKGASAQSFIERMTNFDKNLPNEKVLPKHSLLYEYFTVYNELTKVKYVTEGMRKPAFLSGEQKKAIVDLLFKTNRKVTVKQLKEDYFKKIECFDSVEISGVEDRFNASLGTYHDLLKIIKDKDFLDNEENEDILEDIVLTLTLFEDREMIEERLKTYAHLFDDKVMKQLKRRRYTGWGRLSRKLINGIRDKQSGKTILDFLKSDGFANRNFMQLIHDDSLTFKEDIQKAQVSGQGDSLHEHIANLAGSPAIKKGILQTVKVVDELVKVMGRHKPENIVIEMARENQTTQKGQKNSRERMKRIEEGIKELGSQILKEHPVENTQLQNEKLYLYYLQNGRDMYVDQELDINRLSDYDVDHIVPQSFLKDDSIDNKVLTRSDKARGKSDNVPSEEVVKKMKNYWRQLLNAKLITQRKFDNLTKAERGGLSELDKAGFIKRQLVETRQITKHVAQILDSRMNTKYDENDKLIREVKVITLKSKLVSDFRKDFQFYKVREINNYHHAHDAYLNAVVGTALIKKYPKLESEFVYGDYKVYDVRKMIAKSEQEIGKATAKYFFYSNIMNFFKTEITLANGEIRKRPLIETNGETGEIVWDKGRDFATVRKVLSMPQVNIVKKTEVQTGGFSKESILPKRNSDKLIARKKDWDPKKYGGFDSPTVAYSVLVVAKVEKGKSKKLKSVKELLGITIMERSSFEKNPIDFLEAKGYKEVKKDLIIKLPKYSLFELENGRKRMLASAGELQKGNELALPSKYVNFLYLASHYEKLKGSPEDNEQKQLFVEQHKHYLDEIIEQISEFSKRVILADANLDKVLSAYNKHRDKPIREQAENIIHLFTLTNLGAPAAFKYFDTTIDRKRYTSTKEVLDATLIHQSITGLYETRIDLSQLGGDGGGSSGGGPAPGGTLQLDDEYRLYSPLVKPDQNIQFWLEQFPQAWAETAGMGLAKQVPPQVIQLKASATPVSVRQYPLSKEAQEGIRPHVQRLIQQGILVPVQSPWNTPLLPVRKPGTNDYRPVQDLREVNKRVQDIHPTVPNPYNLLCALPPQRSWYTVLDLKDAFFCLRLHPTSQPLFAFEWRDPGTGRTGQLTWTRLPQGFKNSPTIFNEALHRDLANFRIQHPQVTLLQYVDDLLLAGATKQDCLEGTKALLLELSDLGYRASAKKAQICRREVTYLGYSLRDGQRWLTEARKKTVVQIPAPTTAKQVREFLGTAGFCRLWIPGFATLAAPLYPLTKPKGEFSWAPEHQKAFDAIKKALLSAPALALPDVTKPFTLYVDERKGVARGVLTQTLGPWRRPVAYLSKKLDPVASGWPVCLKAIAAVAILVKDADKLTLGQNITVIAPHALENIVRQPPDRWMTNARMTHYQSLLLTERVTFAPPAALNPATLLPEETDEPVTHDCHQLLIEETGVRKDLTDIPLTGEVLTWFTDGSSYVVEGKRMAGAAVVDGTRTIWASSLPEGTSAQKAELMALTQALRLAEGKSINIYTDSRYAFATAHVHGAIYKQRGWLTSAGREIKNKEEILSLLEALHLPKRLAIIHCPGHQKAKDPISRGNQMADRVAKQAAQGVNLLAGKRTADGSEFEKRTADGSEFESPKKKAKVE

SEQ ID NO: 4533 - protein, 2094 aa, synthetic construct
MPAAKRVKLDGGDKKYSIGLDIGTNSVGWAVITDEYKVPSKKFKVLGNTDRHSIKKNLIGALLFDSGETAEATRLKRTARRRYTRRKNRICYLQEIFSNEMAKVDDSFFHRLEESFLVEEDKKHERHPIFGNIVDEVAYHEKYPTIYHLRKKLVDSTDKADLRLIYLALAHMIKFRGHFLIEGDLNPDNSDVDKLFIQLVQTYNQLFEENPINASGVDAKAILSARLSKSRRLENLIAQLPGEKKNGLFGNLIALSLGLTPNFKSNFDLAEDAKLQLSKDTYDDDLDNLLAQIGDQYADLFLAAKNLSDAILLSDILRVNTEITKAPLSASMIKRYDEHHQDLTLLKALVRQQLPEKYKEIFFDQSKNGYAGYIDGGASQEEFYKFIKPILEKMDGTEELLVKLNREDLLRKQRTFDNGSIPHQIHLGELHAILRRQEDFYPFLKDNREKIEKILTFRIPYYVGPLARGNSRFAWMTRKSEETITPWNFEEVVDKGASAQSFIERMTNFDKNLPNEKVLPKHSLLYEYFTVYNELTKVKYVTEGMRKPAFLSGEQKKAIVDLLFKTNRKVTVKQLKEDYFKKIECFDSVEISGVEDRFNASLGTYHDLLKIIKDKDFLDNEENEDILEDIVLTLTLFEDREMIEERLKTYAHLFDDKVMKQLKRRRYTGWGRLSRKLINGIRDKQSGKTILDFLKSDGFANRNFMQLIHDDSLTFKEDIQKAQVSGQGDSLHEHIANLAGSPAIKKGILQTVKVVDELVKVMGRHKPENIVIEMARENQTTQKGQKNSRERMKRIEEGIKELGSQILKEHPVENTQLQNEKLYLYYLQNGRDMYVDQELDINRLSDYDVDHIVPQSFLKDDSIDNKVLTRSDKARGKSDNVPSEEVVKKMKNYWRQLLNAKLITQRKFDNLTKAERGGLSELDKAGFIKRQLVETRQITKHVAQILDSRMNTKYDENDKLIREVKVITLKSKLVSDFRKDFQFYKVREINNYHHAHDAYLNAVVGTALIKKYPKLESEFVYGDYKVYDVRKMIAKSEQEIGKATAKYFFYSNIMNFFKTEITLANGEIRKRPLIETNGETGEIVWDKGRDFATVRKVLSMPQVNIVKKTEVQTGGFSKESILPKRNSDKLIARKKDWDPKKYGGFDSPTVAYSVLVVAKVEKGKSKKLKSVKELLGITIMERSSFEKNPIDFLEAKGYKEVKKDLIIKLPKYSLFELENGRKRMLASAGELQKGNELALPSKYVNFLYLASHYEKLKGSPEDNEQKQLFVEQHKHYLDEIIEQISEFSKRVILADANLDKVLSAYNKHRDKPIREQAENIIHLFTLTNLGAPAAFKYFDTTIDRKRYTSTKEVLDATLIHQSITGLYETRIDLSQLGGDGGPAPGSSGGGGGTLNLEDEYRLYETSAEPEVSPGSTWLSDFPQAWAETGGMGLAVRQAPLIIPLKATSTPVSIKQYPMSQEAKLGIKPHIQRLLDQGILVPCQSPWNTPLLPVKKPGTNDYRPVQDLREVNKRVEDIHPTVPNPYNLLSGLPPSHRWYTVLDLKDAFFCLRLHPTSQPLFAFEWRDPGMGISGQLTWTRLPQGFKNSPTLFNEALHRDLADFRIQHPDLILLQYVDDILLAATSELDCQQGTRALLLTLGNLGYRASAKKAQLCQKQVKYLGYLLKEGQRWLTEARKETVMGQPTPKTPRQLREFLGKAGFCRLFIPGFAEMAAPLYPLTKPGTLFNWGPDQQKAYQEIKQALLTAPALGLPDLTKPFELFVDEKQGYAKGVLTQKLGPWRRPVAYLSKKLDPVAAGWPPCLRMVAAIAVLRKDAGKLTMGQPLVILAPHAVEALVKQPPDRWLSNARMTHYQAMLLDTDRVQFGPVVALNPATLLPLPEEGAPHDCLEILAETHGTRPDLTDQPIPDADHTWYTDGSSFLQEGQRKAGAAVTTETEVIWARALPAGTSAQRAELIALTQALKMAEGKRLNVYTDSRYAFATAHIHGEIYRRRGWLTSEGREIKNKSEILALLKALFLPKRLSIIHCLGHQKGDSAEARGNRLADQAAREAAIKTPPDTSTLLAGKRTADGSEFEKRTADGSEFESPKKKAKVE

SEQ ID NO: 4534 - protein, 2096 aa, synthetic construct
MPAAKRVKLDGGDKKYSIGLDIGTNSVGWAVITDEYKVPSKKFKVLGNTDRHSIKKNLIGALLFDSGETAEATRLKRTARRRYTRRKNRICYLQEIFSNEMAKVDDSFFHRLEESFLVEEDKKHERHPIFGNIVDEVAYHEKYPTIYHLRKKLVDSTDKADLRLIYLALAHMIKFRGHFLIEGDLNPDNSDVDKLFIQLVQTYNQLFEENPINASGVDAKAILSARLSKSRRLENLIAQLPGEKKNGLFGNLIALSLGLTPNFKSNFDLAEDAKLQLSKDTYDDDLDNLLAQIGDQYADLFLAAKNLSDAILLSDILRVNTEITKAPLSASMIKRYDEHHQDLTLLKALVRQQLPEKYKEIFFDQSKNGYAGYIDGGASQEEFYKFIKPILEKMDGTEELLVKLNREDLLRKQRTFDNGSIPHQIHLGELHAILRRQEDFYPFLKDNREKIEKILTFRIPYYVGPLARGNSRFAWMTRKSEETITPWNFEEVVDKGASAQSFIERMTNFDKNLPNEKVLPKHSLLYEYFTVYNELTKVKYVTEGMRKPAFLSGEQKKAIVDLLFKTNRKVTVKQLKEDYFKKIECFDSVEISGVEDRFNASLGTYHDLLKIIKDKDFLDNEENEDILEDIVLTLTLFEDREMIEERLKTYAHLFDDKVMKQLKRRRYTGWGRLSRKLINGIRDKQSGKTILDFLKSDGFANRNFMQLIHDDSLTFKEDIQKAQVSGQGDSLHEHIANLAGSPAIKKGILQTVKVVDELVKVMGRHKPENIVIEMARENQTTQKGQKNSRERMKRIEEGIKELGSQILKEHPVENTQLQNEKLYLYYLQNGRDMYVDQELDINRLSDYDVDHIVPQSFLKDDSIDNKVLTRSDKARGKSDNVPSEEVVKKMKNYWRQLLNAKLITQRKFDNLTKAERGGLSELDKAGFIKRQLVETRQITKHVAQILDSRMNTKYDENDKLIREVKVITLKSKLVSDFRKDFQFYKVREINNYHHAHDAYLNAVVGTALIKKYPKLESEFVYGDYKVYDVRKMIAKSEQEIGKATAKYFFYSNIMNFFKTEITLANGEIRKRPLIETNGETGEIVWDKGRDFATVRKVLSMPQVNIVKKTEVQTGGFSKESILPKRNSDKLIARKKDWDPKKYGGFDSPTVAYSVLVVAKVEKGKSKKLKSVKELLGITIMERSSFEKNPIDFLEAKGYKEVKKDLIIKLPKYSLFELENGRKRMLASAGELQKGNELALPSKYVNFLYLASHYEKLKGSPEDNEQKQLFVEQHKHYLDEIIEQISEFSKRVILADANLDKVLSAYNKHRDKPIREQAENIIHLFTLTNLGAPAAFKYFDTTIDRKRYTSTKEVLDATLIHQSITGLYETRIDLSQLGGDGGGGGPAPEAAAKGGTLNIEDEHRLHETSKEPDVSLGSTWLSDFPQAWAETGGMGLAVRQAPLIIPLKATSTPVSIKQYPMSQEARLGIKPHIQRLLDQGILVPCQSPWNTPLLPVKKPGTNDYRPVQDLREVNKRVEDIHPTVPNPYNLLSGLPPSHQWYTVLDLKDAFFCLRLHPTSQPLFAFEWRDPEMGISGQLTWTRLPQGFKNSPTLFNEALHRDLADFRIQHPDLILLQYVDDLLLAATSELDCQQGTRALLQTLGNLGYRASAKKAQICQKQVKYLGYLLKEGQRWLTEARKETVMGQPTPKTPRQLREFLGTAGFCRLWIPGFAEMAAPLYPLTKPGTLFNWGPDQQKAYQEIKQALLTAPALGLPDLTKPFELFVDEKQGYAKGVLTQKLGPWRRPVAYLSKKLDPVAAGWPPCLRMVAAIAVLTKDAGKLTMGQPLVILAPHAVEALVKQPPDRWLSNARMTHYQALLLDTDRVQFGPVVALNPATLLPLPEEGLQHNCLDILAEAHGTRPDLTDQPLPDADHTWYTDGSSLLQEGQRKAGAAVTTETEVIWAKALPAGTSAQRAELIALTQALKMAEGKKLNVYTDSRYAFATAHIHGEIYRRRGWLTSEGKEIKNKDEILALLKALFLPKRLSIIHCPGHQKGHSAEARGNRMADQAARKAAITETPDTSTLLAGKRTADGSEFEKRTADGSEFESPKKKAKVE

SEQ ID NO: 4535 - protein, 2096 aa, synthetic construct
MPAAKRVKLDGGDKKYSIGLDIGTNSVGWAVITDEYKVPSKKFKVLGNTDRHSIKKNLIGALLFDSGETAEATRLKRTARRRYTRRKNRICYLQEIFSNEMAKVDDSFFHRLEESFLVEEDKKHERHPIFGNIVDEVAYHEKYPTIYHLRKKLVDSTDKADLRLIYLALAHMIKFRGHFLIEGDLNPDNSDVDKLFIQLVQTYNQLFEENPINASGVDAKAILSARLSKSRRLENLIAQLPGEKKNGLFGNLIALSLGLTPNFKSNFDLAEDAKLQLSKDTYDDDLDNLLAQIGDQYADLFLAAKNLSDAILLSDILRVNTEITKAPLSASMIKRYDEHHQDLTLLKALVRQQLPEKYKEIFFDQSKNGYAGYIDGGASQEEFYKFIKPILEKMDGTEELLVKLNREDLLRKQRTFDNGSIPHQIHLGELHAILRRQEDFYPFLKDNREKIEKILTFRIPYYVGPLARGNSRFAWMTRKSEETITPWNFEEVVDKGASAQSFIERMTNFDKNLPNEKVLPKHSLLYEYFTVYNELTKVKYVTEGMRKPAFLSGEQKKAIVDLLFKTNRKVTVKQLKEDYFKKIECFDSVEISGVEDRFNASLGTYHDLLKIIKDKDFLDNEENEDILEDIVLTLTLFEDREMIEERLKTYAHLFDDKVMKQLKRRRYTGWGRLSRKLINGIRDKQSGKTILDFLKSDGFANRNFMQLIHDDSLTFKEDIQKAQVSGQGDSLHEHIANLAGSPAIKKGILQTVKVVDELVKVMGRHKPENIVIEMARENQTTQKGQKNSRERMKRIEEGIKELGSQILKEHPVENTQLQNEKLYLYYLQNGRDMYVDQELDINRLSDYDVDHIVPQSFLKDDSIDNKVLTRSDKARGKSDNVPSEEVVKKMKNYWRQLLNAKLITQRKFDNLTKAERGGLSELDKAGFIKRQLVETRQITKHVAQILDSRMNTKYDENDKLIREVKVITLKSKLVSDFRKDFQFYKVREINNYHHAHDAYLNAVVGTALIKKYPKLESEFVYGDYKVYDVRKMIAKSEQEIGKATAKYFFYSNIMNFFKTEITLANGEIRKRPLIETNGETGEIVWDKGRDFATVRKVLSMPQVNIVKKTEVQTGGFSKESILPKRNSDKLIARKKDWDPKKYGGFDSPTVAYSVLVVAKVEKGKSKKLKSVKELLGITIMERSSFEKNPIDFLEAKGYKEVKKDLIIKLPKYSLFELENGRKRMLASAGELQKGNELALPSKYVNFLYLASHYEKLKGSPEDNEQKQLFVEQHKHYLDEIIEQISEFSKRVILADANLDKVLSAYNKHRDKPIREQAENIIHLFTLTNLGAPAAFKYFDTTIDRKRYTSTKEVLDATLIHQSITGLYETRIDLSQLGGDGGEAAAKGGGPAPGGTLNIEDEHRLHETSKEPDVSLGSTWLSDFPQAWAETGGMGLAVRQAPLIIPLKATSTPVSIKQYPMSQEARLGIKPHIQRLLDQGILVPCQSPWNTPLLPVKKPGTNDYRPVQDLREVNKRVEDIHPTVPNPYNLLSGLPPSHQWYTVLDLKDAFFCLRLHPTSQPLFAFEWRDPEMGISGQLTWTRLPQGFKNSPTLFNEALHRDLADFRIQHPDLILLQYVDDLLLAATSELDCQQGTRALLQTLGNLGYRASAKKAQICQKQVKYLGYLLKEGQRWLTEARKETVMGQPTPKTPRQLREFLGTAGFCRLWIPGFAEMAAPLYPLTKPGTLFNWGPDQQKAYQEIKQALLTAPALGLPDLTKPFELFVDEKQGYAKGVLTQKLGPWRRPVAYLSKKLDPVAAGWPPCLRMVAAIAVLTKDAGKLTMGQPLVILAPHAVEALVKQPPDRWLSNARMTHYQALLLDTDRVQFGPVVALNPATLLPLPEEGLQHNCLDILAEAHGTRPDLTDQPLPDADHTWYTDGSSLLQEGQRKAGAAVTTETEVIWAKALPAGTSAQRAELIALTQALKMAEGKKLNVYTDSRYAFATAHIHGEIYRRRGWLTSEGKEIKNKDEILALLKALFLPKRLSIIHCPGHQKGHSAEARGNRMADQAARKAAITETPDTSTLLAGKRTADGSEFEKRTADGSEFESPKKKAKVE

SEQ ID NO: 4536 - protein, 2096 aa, synthetic construct
MPAAKRVKLDGGDKKYSIGLDIGTNSVGWAVITDEYKVPSKKFKVLGNTDRHSIKKNLIGALLFDSGETAEATRLKRTARRRYTRRKNRICYLQEIFSNEMAKVDDSFFHRLEESFLVEEDKKHERHPIFGNIVDEVAYHEKYPTIYHLRKKLVDSTDKADLRLIYLALAHMIKFRGHFLIEGDLNPDNSDVDKLFIQLVQTYNQLFEENPINASGVDAKAILSARLSKSRRLENLIAQLPGEKKNGLFGNLIALSLGLTPNFKSNFDLAEDAKLQLSKDTYDDDLDNLLAQIGDQYADLFLAAKNLSDAILLSDILRVNTEITKAPLSASMIKRYDEHHQDLTLLKALVRQQLPEKYKEIFFDQSKNGYAGYIDGGASQEEFYKFIKPILEKMDGTEELLVKLNREDLLRKQRTFDNGSIPHQIHLGELHAILRRQEDFYPFLKDNREKIEKILTFRIPYYVGPLARGNSRFAWMTRKSEETITPWNFEEVVDKGASAQSFIERMTNFDKNLPNEKVLPKHSLLYEYFTVYNELTKVKYVTEGMRKPAFLSGEQKKAIVDLLFKTNRKVTVKQLKEDYFKKIECFDSVEISGVEDRFNASLGTYHDLLKIIKDKDFLDNEENEDILEDIVLTLTLFEDREMIEERLKTYAHLFDDKVMKQLKRRRYTGWGRLSRKLINGIRDKQSGKTILDFLKSDGFANRNFMQLIHDDSLTFKEDIQKAQVSGQGDSLHEHIANLAGSPAIKKGILQTVKVVDELVKVMGRHKPENIVIEMARENQTTQKGQKNSRERMKRIEEGIKELGSQILKEHPVENTQLQNEKLYLYYLQNGRDMYVDQELDINRLSDYDVDHIVPQSFLKDDSIDNKVLTRSDKARGKSDNVPSEEVVKKMKNYWRQLLNAKLITQRKFDNLTKAERGGLSELDKAGFIKRQLVETRQITKHVAQILDSRMNTKYDENDKLIREVKVITLKSKLVSDFRKDFQFYKVREINNYHHAHDAYLNAVVGTALIKKYPKLESEFVYGDYKVYDVRKMIAKSEQEIGKATAKYFFYSNIMNFFKTEITLANGEIRKRPLIETNGETGEIVWDKGRDFATVRKVLSMPQVNIVKKTEVQTGGFSKESILPKRNSDKLIARKKDWDPKKYGGFDSPTVAYSVLVVAKVEKGKSKKLKSVKELLGITIMERSSFEKNPIDFLEAKGYKEVKKDLIIKLPKYSLFELENGRKRMLASAGELQKGNELALPSKYVNFLYLASHYEKLKGSPEDNEQKQLFVEQHKHYLDEIIEQISEFSKRVILADANLDKVLSAYNKHRDKPIREQAENIIHLFTLTNLGAPAAFKYFDTTIDRKRYTSTKEVLDATLIHQSITGLYETRIDLSQLGGDGGEAAAKPAPGGGGGTLNIEDEYRLHETSKEPDVSLGSTWLSDFPQAWAETGGMGLAVRQAPLIIPLKATSTPVSIKQYPMSQEARLGIKPHIQRLLDQGILVPCQSPWNTPLLPVKKPGTNDYRPVQDLREVNKRVEDIHPTVPNPYNLLSGLPPSHQWYTVLDLKDAFFCLRLHPTSQPLFAFEWRDPEMGISGQLTWTRLPQGFKNSPTLFNEALHRDLAGFRIQHPDLILLQYVDDLLLAATSELDCQQGTRALLQTLGDLGYRASAKKAQICQKQVKYLGYLLKEGQRWLTEARKETVMGQPIPKTPRQLREFLGKAGFCRLFIPGFAEMAAPLYPLTKPGTLFNWGPDQQKAFQEIKQALLTAPALGLPDLTKPFELFVDEKQGYAKGVLTQKLGPWRRPVAYLSKKLDPVAAGWPPCLRMVAAIAVLTKDAGKLTMGQPLVILAPHAVEALVKQPPDRWLSNARMTHYQALLLDTDRVQFGPVVALNPATLLPLPEEGLQHDCLDILAEAHGTRSDLMDQPLPDADHTWYTDGSSFLQEGQRKAGAAVTTETEVIWARALPAGTSAQRAELIALTQALKMAEGKKLNVYTDSRYAFATAHIHGEIYRRRGWLTSEGKEIKNKDEILALLKALFLPKRLSIIHCPGHQKGNSAEARGNRMADQAAREVATRETPETSTLLAGKRTADGSEFEKRTADGSEFESPKKKAKVE

SEQ ID NO: 4537 - protein, 2127 aa, synthetic construct
MPAAKRVKLDGGDKKYSIGLDIGTNSVGWAVITDEYKVPSKKFKVLGNTDRHSIKKNLIGALLFDSGETAEATRLKRTARRRYTRRKNRICYLQEIFSNEMAKVDDSFFHRLEESFLVEEDKKHERHPIFGNIVDEVAYHEKYPTIYHLRKKLVDSTDKADLRLIYLALAHMIKFRGHFLIEGDLNPDNSDVDKLFIQLVQTYNQLFEENPINASGVDAKAILSARLSKSRRLENLIAQLPGEKKNGLFGNLIALSLGLTPNFKSNFDLAEDAKLQLSKDTYDDDLDNLLAQIGDQYADLFLAAKNLSDAILLSDILRVNTEITKAPLSASMIKRYDEHHQDLTLLKALVRQQLPEKYKEIFFDQSKNGYAGYIDGGASQEEFYKFIKPILEKMDGTEELLVKLNREDLLRKQRTFDNGSIPHQIHLGELHAILRRQEDFYPFLKDNREKIEKILTFRIPYYVGPLARGNSRFAWMTRKSEETITPWNFEEVVDKGASAQSFIERMTNFDKNLPNEKVLPKHSLLYEYFTVYNELTKVKYVTEGMRKPAFLSGEQKKAIVDLLFKTNRKVTVKQLKEDYFKKIECFDSVEISGVEDRFNASLGTYHDLLKIIKDKDFLDNEENEDILEDIVLTLTLFEDREMIEERLKTYAHLFDDKVMKQLKRRRYTGWGRLSRKLINGIRDKQSGKTILDFLKSDGFANRNFMQLIHDDSLTFKEDIQKAQVSGQGDSLHEHIANLAGSPAIKKGILQTVKVVDELVKVMGRHKPENIVIEMARENQTTQKGQKNSRERMKRIEEGIKELGSQILKEHPVENTQLQNEKLYLYYLQNGRDMYVDQELDINRLSDYDVDHIVPQSFLKDDSIDNKVLTRSDKARGKSDNVPSEEVVKKMKNYWRQLLNAKLITQRKFDNLTKAERGGLSELDKAGFIKRQLVETRQITKHVAQILDSRMNTKYDENDKLIREVKVITLKSKLVSDFRKDFQFYKVREINNYHHAHDAYLNAVVGTALIKKYPKLESEFVYGDYKVYDVRKMIAKSEQEIGKATAKYFFYSNIMNFFKTEITLANGEIRKRPLIETNGETGEIVWDKGRDFATVRKVLSMPQVNIVKKTEVQTGGFSKESILPKRNSDKLIARKKDWDPKKYGGFDSPTVAYSVLVVAKVEKGKSKKLKSVKELLGITIMERSSFEKNPIDFLEAKGYKEVKKDLIIKLPKYSLFELENGRKRMLASAGELQKGNELALPSKYVNFLYLASHYEKLKGSPEDNEQKQLFVEQHKHYLDEIIEQISEFSKRVILADANLDKVLSAYNKHRDKPIREQAENIIHLFTLTNLGAPAAFKYFDTTIDRKRYTSTKEVLDATLIHQSITGLYETRIDLSQLGGDGGPAPEAAAKGGGGGLLGRDLLTKLKAQIQFSTEGPQVTWEDRPAMCLVLNLEEEYRLHEKPVPPSIDPSWLQLFPMVWAEKAGMGLANQVPPVVVELKSDASPVAVRQYPMSKEAREGIRPHIQRFLDLGILVPCQSPWNTPLLPVKKPGTNDYRPVQDLREVNKRVQDIHPTVPNPYNLLSSLPPSHTWYSVLDLKDAFFCLKLHPNSQPLFAFEWRDPEKGNTGQLTWTRLPQGFKNSPTLFNEALHRDLASFRALNPQVVMLQYVDDLLVAAPTYRDCKEGTRRLLQELSKLGYRVSAKKAQLCREEVTYLGYLLKGGKRWLTPARKATVMKIPTPTTPRQVREFLGTAGFCRLWIPGFASLAAPLYPLTRPKVPFTWTEAHQEAFGRIKEALLSAPALALPDLTKPFALYVDEKEGVARGVLTQTLGPWRRPVAYLSKKLDPVASGWPTCLKAIAAVALLLKDADKLTLGQNVLVIAPHNLESIVRQPPDRWMTNARMTHYQSLLLNERVSFAPPAILNPATLLPVESDDTPIHICSEILAEETGTRPDLRDQPLPGVPAWYTDGSSFIMDGRRQAGAAIVDNKRTVWASNLPEGTSAQKAELIALTQALRLAEGKSINIYTDSRYAFATAHVHGAIYKQRGWLTSAGKDIKNKEEILALLEAIHLPKRVAIIHCPGHQRGTDPVATGNRKADEAAKQAAQSTRILTETTKNAGKRTADGSEFEKRTADGSEFESPKKKAKVE

SEQ ID NO: 4538 - protein, 2096 aa, synthetic construct
MPAAKRVKLDGGDKKYSIGLDIGTNSVGWAVITDEYKVPSKKFKVLGNTDRHSIKKNLIGALLFDSGETAEATRLKRTARRRYTRRKNRICYLQEIFSNEMAKVDDSFFHRLEESFLVEEDKKHERHPIFGNIVDEVAYHEKYPTIYHLRKKLVDSTDKADLRLIYLALAHMIKFRGHFLIEGDLNPDNSDVDKLFIQLVQTYNQLFEENPINASGVDAKAILSARLSKSRRLENLIAQLPGEKKNGLFGNLIALSLGLTPNFKSNFDLAEDAKLQLSKDTYDDDLDNLLAQIGDQYADLFLAAKNLSDAILLSDILRVNTEITKAPLSASMIKRYDEHHQDLTLLKALVRQQLPEKYKEIFFDQSKNGYAGYIDGGASQEEFYKFIKPILEKMDGTEELLVKLNREDLLRKQRTFDNGSIPHQIHLGELHAILRRQEDFYPFLKDNREKIEKILTFRIPYYVGPLARGNSRFAWMTRKSEETITPWNFEEVVDKGASAQSFIERMTNFDKNLPNEKVLPKHSLLYEYFTVYNELTKVKYVTEGMRKPAFLSGEQKKAIVDLLFKTNRKVTVKQLKEDYFKKIECFDSVEISGVEDRFNASLGTYHDLLKIIKDKDFLDNEENEDILEDIVLTLTLFEDREMIEERLKTYAHLFDDKVMKQLKRRRYTGWGRLSRKLINGIRDKQSGKTILDFLKSDGFANRNFMQLIHDDSLTFKEDIQKAQVSGQGDSLHEHIANLAGSPAIKKGILQTVKVVDELVKVMGRHKPENIVIEMARENQTTQKGQKNSRERMKRIEEGIKELGSQILKEHPVENTQLQNEKLYLYYLQNGRDMYVDQELDINRLSDYDVDHIVPQSFLKDDSIDNKVLTRSDKARGKSDNVPSEEVVKKMKNYWRQLLNAKLITQRKFDNLTKAERGGLSELDKAGFIKRQLVETRQITKHVAQILDSRMNTKYDENDKLIREVKVITLKSKLVSDFRKDFQFYKVREINNYHHAHDAYLNAVVGTALIKKYPKLESEFVYGDYKVYDVRKMIAKSEQEIGKATAKYFFYSNIMNFFKTEITLANGEIRKRPLIETNGETGEIVWDKGRDFATVRKVLSMPQVNIVKKTEVQTGGFSKESILPKRNSDKLIARKKDWDPKKYGGFDSPTVAYSVLVVAKVEKGKSKKLKSVKELLGITIMERSSFEKNPIDFLEAKGYKEVKKDLIIKLPKYSLFELENGRKRMLASAGELQKGNELALPSKYVNFLYLASHYEKLKGSPEDNEQKQLFVEQHKHYLDEIIEQISEFSKRVILADANLDKVLSAYNKHRDKPIREQAENIIHLFTLTNLGAPAAFKYFDTTIDRKRYTSTKEVLDATLIHQSITGLYETRIDLSQLGGDGGGSSEAAAKPAPGGTLNIEDEYRLHETSKEPDVPLGSTWLSDFPQAWAETGGMGLAVRQAPLIIPLKATSTPVSIKQYPMSQEARLGIKPHIQRLLDQGILVPCQSPWNTPLLPVKKPGTNDYRPVQDLREVNKRVEDIHPTVPNPYNLLSGLPPSHQWYTVLDLKDAFFCLRLHPTSQPLFAFEWRDPEMGISGQLTWTRLPQGFKNSPTLFNEALHRDLADFRIQHPDLILLQYVDDLLLAATSEQDCQRGTRALLQTLGNLGYRASAKKAQICQKQVKYLGYLLKEGQRWLTEARKETVMGQPTPKTPRQLREFLGTAGFCRLWIPGFAEMAAPLYPLTKPGTLFNWGPDQQKAYQEIKQALLTAPALGLPDLTKPFELFVDEKQGYAKGVLTQKLGPWRRPVAYLSKKLDPVAAGWPPCLRMVAAIAVLTKDAGKLTMGQPLVILAPHAVEALVKQPPDRWLSNARMTHYQAMLLDTDRVQFGPVVALNPATLLPLPEKEAPHDCLEILAETHGTRPDLTDQPIPDADYTWYTDGSSFLQEGQRRAGAAVTTETEVIWARALPAGTSAQRAELIALTQALKMAEGKKLNVYTDSRYAFATAHVHGEIYRRRGWLTSEGREIKNKNEILALLKALFLPKRLSIIHCPGHQKGNSAEARGNRMADQAAREAAMKAVLETSTLLAGKRTADGSEFEKRTADGSEFESPKKKAKVE

SEQ ID NO: 4539 - protein, 2098 aa, synthetic construct
MPAAKRVKLDGGDKKYSIGLDIGTNSVGWAVITDEYKVPSKKFKVLGNTDRHSIKKNLIGALLFDSGETAEATRLKRTARRRYTRRKNRICYLQEIFSNEMAKVDDSFFHRLEESFLVEEDKKHERHPIFGNIVDEVAYHEKYPTIYHLRKKLVDSTDKADLRLIYLALAHMIKFRGHFLIEGDLNPDNSDVDKLFIQLVQTYNQLFEENPINASGVDAKAILSARLSKSRRLENLIAQLPGEKKNGLFGNLIALSLGLTPNFKSNFDLAEDAKLQLSKDTYDDDLDNLLAQIGDQYADLFLAAKNLSDAILLSDILRVNTEITKAPLSASMIKRYDEHHQDLTLLKALVRQQLPEKYKEIFFDQSKNGYAGYIDGGASQEEFYKFIKPILEKMDGTEELLVKLNREDLLRKQRTFDNGSIPHQIHLGELHAILRRQEDFYPFLKDNREKIEKILTFRIPYYVGPLARGNSRFAWMTRKSEETITPWNFEEVVDKGASAQSFIERMTNFDKNLPNEKVLPKHSLLYEYFTVYNELTKVKYVTEGMRKPAFLSGEQKKAIVDLLFKTNRKVTVKQLKEDYFKKIECFDSVEISGVEDRFNASLGTYHDLLKIIKDKDFLDNEENEDILEDIVLTLTLFEDREMIEERLKTYAHLFDDKVMKQLKRRRYTGWGRLSRKLINGIRDKQSGKTILDFLKSDGFANRNFMQLIHDDSLTFKEDIQKAQVSGQGDSLHEHIANLAGSPAIKKGILQTVKVVDELVKVMGRHKPENIVIEMARENQTTQKGQKNSRERMKRIEEGIKELGSQILKEHPVENTQLQNEKLYLYYLQNGRDMYVDQELDINRLSDYDVDHIVPQSFLKDDSIDNKVLTRSDKARGKSDNVPSEEVVKKMKNYWRQLLNAKLITQRKFDNLTKAERGGLSELDKAGFIKRQLVETRQITKHVAQILDSRMNTKYDENDKLIREVKVITLKSKLVSDFRKDFQFYKVREINNYHHAHDAYLNAVVGTALIKKYPKLESEFVYGDYKVYDVRKMIAKSEQEIGKATAKYFFYSNIMNFFKTEITLANGEIRKRPLIETNGETGEIVWDKGRDFATVRKVLSMPQVNIVKKTEVQTGGFSKESILPKRNSDKLIARKKDWDPKKYGGFDSPTVAYSVLVVAKVEKGKSKKLKSVKELLGITIMERSSFEKNPIDFLEAKGYKEVKKDLIIKLPKYSLFELENGRKRMLASAGELQKGNELALPSKYVNFLYLASHYEKLKGSPEDNEQKQLFVEQHKHYLDEIIEQISEFSKRVILADANLDKVLSAYNKHRDKPIREQAENIIHLFTLTNLGAPAAFKYFDTTIDRKRYTSTKEVLDATLIHQSITGLYETRIDLSQLGGDGGGSSPAPEAAAKGGTAPLEEEYRLFLEAPIQNVTLLEQWKREIPKVWAEINPPGLASTQAPIHVQLLSTALPVRVRQYPITLEAKRSLRETIRKFRAAGILRPVHSPWNTPLLPVRKSGTSEYRMVQDLREVNKRVETIHPTVPNPYTLLSLLPPDRIWYSVLDLKDAFFCIPLAPESQLIFAFEWADAEEGESGQLTWTRLPQGFKNSPTLFNEALNRDLQGFRLDHPSVSLLQYVDDLLIAADTQAACLSATRDLLMTLAELGYRVSGKKAQLCQEEVTYLGFKIHKGSRSLSNSRTQAILQIPVPKTKRQVREFLGKIGYCRLFIPGFAELAQPLYAATRPGNDPLVWGEKEEEAFQSLKLALTQPPALALPSLDKPFQLFVEETSGAAKGVLTQALGPWKRPVAYLSKRLDPVAAGWPRCLRAIAAAALLTREASKLTFGQDIEITSSHNLESLLRSPPDKWLTNARITQYQVLLLDPPRVRFKQTAALNPATLLPETDDTLPIHHCLDTLDSLTSTRPDLTDQPLAQAEATLFTDGSSYIRDGKRYAGAAVVTLDSVIWAEPLPIGTSAQKAELIALTKALEWSKDKSVNIYTDSRYAFATLHVHGMIYRERGWLTAGGKAIKNAPEILALLTAVWLPKRVAVMHCKGHQKDDAPTSTGNRRADEVAREVAIRPLSTQATISAGKRTADGSEFEKRTADGSEFESPKKKAKVE

SEQ ID NO: 4540 - protein, 2131 aa, synthetic construct
MPAAKRVKLDGGDKKYSIGLDIGTNSVGWAVITDEYKVPSKKFKVLGNTDRHSIKKNLIGALLFDSGETAEATRLKRTARRRYTRRKNRICYLQEIFSNEMAKVDDSFFHRLEESFLVEEDKKHERHPIFGNIVDEVAYHEKYPTIYHLRKKLVDSTDKADLRLIYLALAHMIKFRGHFLIEGDLNPDNSDVDKLFIQLVQTYNQLFEENPINASGVDAKAILSARLSKSRRLENLIAQLPGEKKNGLFGNLIALSLGLTPNFKSNFDLAEDAKLQLSKDTYDDDLDNLLAQIGDQYADLFLAAKNLSDAILLSDILRVNTEITKAPLSASMIKRYDEHHQDLTLLKALVRQQLPEKYKEIFFDQSKNGYAGYIDGGASQEEFYKFIKPILEKMDGTEELLVKLNREDLLRKQRTFDNGSIPHQIHLGELHAILRRQEDFYPFLKDNREKIEKILTFRIPYYVGPLARGNSRFAWMTRKSEETITPWNFEEVVDKGASAQSFIERMTNFDKNLPNEKVLPKHSLLYEYFTVYNELTKVKYVTEGMRKPAFLSGEQKKAIVDLLFKTNRKVTVKQLKEDYFKKIECFDSVEISGVEDRFNASLGTYHDLLKIIKDKDFLDNEENEDILEDIVLTLTLFEDREMIEERLKTYAHLFDDKVMKQLKRRRYTGWGRLSRKLINGIRDKQSGKTILDFLKSDGFANRNFMQLIHDDSLTFKEDIQKAQVSGQGDSLHEHIANLAGSPAIKKGILQTVKVVDELVKVMGRHKPENIVIEMARENQTTQKGQKNSRERMKRIEEGIKELGSQILKEHPVENTQLQNEKLYLYYLQNGRDMYVDQELDINRLSDYDVDHIVPQSFLKDDSIDNKVLTRSDKARGKSDNVPSEEVVKKMKNYWRQLLNAKLITQRKFDNLTKAERGGLSELDKAGFIKRQLVETRQITKHVAQILDSRMNTKYDENDKLIREVKVITLKSKLVSDFRKDFQFYKVREINNYHHAHDAYLNAVVGTALIKKYPKLESEFVYGDYKVYDVRKMIAKSEQEIGKATAKYFFYSNIMNFFKTEITLANGEIRKRPLIETNGETGEIVWDKGRDFATVRKVLSMPQVNIVKKTEVQTGGFSKESILPKRNSDKLIARKKDWDPKKYGGFDSPTVAYSVLVVAKVEKGKSKKLKSVKELLGITIMERSSFEKNPIDFLEAKGYKEVKKDLIIKLPKYSLFELENGRKRMLASAGELQKGNELALPSKYVNFLYLASHYEKLKGSPEDNEQKQLFVEQHKHYLDEIIEQISEFSKRVILADANLDKVLSAYNKHRDKPIREQAENIIHLFTLTNLGAPAAFKYFDTTIDRKRYTSTKEVLDATLIHQSITGLYETRIDLSQLGGDGGAEAAAKEAAAKEAAAKEAAAKALEAEAAAKEAAAKEAAAKEAAAKAGGTLNIEDEYRLHETSKGPDVPLGSTWLSDFPQAWAETGGMGLAVRQAPLIIPLKATSTPVSIKQYPMSQEARLGIKPHIQRLLDQGILVPCQSPWNTPLLPVKKPGTNDYRPVQDLREVNKRVEDIHPTVPNPYNLLSGLPPSHQWYTVLDLKDAFFCLRLHPTSQSLFAFEWRDPEMGISGQLTWTRLPQGFKNSPTLFNEALHRDLADFRIQHPDLILLQYVDDLLLAATSELDCQQGTRALLQTLGDLGYRASAKKAQICQKQVKYLGYLLKEGQRWLTEARKETVMGQPTPKTPRQLREFLGTAGFCRLWIPGFAEMAAPLYPLTKPGTLFEWGPDQQKAYQEIKQALLTAPALGLPDLTKPFELFVDEKQGYAKGVLTQKLGPWRRPVAYLSKKLDPVAAGWPPCLRMVAAIAVLTKDAGKLTMGQPLVILAPHAVEALVKQPPDRWLSNARMTHYQALLLDTDRVQFGPIVALNPATLLPLPEEGLQHDCLDILAEAHGTRPDLTDQPLPDADHTWYTDGSSFLQEGQRKAGAAVTTETEVVWAKALPAGTSAQRAELIALTQALKMAEGKKLNVYTDSRYAFATAHIHGEIYRRRGWLTSEGKEIKNKDEILALLKALFLPKRLSIIHCPGHQKGNRAEARGNRMADQAAREVATRETPETSTLLAGKRTADGSEFEKRTADGSEFESPKKKAKVE

SEQ ID NO: 4541 - protein, 2122 aa, synthetic construct
MPAAKRVKLDGGDKKYSIGLDIGTNSVGWAVITDEYKVPSKKFKVLGNTDRHSIKKNLIGALLFDSGETAEATRLKRTARRRYTRRKNRICYLQEIFSNEMAKVDDSFFHRLEESFLVEEDKKHERHPIFGNIVDEVAYHEKYPTIYHLRKKLVDSTDKADLRLIYLALAHMIKFRGHFLIEGDLNPDNSDVDKLFIQLVQTYNQLFEENPINASGVDAKAILSARLSKSRRLENLIAQLPGEKKNGLFGNLIALSLGLTPNFKSNFDLAEDAKLQLSKDTYDDDLDNLLAQIGDQYADLFLAAKNLSDAILLSDILRVNTEITKAPLSASMIKRYDEHHQDLTLLKALVRQQLPEKYKEIFFDQSKNGYAGYIDGGASQEEFYKFIKPILEKMDGTEELLVKLNREDLLRKQRTFDNGSIPHQIHLGELHAILRRQEDFYPFLKDNREKIEKILTFRIPYYVGPLARGNSRFAWMTRKSEETITPWNFEEVVDKGASAQSFIERMTNFDKNLPNEKVLPKHSLLYEYFTVYNELTKVKYVTEGMRKPAFLSGEQKKAIVDLLFKTNRKVTVKQLKEDYFKKIECFDSVEISGVEDRFNASLGTYHDLLKIIKDKDFLDNEENEDILEDIVLTLTLFEDREMIEERLKTYAHLFDDKVMKQLKRRRYTGWGRLSRKLINGIRDKQSGKTILDFLKSDGFANRNFMQLIHDDSLTFKEDIQKAQVSGQGDSLHEHIANLAGSPAIKKGILQTVKVVDELVKVMGRHKPENIVIEMARENQTTQKGQKNSRERMKRIEEGIKELGSQILKEHPVENTQLQNEKLYLYYLQNGRDMYVDQELDINRLSDYDVDHIVPQSFLKDDSIDNKVLTRSDKARGKSDNVPSEEVVKKMKNYWRQLLNAKLITQRKFDNLTKAERGGLSELDKAGFIKRQLVETRQITKHVAQILDSRMNTKYDENDKLIREVKVITLKSKLVSDFRKDFQFYKVREINNYHHAHDAYLNAVVGTALIKKYPKLESEFVYGDYKVYDVRKMIAKSEQEIGKATAKYFFYSNIMNFFKTEITLANGEIRKRPLIETNGETGEIVWDKGRDFATVRKVLSMPQVNIVKKTEVQTGGFSKESILPKRNSDKLIARKKDWDPKKYGGFDSPTVAYSVLVVAKVEKGKSKKLKSVKELLGITIMERSSFEKNPIDFLEAKGYKEVKKDLIIKLPKYSLFELENGRKRMLASAGELQKGNELALPSKYVNFLYLASHYEKLKGSPEDNEQKQLFVEQHKHYLDEIIEQISEFSKRVILADANLDKVLSAYNKHRDKPIREQAENIIHLFTLTNLGAPAAFKYFDTTIDRKRYTSTKEVLDATLIHQSITGLYETRIDLSQLGGDGGAEAAAKEAAAKEAAAKEAAAKALEAEAAAKEAAAKEAAAKEAAAKAGGIPWLMKKPLQLTTLVPLQEYEERLLKQTMLTGSYKEKLQSLFLKYDALWQHWENQVGHRRIKPHHIATGTVNPRPQKQYPINPKAKASIQTVINDLLKQGVLIQQNSIMNTPVYPVPKPDGKWRMVLDYREVNKTIPLIAAQNQHSAGILSSIFRGKYKTTLDLSNGFWAHSITPESYWLTAFTWLGQQYCWTRLPQGFLNSPALFNADVVDLLKEVPNVQVYVDDIYISHDDPREHLEQLEKVFSLLLNAGYVVSLKKSEIAQHEVEFLGFNITKEGRGLTETFKQKLLNITPPRDLKQLQSILGKLNFARNFIPNFSELVKPLYNIIATAPGKYITWTTDNSQQLQNIISMLNSAENLEERNPEVRLIMKVNTSPSAGYIRFYNEFAKRPIMYLNYVYTKAEVKFTNTEKLLTTIHKGLIKALDLGMGQEILVYSPIVSMTKIQKTPLPERKALPIRWITWMSYLEDPRIQFHYDKTLPELQQVPTVTDDIIAKIKHPSEFSMVFYTDGSAIKHPNVNKSHNAGMGIAQVQFKPEFTVINTWSIPLGDHTAQLAEVAAVEFACKKALKIDGPVLIVTDSFYVAESVNKELPYWQSNGFFNNKKKPLKHVSKWKSIADCIQLKPDIIIIHEKGHQPTASTFHTEGNNLADKLATQGSYVVNAGKRTADGSEFEKRTADGSEFESPKKKAKVE

SEQ ID NO: 4542-4600 - skipped (59 entries)

SEQ ID NO: 4601 - DNA, 16 bp, synthetic construct
  source 1..16: mol_type = other DNA
gcgcgctcgctcgctc

SEQ ID NO: 4602-4643 - skipped (42 entries)

SEQ ID NO: 4644 - protein, 9 aa, synthetic construct
PAAKRVKLD

SEQ ID NO: 4645-4648 - skipped (4 entries)

SEQ ID NO: 4649 - protein, 29 aa, synthetic construct
KRTADGSEFEKRTADGSEFESPKKKAKVE

SEQ ID NO: 4650 - protein, 10 aa, synthetic construct
KRTADGSEFE

SEQ ID NO: 4651 - protein, 19 aa, synthetic construct
KRTADGSEFESPKKKAKVE

SEQ ID NO: 4652-5001 - skipped (350 entries)

SEQ ID NO: 5002 - protein, 672 aa, Murine leukemia virus
TLNIEDEYRLHETSKEPDVSLGSTWLSDFPQAWAETGGMGLAVRQAPLIIPLKATSTPVSIKQYPMSQEARLGIKPHIQRLLDQGILVPCQSPWNTPLLPVKKPGTNDYRPVQDLREVNKRVEDIHPTVPNPYNLLSGLPPSHQWYTVLDLKDAFFCLRLHPTSQPLFAFEWRDPEMGISGQLTWTRLPQGFKNSPTLFDEALHRDLADFRIQHPDLILLQYVDDLLLAATSELDCQQGTRALLQTLGNLGYRASAKKAQICQKQVKYLGYLLKEGQRWLTEARKETVMGQPTPKTPRQLREFLGTAGFCRLWIPGFAEMAAPLYPLTKTGTLFNWGPDQQKAYQEIKQALLTAPALGLPDLTKPFELFVDEKQGYAKGVLTQKLGPWRRPVAYLSKKLDPVAAGWPPCLRMVAAIAVLTKDAGKLTMGQPLVILAPHAVEALVKQPPDRWLSNARMTHYQALLLDTDRVQFGPVVALNPATLLPLPEEGLQHNCLDILAEAHGTRPDLTDQPLPDADHTWYTDGSSLLQEGQRKAGAAVTTETEVIWAKALPAGTSAQRAELIALTQALKMAEGKKLNVYTDSRYAFATAHIHGEIYRRRGLLTSEGKEIKNKDEILALLKALFLPKRLSIIHCPGHQKGHSAEARGNRMADQAARKAAITETPDTSTLLI

SEQ ID NO: 5003 - protein, 671 aa, Murine leukemia virus
TLNIEDEHRLHETSKEPDVSLGSTWLSDFPQAWAETGGMGLAVRQAPLIIPLKATSTPVSIKQYPMSQEARLGIKPHIQRLLDQGILVPCQSPWNTPLLPVKKPGTNDYRPVQDLREVNKRVEDIHPTVPNPYNLLSGLPPSHQWYTVLDLKDAFFCLRLHPTSQPLFAFEWRDPEMGISGQLTWTRLPQGFKNSPTLFDEALHRDLADFRIQHPDLILLQYVDDLLLAATSELDCQQGTRALLQTLGNLGYRASAKKAQICQKQVKYLGYLLKEGQRWLTEARKETVMGQPTPKTPRQLREFLGTAGFCRLWIPGFAEMAAPLYPLTKTGTLFNWGPDQQKAYQEIKQALLTAPALGLPDLTKPFELFVDEKQGYAKGVLTQKLGPWRRPVAYLSKKLDPVAAGWPPCLRMVAAIAVLTKDAGKLTMGQPLVILAPHAVEALVKQPPDRWLSNARMTHYQALLLDTDRVQFGPVVALNPATLLPLPEEGLQHNCLDILAEAHGTRPDLTDQPLPDADHTWYTDGSSLLQEGQRKAGAAVTTETEVIWAKALPAGTSAQRAELIALTQALKMAEGKKLNVYTDSRYAFATAHIHGEIYRRRGLLTSEGKEIKNKDEILALLKALFLPKRLSIIHCPGHQKGHSAEARGNRMADQAARKAAITETPDTSTLL

SEQ ID NO: 5004 - protein, 660 aa, Murine leukemia virus
TLNIEDEHRLHETSKEPDVSLGSTWLSDFPQAWAETGGMGLAVRQAPLIIPLKATSTPVSIKQYPMSQEARLGIKPHIQRLLDQGILVPCQSPWNTPLLPVKKPGTNDYRPVQDLREVNKRVEDIHPTVPNPYNLLSGLPPSHQWYTVLDLKDAFFCLRLHPTSQPLFAFEWRDPEMGISGQLTWTRLPQGFKNSPTLFDEALHRDLADFRIQHPDLILLQYVDDLLLAATSELDCQQGTRALLQTLGNLGYRASAKKAQICQKQVKYLGYLLKEGQRWLTEARKETVMGQPTPKTPRQLREFLGTAGFCRLWIPGFAEMAAPLYPLTKTGTLFNWGPDQQKAYQEIKQALLTAPALGLPDLTKPFELFVDEKQGYAKGVLTQKLGPWRRPVAYLSKKLDPVAAGWPPCLRMVAAIAVLTKDAGKLTMGQPLVILAPHAVEALVKQPPDRWLSNARMTHYQALLLDTDRVQFGPVVALNPATLLPLPEEGLQHNCLDILAEAHGTRPDLTDQPLPDADHTWYTDGSSLLQEGQRKAGAAVTTETEVIWAKALPAGTSAQRAELIALTQALKMAEGKKLNVYTDSRYAFATAHIHGEIYRRRGLLTSEGKEIKNKDEILALLKALFLPKRLSIIHCPGHQKGHSAEARGNRMADQAARKAA

SEQ ID NO: 5005 - protein, 672 aa, synthetic construct
TLNIEDEYRLHETSKEPDVSLGSTWLSDFPQAWAETGGMGLAVRQAPLIIPLKATSTPVSIKQYPMSQEARLGIKPHIQRLLDQGILVPCQSPWNTPLLPVKKPGTNDYRPVQDLREVNKRVEDIHPTVPNPYNLLSGLPPSHQWYTVLDLKDAFFCLRLHPTSQPLFAFEWRDPEMGISGQLTWTRLPQGFKNSPTLFNEALHRDLADFRIQHPDLILLQYVDDLLLAATSELDCQQGTRALLQTLGNLGYRASAKKAQICQKQVKYLGYLLKEGQRWLTEARKETVMGQPTPKTPRQLREFLGKAGFCRLFIPGFAEMAAPLYPLTKPGTLFNWGPDQQKAYQEIKQALLTAPALGLPDLTKPFELFVDEKQGYAKGVLTQKLGPWRRPVAYLSKKLDPVAAGWPPCLRMVAAIAVLTKDAGKLTMGQPLVILAPHAVEALVKQPPDRWLSNARMTHYQALLLDTDRVQFGPVVALNPATLLPLPEEGLQHNCLDILAEAHGTRPDLTDQPLPDADHTWYTDGSSLLQEGQRKAGAAVTTETEVIWAKALPAGTSAQRAELIALTQALKMAEGKKLNVYTDSRYAFATAHIHGEIYRRRGWLTSEGKEIKNKDEILALLKALFLPKRLSIIHCPGHQKGHSAEARGNRMADQAARKAAITETPDTSTLLI

SEQ ID NO: 5006 - protein, 33 aa, synthetic construct
SGGSSGGSSGSETPGTSESATPESSGGSSGGSS

SEQ ID NO: 5007 - protein, 1369 aa, unidentified
SMDKKYSIGLAIGTNSVGWAVITDDYKVPSKKFKVLGNTDRHSIKKNLIGALLFDSGETAEATRLKRTARRRYTRRKNRICYLQEIFSNEMAKVDDSFFHRLEESFLVEEDKKHERHPIFGNIVDEVAYHEKYPTIYHLRKKLVDSTDKADLRLIYLALAHMIKFRGHFLIEGDLNPDNSDVDKLFIQLVQTYNQLFEENPINASGVDAKAILSARLSKSRRLENLIAQLPGEKKNGLFGNLIALSLGLTPNFKSNFDLAEDAKLQLSKDTYDDDLDNLLAQIGDQYADLFLAAKNLSDAILLSDILRVNTEITKAPLSASMIKRYDEHHQDLTLLKALVRQQLPEKYKEIFFDQSKNGYAGYIDGGASQEEFYKFIKPILEKMDGTEELLVKLNREDLLRKQRTFDNGSIPHQIHLGELHAILRRQEDFYPFLKDNREKIEKILTFRIPYYVGPLARGNSRFAWMTRKSEETITPWNFEEVVDKGASAQSFIERMTNFDKNLPNEKVLPKHSLLYEYFTVYNELTKVKYVTEGMRKPAFLSGEQKKAIVDLLFKTNRKVTVKQLKEDYFKKIECFDSVEISGVEDRFNASLGTYHDLLKIIKDKDFLDNEENEDILEDIVLTLTLFEDREMIEERLKTYAHLFDDKVMKQLKRRRYTGWGRLSRKLINGIRDKQSGKTILDFLKSDGFANRNFMQLIHDDSLTFKEDIQKAQVSGQGDSLHEHIANLAGSPAIKKGILQTVKVVDELVKVMGRHKPENIVIEMARENQTTQKGQKNSRERMKRIEEGIKELGSQILKEHPVENTQLQNEKLYLYYLQNGRDMYVDQELDINRLSDYDVDAIVPQSFLKDDSIDNKVLTRSDKNRGKSDNVPSEEVVKKMKNYWRQLLNAKLITQRKFDNLTKAERGGLSELDKAGFIKRQLVETRQITKHVAQILDSRMNTKYDENDKLIREVKVITLKSKLVSDFRKDFQFYKVREINNYHHAHDAYLNAVVGTALIKKYPKLESEFVYGDYKVYDVRKMIAKSEQEIGKATAKYFFYSNIMNFFKTEITLANGEIRKRPLIETNGETGEIVWDKGRDFATVRKVLSMPQVNIVKKTEVQTGGFSKESILPKRNSDKLIARKKDWDPKKYGGFDSPTVAYSVLVVAKVEKGKSKKLKSVKELLGITIMERSSFEKNPIDFLEAKGYKEVKKDLIIKLPKYSLFELENGRKRMLASAGELQKGNELALPSKYVNFLYLASHYEKLKGSPEDNEQKQLFVEQHKHYLDEIIEQISEFSKRVILADANLDKVLSAYNKHRDKPIREQAENIIHLFTLTNLGAPAAFKYFDTTIDRKRYTSTKEVLDATLIHQSITGLYETRIDLSQLGGD

SEQ ID NO: 5008 - DNA, 76 bp, synthetic construct
  source 1..76: mol_type = other DNA
gttttagagctagaaatagcaagttaaaataaggctagtccgttatcaacttgaaaaagtgggaccgagtcggtcc

SEQ ID NO: 5009 - protein, 30 aa, synthetic construct
MDSLLMNRRKFLYQFKNVRWAKGRRETYLC

SEQ ID NO: 5010 - protein, 28 aa, synthetic construct
PKKRKVEGADKRTADGSEFESPKKKRKV

SEQ ID NO: 5011 - protein, 22 aa, synthetic construct
RKSGKIAAIWKRPRKPKKKRKV

SEQ ID NO: 5012 - protein, 18 aa, synthetic construct
KRTADGSEFESPKKKRKV

SEQ ID NO: 5013 - protein, 17 aa, synthetic construct
KKTELQTTNAENKTKKL

SEQ ID NO: 5014 - protein, 19 aa, synthetic construct
KRGINDRNFWRGENGRKTR

SEQ ID NO: 5015 - protein, 16 aa, synthetic construct
KRPAATKKAGQAKKKK

SEQ ID NO: 5016 - protein, 29 aa, synthetic construct
PKKKRKVEGADKRTADGSEFESPKKKRKV

SEQ ID NO: 5017 - protein, 25 aa, synthetic construct
KRASSQALGTIPKRRSSSRFIKRKK

SEQ ID NO: 5018 - protein, 7 aa, synthetic construct
RKKRKKK

SEQ ID NO: 5019-5024 - skipped (6 entries)

SEQ ID NO: 5025 - protein, 4 aa, synthetic construct
SGGS

SEQ ID NO: 5026 - protein, 4 aa, synthetic construct
GGGS

SEQ ID NO: 5027 - protein, 5 aa, synthetic construct
GGGGS

SEQ ID NO: 5028 - protein, 5 aa, synthetic construct
EAAAK

SEQ ID NO: 5029 - DNA, 306 bp, synthetic construct
  source 1..306: mol_type = other DNA
tgcctgtcatacgaaaccgagatactgacagtagaatatggccttctgccaatcgggaagattgtggagaaacggatagaatgcacagtttactctgtcgataacaatggtaacatttatactcagccagttgcccagtggcacgaccggggagagcaggaagtattcgaatactgtctggaggatggaagtctcattagggccactaaggaccacaaatttatgacagtcgatggccagatgctgcctatagacgaaatctttgagcgagagttggacctcatgcgagttgacaaccttcctaat

SEQ ID NO: 5030 - protein, 102 aa, synthetic construct
CLSYETEILTVEYGLLPIGKIVEKRIECTVYSVDNNGNIYTQPVAQWHDRGEQEVFEYCLEDGSLIRATKDHKFMTVDGQMLPIDEIFERELDLMRVDNLPN

SEQ ID NO: 5031 - DNA, 108 bp, synthetic construct
  source 1..108: mol_type = other DNA
atgatcaagatagctacaaggaagtatcttggcaaacaaaacgtttatgatattggagtcgaaagagatcacaactttgctctgaagaacggattcatagcttctaat

SEQ ID NO: 5032 - protein, 36 aa, synthetic construct
MIKIATRKYLGKQNVYDIGVERDHNFALKNGFIASN

SEQ ID NO: 5033 - DNA, 303 bp, synthetic construct
  source 1..303: mol_type = other DNA
tgcctgtcttatgataccgagatacttaccgttgaatatggcttcttgcctattggaaagattgtcgaagagagaattgaatgcacagtatatactgtagacaagaatggtttcgtttacacacagcccattgctcaatggcacaatcgcggcgaacaagaagtatttgagtactgtctcgaggatggaagcatcatacgagcaactaaagatcataaattcatgaccactgacgggcagatgttgccaatagatgagatattcgagcggggcttggatctcaaacaagtggatggattgcca

SEQ ID NO: 5034 - protein, 101 aa, synthetic construct
CLSYDTEILTVEYGFLPIGKIVEERIECTVYTVDKNGFVYTQPIAQWHNRGEQEVFEYCLEDGSIIRATKDHKFMTTDGQMLPIDEIFERGLDLKQVDGLP

SEQ ID NO: 5035 - DNA, 159 bp, synthetic construct
  source 1..159: mol_type = other DNA
atgaagaggactgccgatggatcagagtttgaatctcccaagaagaagaggaaagtaaagataatatctcgaaaaagtcttggtacccaaaatgtctatgatattggagtggagaaagatcacaacttccttctcaagaacggtctcgtagccagcaac

SEQ ID NO: 5036 - protein, 53 aa, synthetic construct
MKRTADGSEFESPKKKRKVKIISRKSLGTQNVYDIGVEKDHNFLLKNGLVASN

SEQ ID NO: 5037-5101 - skipped (65 entries)

SEQ ID NO: 5102 - protein, 6 aa, synthetic construct
GGSGGS

SEQ ID NO: 5103 - protein, 9 aa, synthetic construct
GGSGGSGGS

SEQ ID NO: 5104 - protein, 12 aa, synthetic construct
GGSGGSGGSGGS

SEQ ID NO: 5105 - protein, 15 aa, synthetic construct
GGSGGSGGSGGSGGS

SEQ ID NO: 5106 - protein, 18 aa, synthetic construct
GGSGGSGGSGGSGGSGGS

SEQ ID NO: 5107 - protein, 5 aa, synthetic construct
GGGGS

SEQ ID NO: 5108 - protein, 10 aa, synthetic construct
GGGGSGGGGS

SEQ ID NO: 5109 - protein, 15 aa, synthetic construct
GGGGSGGGGSGGGGS

SEQ ID NO: 5110 - protein, 20 aa, synthetic construct
GGGGSGGGGSGGGGSGGGGS

SEQ ID NO: 5111 - protein, 25 aa, synthetic construct
GGGGSGGGGSGGGGSGGGGSGGGGS

SEQ ID NO: 5112 - protein, 30 aa, synthetic construct
GGGGSGGGGSGGGGSGGGGSGGGGSGGGGS

SEQ ID NO: 5113 - skipped

SEQ ID NO: 5114 - protein, 4 aa, synthetic construct
GGGG

SEQ ID NO: 5115 - protein, 5 aa, synthetic construct
GGGGG

SEQ ID NO: 5116 - protein, 6 aa, synthetic construct
GGGGGG

SEQ ID NO: 5117 - protein, 7 aa, synthetic construct
GGGGGGG

SEQ ID NO: 5118 - protein, 8 aa, synthetic construct
GGGGGGGG

SEQ ID NO: 5119 - skipped

SEQ ID NO: 5120 - protein, 6 aa, synthetic construct
GSSGSS

SEQ ID NO: 5121 - protein, 9 aa, synthetic construct
GSSGSSGSS

SEQ ID NO: 5122 - protein, 12 aa, synthetic construct
GSSGSSGSSGSS

SEQ ID NO: 5123 - protein, 15 aa, synthetic construct
GSSGSSGSSGSSGSS

SEQ ID NO: 5124 - protein, 18 aa, synthetic construct
GSSGSSGSSGSSGSSGSS

SEQ ID NO: 5125 - protein, 5 aa, synthetic construct
EAAAK

SEQ ID NO: 5126 - protein, 10 aa, synthetic construct
EAAAKEAAAK

SEQ ID NO: 5127 - protein, 15 aa, synthetic construct
EAAAKEAAAKEAAAK

SEQ ID NO: 5128 - protein, 20 aa, synthetic construct
EAAAKEAAAKEAAAKEAAAK

SEQ ID NO: 5129 - protein, 25 aa, synthetic construct
EAAAKEAAAKEAAAKEAAAKEAAAK

SEQ ID NO: 5130 - protein, 30 aa, synthetic construct
EAAAKEAAAKEAAAKEAAAKEAAAKEAAAK

SEQ ID NO: 5131 - skipped

SEQ ID NO: 5132 - protein, 5 aa, synthetic construct
PAPAP

SEQ ID NO: 5133 - protein, 7 aa, synthetic construct
PAPAPAP

SEQ ID NO: 5134 - protein, 9 aa, synthetic construct
PAPAPAPAP

SEQ ID NO: 5135 - protein, 11 aa, synthetic construct
PAPAPAPAPAP

SEQ ID NO: 5136 - protein, 13 aa, synthetic construct
PAPAPAPAPAPAP

SEQ ID NO: 5137 - protein, 6 aa, synthetic construct
GGSGGG

SEQ ID NO: 5138 - protein, 6 aa, synthetic construct
GGGGGS

SEQ ID NO: 5139 - protein, 6 aa, synthetic construct
GGSGSS

SEQ ID NO: 5140 - protein, 6 aa, synthetic construct
GSSGGS

SEQ ID NO: 5141 - protein, 8 aa, synthetic construct
GGSEAAAK

SEQ ID NO: 5142 - protein, 8 aa, synthetic construct
EAAAKGGS

SEQ ID NO: 5143 - protein, 6 aa, synthetic construct
GGSPAP

SEQ ID NO: 5144 - protein, 6 aa, synthetic construct
PAPGGS

SEQ ID NO: 5145 - protein, 6 aa, synthetic construct
GGGGSS

SEQ ID NO: 5146 - protein, 6 aa, synthetic construct
GSSGGG

SEQ ID NO: 5147 - protein, 8 aa, synthetic construct
GGGEAAAK

SEQ ID NO: 5148 - protein, 8 aa, synthetic construct
EAAAKGGG

SEQ ID NO: 5149 - protein, 6 aa, synthetic construct
GGGPAP

SEQ ID NO: 5150 - protein, 6 aa, synthetic construct
PAPGGG

SEQ ID NO: 5151 - protein, 8 aa, synthetic construct
GSSEAAAK

SEQ ID NO: 5152 - protein, 8 aa, synthetic construct
EAAAKGSS

SEQ ID NO: 5153 - protein, 6 aa, synthetic construct
GSSPAP

SEQ ID NO: 5154 - protein, 6 aa, synthetic construct
PAPGSS

SEQ ID NO: 5155 - protein, 8 aa, synthetic construct
EAAAKPAP

SEQ ID NO: 5156 - protein, 8 aa, synthetic construct
PAPEAAAK

SEQ ID NO: 5157 - protein, 9 aa, synthetic construct
GGSGGGGSS

SEQ ID NO: 5158 - protein, 9 aa, synthetic construct
GGSGSSGGG

SEQ ID NO: 5159 - protein, 9 aa, synthetic construct
GGGGGSGSS

SEQ ID NO: 5160 - protein, 9 aa, synthetic construct
GGGGSSGGS

SEQ ID NO: 5161 - protein, 9 aa, synthetic construct
GSSGGSGGG

SEQ ID NO: 5162 - protein, 9 aa, synthetic construct
GSSGGGGGS

SEQ ID NO: 5163 - protein, 11 aa, synthetic construct
GGSGGGEAAAK

SEQ ID NO: 5164 - protein, 11 aa, synthetic construct
GGSEAAAKGGG

SEQ ID NO: 5165 - protein, 11 aa, synthetic construct
GGGGGSEAAAK

SEQ ID NO: 5166 - protein, 11 aa, synthetic construct
GGGEAAAKGGS

SEQ ID NO: 5167 - protein, 11 aa, synthetic construct
EAAAKGGSGGG

SEQ ID NO: 5168 - protein, 11 aa, synthetic construct
EAAAKGGGGGS

SEQ ID NO: 5169 - protein, 9 aa, synthetic construct
GGSGGGPAP

SEQ ID NO: 5170 - protein, 9 aa, synthetic construct
GGSPAPGGG

SEQ ID NO: 5171 - protein, 9 aa, synthetic construct
GGGGGSPAP

SEQ ID NO: 5172 - protein, 9 aa, synthetic construct
GGGPAPGGS

SEQ ID NO: 5173 - protein, 9 aa, synthetic construct
PAPGGSGGG

SEQ ID NO: 5174 - protein, 9 aa, synthetic construct
PAPGGGGGS

SEQ ID NO: 5175 - protein, 11 aa, synthetic construct
GGSGSSEAAAK

SEQ ID NO: 5176 - protein, 11 aa, synthetic construct
GGSEAAAKGSS

SEQ ID NO: 5177 - protein, 11 aa, synthetic construct
GSSGGSEAAAK

SEQ ID NO: 5178 - protein, 11 aa, synthetic construct
GSSEAAAKGGS

SEQ ID NO: 5179 - protein, 11 aa, synthetic construct
EAAAKGGSGSS

SEQ ID NO: 5180 - protein, 11 aa, synthetic construct
EAAAKGSSGGS

SEQ ID NO: 5181 - protein, 9 aa, synthetic construct
GGSGSSPAP

SEQ ID NO: 5182 - protein, 9 aa, synthetic construct
GGSPAPGSS

SEQ ID NO: 5183 - protein, 9 aa, synthetic construct
GSSGGSPAP

SEQ ID NO: 5184 - protein, 9 aa, synthetic construct
GSSPAPGGS

SEQ ID NO: 5185 - protein, 9 aa, synthetic construct
PAPGGSGSS

SEQ ID NO: 5186 - protein, 9 aa, synthetic construct
PAPGSSGGS

SEQ ID NO: 5187 - protein, 11 aa, synthetic construct
GGSEAAAKPAP

SEQ ID NO: 5188 - protein, 11 aa, synthetic construct
GGSPAPEAAAK

SEQ ID NO: 5189 - protein, 11 aa, synthetic construct
EAAAKGGSPAP

SEQ ID NO: 5190 - protein, 11 aa, synthetic construct
EAAAKPAPGGS

SEQ ID NO: 5191 - protein, 11 aa, synthetic construct
PAPGGSEAAAK

SEQ ID NO: 5192 - protein, 11 aa, synthetic construct
PAPEAAAKGGS

SEQ ID NO: 5193 - protein, 11 aa, synthetic construct
GGGGSSEAAAK

SEQ ID NO: 5194 - protein, 11 aa, synthetic construct
GGGEAAAKGSS

SEQ ID NO: 5195 - protein, 11 aa, synthetic construct
GSSGGGEAAAK

SEQ ID NO: 5196 - protein, 11 aa, synthetic construct
GSSEAAAKGGG

SEQ ID NO: 5197 - protein, 11 aa, synthetic construct
EAAAKGGGGSS

SEQ ID NO: 5198 - protein, 11 aa, synthetic construct
EAAAKGSSGGG

SEQ ID NO: 5199 - protein, 9 aa, synthetic construct
GGGGSSPAP

SEQ ID NO: 5200 - protein, 9 aa, synthetic construct
GGGPAPGSS

SEQ ID NO: 5201 - protein, 9 aa, synthetic construct
GSSGGGPAP

SEQ ID NO: 5202 - protein, 9 aa, synthetic construct
GSSPAPGGG

SEQ ID NO: 5203 - protein, 9 aa, synthetic construct
PAPGGGGSS

SEQ ID NO: 5204 - protein, 9 aa, synthetic construct
PAPGSSGGG

SEQ ID NO: 5205 - protein, 11 aa, synthetic construct
GGGEAAAKPAP

SEQ ID NO: 5206 - protein, 11 aa, synthetic construct
GGGPAPEAAAK

SEQ ID NO: 5207 - protein, 11 aa, synthetic construct
EAAAKGGGPAP

SEQ ID NO: 5208 - protein, 11 aa, synthetic construct
EAAAKPAPGGG

SEQ ID NO: 5209 - protein, 11 aa, synthetic construct
PAPGGGEAAAK

SEQ ID NO: 5210 - protein, 11 aa, synthetic construct
PAPEAAAKGGG

SEQ ID NO: 5211 - protein, 11 aa, synthetic construct
GSSEAAAKPAP

SEQ ID NO: 5212 - protein, 11 aa, synthetic construct
GSSPAPEAAAK

SEQ ID NO: 5213 - protein, 11 aa, synthetic construct
EAAAKGSSPAP

SEQ ID NO: 5214 - protein, 11 aa, synthetic construct
EAAAKPAPGSS

SEQ ID NO: 5215 - protein, 11 aa, synthetic construct
PAPGSSEAAAK

SEQ ID NO: 5216 - protein, 11 aa, synthetic construct
PAPEAAAKGSS

SEQ ID NO: 5217 - protein, 46 aa, synthetic construct
AEAAAKEAAAKEAAAKEAAAKALEAEAAAKEAAAKEAAAKEAAAKA

SEQ ID NO: 5218 - protein, 15 aa, synthetic construct
GGGGSEAAAKGGGGS

SEQ ID NO: 5219 - protein, 15 aa, synthetic construct
EAAAKGGGGSEAAAK

SEQ ID NO: 5220 - protein, 16 aa, synthetic construct
SGSETPGTSESATPES

SEQ ID NO: 5221 - protein, 12 aa, synthetic construct
GSAGSAAGSGEF

SEQ ID NO: 5222 - protein, 33 aa, synthetic construct; identical to SEQ ID NO: 5006

SEQ ID NO: 5223 - protein, 30 aa, synthetic construct
AHFKISGEKRPSTDPGKKAKNPKKKKKKDP

SEQ ID NO: 5224 - protein, 12 aa, synthetic construct
AHRAKKMSKTHA

SEQ ID NO: 5225 - protein, 14 aa, synthetic construct
ASPEYVNLPINGNG

SEQ ID NO: 5226 - protein, 7 aa, synthetic construct
CTKRPRW

SEQ ID NO: 5227 - protein, 16 aa, synthetic construct
DKAKRVSRNKSEKKRR

SEQ ID NO: 5228 - protein, 15 aa, synthetic construct
EELRLKEELLKGIYA

SEQ ID NO: 5229 - protein, 16 aa, synthetic construct
EEQLRRRKNSRLNNTG

SEQ ID NO: 5230 - protein, 24 aa, synthetic construct
EVLKVIRTGKRKKKAWKRMVTKVC

SEQ ID NO: 5231 - protein, 15 aa, synthetic construct
HHHHHHHHHHHHQPH

SEQ ID NO: 5232 - protein, 17 aa, synthetic construct
HKKKHPDASVNFSEFSK

SEQ ID NO: 5233 - protein, 6 aa, synthetic construct
HKRTKK

SEQ ID NO: 5234 - protein, 29 aa, synthetic construct
IINGRKLKLKKSRRRSSQTSNNSFTSRRS

SEQ ID NO: 5235 - protein, 8 aa, synthetic construct
KAEQERRK

SEQ ID NO: 5236 - protein, 18 aa, synthetic construct
KEKRKRREELFIEQKKRK

SEQ ID NO: 5237 - protein, 14 aa, synthetic construct
KKGKDEWFSRGKKP

SEQ ID NO: 5238 - protein, 12 aa, synthetic construct
KKGPSVQKRKKT

SEQ ID NO: 5239 - protein, 16 aa, synthetic construct
KKKTVINDLLHYKKEK

SEQ ID NO: 5240 - protein, 17 aa, synthetic construct
KKNGGKGKNKPSAKIKK

SEQ ID NO: 5241 - protein, 13 aa, synthetic construct
KKPKWDDFKKKKK

SEQ ID NO: 5242 - protein, 6 aa, synthetic construct
KKRKKD

SEQ ID NO: 5243 - protein, 9 aa, synthetic construct
KKRRKRRRK

SEQ ID NO: 5244 - protein, 9 aa, synthetic construct
KKRRRRARK

SEQ ID NO: 5245 - protein, 7 aa, synthetic construct
KKSKRGR

SEQ ID NO: 5246 - protein, 8 aa, synthetic construct
KKSRKRGS

SEQ ID NO: 5247 - protein, 17 aa, synthetic construct
KKSTALSRELGKIMRRR

SEQ ID NO: 5248 - protein, 17 aa, synthetic construct
KKSYQDPEIIAHSRPRK

SEQ ID NO: 5249 - protein, 17 aa, synthetic construct
KKTGKNRKLKSKRVKTR

SEQ ID NO: 5250 - protein, 17 aa, synthetic construct
KKVSIAGQSGKLWRWKR

SEQ ID NO: 5251 - protein, 20 aa, synthetic construct
KKYENVVIKRSPRKRGRPRK

SEQ ID NO: 5252 - protein, 6 aa, synthetic construct
KNKKRK

SEQ ID NO: 5253 - protein, 6 aa, synthetic construct
KPKKKR

SEQ ID NO: 5254 - protein, 19 aa, synthetic construct
KRAMKDDSHGNSTSPKRRK

SEQ ID NO: 5255 - protein, 17 aa, synthetic construct
KRANSNLVAAYEKAKKK

SEQ ID NO: 5256 - protein, 22 aa, synthetic construct
KRASEDTTSGSPPKKSSAGPKR

SEQ ID NO: 5257 - protein, 16 aa, synthetic construct
KRFKRRWMVRKMKTKK

SEQ ID NO: 5258 - protein, 16 aa, synthetic construct
KRGLNSSFETSPKKVK

SEQ ID NO: 5259 - protein, 20 aa, synthetic construct
KRGNSSIGPNDLSKRKQRKK

SEQ ID NO: 5260 - protein, 23 aa, synthetic construct
KRIHSVSLSQSQIDPSKKVKRAK

SEQ ID NO: 5261 - protein, 15 aa, synthetic construct
KRKGKLKNKGSKRKK

SEQ ID NO: 5262 - protein, 13 aa, synthetic construct
KRRRRRRREKRKR

SEQ ID NO: 5263 - protein, 18 aa, synthetic construct
KRSNDRTYSPEEEKQRRA

SEQ ID NO: 5264 - protein, 21 aa, synthetic construct
KRTVATNGDASGAHRAKKMSK

SEQ ID NO: 5265 - protein, 20 aa, synthetic construct
KRVYNKGEDEQEHLPKGKKR

SEQ ID NO: 5266 - protein, 18 aa, synthetic construct
KSGKAPRRRAVSMDNSNK

SEQ ID NO: 5267 - protein, 19 aa, synthetic construct
KVNFLDMSLDDIIIYKELE

SEQ ID NO: 5268 - protein, 15 aa, synthetic construct
KVQHRIAKKTTRRRR

SEQ ID NO: 5269 - protein, 8 aa, synthetic construct
LSPSLSPL

SEQ ID NO: 5270 - protein, 30 aa, synthetic construct; identical to SEQ ID NO: 5009

SEQ ID NO: 5271 - protein, 52 aa, synthetic construct
MPQNEYIELHRKRYGYRLDYHEKKRKKESREAHERSKKAKKMIGLKAKLYHK

SEQ ID NO: 5272 - protein, 10 aa, synthetic construct
MVQLRPRASR

SEQ ID NO: 5273 - protein, 24 aa, synthetic construct
NNKLLAKRRKGGASPKDDPMDDIK

SEQ ID NO: 5274 - protein, 20 aa, synthetic construct
NYKRPMDGTYGPPAKRHEGE

SEQ ID NO: 5275 - protein, 19 aa, synthetic construct
PDTKRAKLDSSETTMVKKK

SEQ ID NO: 5276 - protein, 7 aa, synthetic construct
PEKRTKI

SEQ ID NO: 5277 - protein, 8 aa, synthetic construct
PGGRGKKK

SEQ ID NO: 5278 - protein, 18 aa, synthetic construct
PGKMDKGEHRQERRDRPY

SEQ ID NO: 5279 - protein, 11 aa, synthetic construct
PKKGDKYDKTD

SEQ ID NO: 5280 - protein, 7 aa, synthetic construct
PKKKSRK

SEQ ID NO: 5281 - protein, 7 aa, synthetic construct
PKKNKPE

SEQ ID NO: 5282 - protein, 7 aa, synthetic construct
PKKRAKV

SEQ ID NO: 5283 - protein, 9 aa, synthetic construct
PKPKKLKVE

SEQ ID NO: 5284 - protein, 7 aa, synthetic construct
PKRGRGR

SEQ ID NO: 5285 - protein, 9 aa, synthetic construct
PKRRLVDDA

SEQ ID NO: 5286 - protein, 7 aa, synthetic construct
PKRRRTY

SEQ ID NO: 5287 - protein, 6 aa, synthetic construct
PLFKRR

SEQ ID NO: 5288 - protein, 7 aa, synthetic construct
PLRKAKR

SEQ ID NO: 5289 - protein, 9 aa, synthetic construct
PPAKRKCIF

SEQ ID NO: 5290 - protein, 8 aa, synthetic construct
PPARRRRL

SEQ ID NO: 5291 - protein, 8 aa, synthetic construct
PPKKKRKV

SEQ ID NO: 5292 - protein, 10 aa, synthetic construct
PPNKRMKVKH

SEQ ID NO: 5293 - protein, 13 aa, synthetic construct
PPRIYPQLPSAPT

SEQ ID NO: 5294 - protein, 13 aa, synthetic construct
PQRSPFPKSSVKR

SEQ ID NO: 5295 - protein, 8 aa, synthetic construct
PRPRKVPR

SEQ ID NO: 5296 - protein, 9 aa, synthetic construct
PRRRVQRKR

SEQ ID NO: 5297 - protein, 7 aa, synthetic construct
PRRVRLK

SEQ ID NO: 5298 - protein, 7 aa, synthetic construct
PSRKRPR

SEQ ID NO: 5299 - protein, 8 aa, synthetic construct
PSSKKRKV

SEQ ID NO: 5300 - protein, 7 aa, synthetic construct
PTKKRVK

SEQ ID NO: 5301 - protein, 9 aa, synthetic construct
QRPGPYDRP

SEQ ID NO: 5302 - protein, 18 aa, synthetic construct
RGKGGKGLGKGGAKRHRK

SEQ ID NO: 5303 - protein, 24 aa, synthetic construct
RKAGKGGGGHKTTKKRSAKDEKVP

SEQ ID NO: 5304 - protein, 9 aa, synthetic construct
RKIKLKRAK

SEQ ID NO: 5305 - protein, 9 aa, synthetic construct
RKIKRKRAK

SEQ ID NO: 5306 - protein, 17 aa, synthetic construct
RKKEAPGPREELRSRGR

SEQ ID NO: 5307 - protein, 7 aa, synthetic construct
RKKRKGK

SEQ ID NO: 5308 - protein, 9 aa, synthetic construct
RKKRRQRRR

SEQ ID NO: 5309 - protein, 25 aa, synthetic construct
RKKSIPLSIKNLKRKHKRKKNKITR

SEQ ID NO: 5310 - protein, 20 aa, synthetic construct
RKLVKPKNTKMKTKLRTNPY

SEQ ID NO: 5311 - protein, 16 aa, synthetic construct
RKRLILSDKGQLDWKK

SEQ ID NO: 5312 - protein, 7 aa, synthetic construct
RKRLKSK

SEQ ID NO: 5313 - protein, 9 aa, synthetic construct
RKRRVRDNM

SEQ ID NO: 5314 - protein, 22 aa, synthetic construct
RKRSPKDKKEKDLDGAGKRRKT

SEQ ID NO: 5315 - protein, 22 aa, synthetic construct
RKRTPRVDGQTGENDMNKRRRK

SEQ ID NO: 5316 - protein, 10 aa, synthetic construct
RLPVRRRRRR

SEQ ID NO: 5317 - protein, 10 aa, synthetic construct
RLRFRKPKSK

SEQ ID NO: 5318 - protein, 6 aa, synthetic construct
RQQRKR

SEQ ID NO: 5319 - protein, 16 aa, synthetic construct
RRDLNSSFETSPKKVK

SEQ ID NO: 5320 - protein, 8 aa, synthetic construct
RRDRAKLR

SEQ ID NO: 5321 - protein, 8 aa, synthetic construct
RRGDGRRR

SEQ ID NO: 5322 - protein, 11 aa, synthetic construct
RRGRKRKAEKQ

SEQ ID NO: 5323 - protein, 6 aa, synthetic construct
RRKKRR

SEQ ID NO: 5324 - protein, 19 aa, synthetic construct
RRKRSKSEDMDSVESKRRR

SEQ ID NO: 5325 - protein, 6 aa, synthetic construct
RRKRSR

SEQ ID NO: 5326 - protein, 14 aa, synthetic construct
RRPKGKTLQKRKPK

SEQ ID NO: 5327 - protein, 18 aa, synthetic construct
RRRGFERFGPDNMGRKRK

SEQ ID NO: 5328 - protein, 15 aa, synthetic construct
RRRGKNKVAAQNCRK

SEQ ID NO: 5329 - protein, 6 aa, synthetic construct
RRRKRR

SEQ ID NO: 5330 - protein, 14 aa, synthetic construct
RRRQKQKGGASRRR

SEQ ID NO: 5331 - protein, 13 aa, synthetic construct
RRRREGPRARRRR

SEQ ID NO: 5332 - protein, 61 aa, synthetic construct
RRTIRLKLVYDKCDRSCKIQKKNRNKCQYCRFHKCLSVGMSHNAIRFGRMPRSEKAKLKAE

SEQ ID NO: 5333 - protein, 17 aa, synthetic construct
RRVPQRKEVSRCRKCRK

SEQ ID NO: 5334 - protein, 32 aa, synthetic construct
RVGGRRQAVECIEDLLNEPGQPLDLSCKRPRP

SEQ ID NO: 5335 - protein, 9 aa, synthetic construct
RVVKLRIAP

SEQ ID NO: 5336 - protein, 6 aa, synthetic construct
RVVRRR

SEQ ID NO: 5337 - protein, 12 aa, synthetic construct
SKRKTKISRKTR

SEQ ID NO: 5338 - protein, 16 aa, synthetic construct
SYVKTVPNRTRTYIKL

SEQ ID NO: 5339 - protein, 12 aa, synthetic construct
TGKNEAKKRKIA

SEQ ID NO: 5340 - protein, 30 aa, synthetic construct
TLSPASSPSSVSCPVIPASTDESPGSALNI

SEQ ID NO: 5341 - protein, 12 aa, synthetic construct
VSKKQRTGKKIH

SEQ ID NO: 5342 - protein, 9 aa, synthetic construct
SPKKKRKVE

SEQ ID NO: 5343 - protein, 19 aa, synthetic construct
KRTADGSEFESPKKKRKVE

SEQ ID NO: 5344 - protein, 9 aa, synthetic construct
PAAKRVKLD

SEQ ID NO: 5345 - protein, 7 aa, synthetic construct
PKKKRKV

SEQ ID NO: 5346 - protein, 30 aa, synthetic construct; identical to SEQ ID NO: 5009

SEQ ID NO: 5347 - protein, 11 aa, synthetic construct
SPKKKRKVEAS

SEQ ID NO: 5348 - protein, 16 aa, synthetic construct
MAPKKKRKVGIHRGVP

SEQ ID NO: 5349 - protein, 29 aa, synthetic construct
KRTADGSEFEKRTADGSEFESPKKKAKVE

SEQ ID NO: 5350 - protein, 10 aa, synthetic construct
KRTADGSEFE

SEQ ID NO: 5351 - protein, 19 aa, synthetic construct
KRTADGSEFESPKKKAKVE

SEQ ID NO: 5352-6000 - skipped (649 entries)

SEQ ID NO: 6001 - protein, 2090 aa, synthetic construct
MPAAKRVKLDGGDKKYSIGLDIGTNSVGWAVITDEYKVPSKKFKVLGNTDRHSIKKNLIGALLFDSGETAEATRLKRTARRRYTRRKNRICYLQEIFSNEMAKVDDSFFHRLEESFLVEEDKKHERHPIFGNIVDEVAYHEKYPTIYHLRKKLVDSTDKADLRLIYLALAHMIKFRGHFLIEGDLNPDNSDVDKLFIQLVQTYNQLFEENPINASGVDAKAILSARLSKSRRLENLIAQLPGEKKNGLFGNLIALSLGLTPNFKSNFDLAEDAKLQLSKDTYDDDLDNLLAQIGDQYADLFLAAKNLSDAILLSDILRVNTEITKAPLSASMIKRYDEHHQDLTLLKALVRQQLPEKYKEIFFDQSKNGYAGYIDGGASQEEFYKFIKPILEKMDGTEELLVKLNREDLLRKQRTFDNGSIPHQIHLGELHAILRRQEDFYPFLKDNREKIEKILTFRIPYYVGPLARGNSRFAWMTRKSEETITPWNFEEVVDKGASAQSFIERMTNFDKNLPNEKVLPKHSLLYEYFTVYNELTKVKYVTEGMRKPAFLSGEQKKAIVDLLFKTNRKVTVKQLKEDYFKKIECFDSVEISGVEDRFNASLGTYHDLLKIIKDKDFLDNEENEDILEDIVLTLTLFEDREMIEERLKTYAHLFDDKVMKQLKRRRYTGWGRLSRKLINGIRDKQSGKTILDFLKSDGFANRNFMQLIHDDSLTFKEDIQKAQVSGQGDSLHEHIANLAGSPAIKKGILQTVKVVDELVKVMGRHKPENIVIEMARENQTTQKGQKNSRERMKRIEEGIKELGSQILKEHPVENTQLQNEKLYLYYLQNGRDMYVDQELDINRLSDYDVDHIVPQSFLKDDSIDNKVLTRSDKARGKSDNVPSEEVVKKMKNYWRQLLNAKLITQRKFDNLTKAERGGLSELDKAGFIKRQLVETRQITKHVAQILDSRMNTKYDENDKLIREVKVITLKSKLVSDFRKDFQFYKVREINNYHHAHDAYLNAVVGTALIKKYPKLESEFVYGDYKVYDVRKMIAKSEQEIGKATAKYFFYSNIMNFFKTEITLANGEIRKRPLIETNGETGEIVWDKGRDFATVRKVLSMPQVNIVKKTEVQTGGFSKESILPKRNSDKLIARKKDWDPKKYGGFDSPTVAYSVLVVAKVEKGKSKKLKSVKELLGITIMERSSFEKNPIDFLEAKGYKEVKKDLIIKLPKYSLFELENGRKRMLASAGELQKGNELALPSKYVNFLYLASHYEKLKGSPEDNEQKQLFVEQHKHYLDEIIEQISEFSKRVILADANLDKVLSAYNKHRDKPIREQAENIIHLFTLTNLGAPAAFKYFDTTIDRKRYTSTKEVLDATLIHQSITGLYETRIDLSQLGGDGGGGSGGTAPLEEEYRLFLEAPIQNVTLLEQWKREIPKVWAEINPPGLASTQAPIHVQLLSTALPVRVRQYPITLEAKRSLRETIRKFRAAGILRPVHSPWNTPLLPVRKSGTSEYRMVQDLREVNKRVETIHPTVPNPYTLLSLLPPDRIWYSVLDLKDAFFCIPLAPESQLIFAFEWADAEEGESGQLTWTRLPQGFKNSPTLFNEALNRDLQGFRLDHPSVSLLQYVDDLLIAADTQAACLSATRDLLMTLAELGYRVSGKKAQLCQEEVTYLGFKIHKGSRSLSNSRTQAILQIPVPKTKRQVREFLGKIGYCRLFIPGFAELAQPLYAATRPGNDPLVWGEKEEEAFQSLKLALTQPPALALPSLDKPFQLFVEETSGAAKGVLTQALGPWKRPVAYLSKRLDPVAAGWPRCLRAIAAAALLTREASKLTFGQDIEITSSHNLESLLRSPPDKWLTNARITQYQVLLLDPPRVRFKQTAALNPATLLPETDDTLPIHHCLDTLDSLTSTRPDLTDQPLAQAEATLFTDGSSYIRDGKRYAGAAVVTLDSVIWAEPLPIGTSAQKAELIALTKALEWSKDKSVNIYTDSRYAFATLHVHGMIYRERGWLTAGGKAIKNAPEILALLTAVWLPKRVAVMHCKGHQKDDAPTSTGNRRADEVAREVAIRPLSTQATISAGKRTADGSEFEKRTADGSEFESPKKKAKVE

SEQ ID NO: 6002 - protein, 2094 aa, synthetic construct
MPAAKRVKLDGGDKKYSIGLDIGTNSVGWAVITDEYKVPSKKFKVLGNTDRHSIKKNLIGALLFDSGETAEATRLKRTARRRYTRRKNRICYLQEIFSNEMAKVDDSFFHRLEESFLVEEDKKHERHPIFGNIVDEVAYHEKYPTIYHLRKKLVDSTDKADLRLIYLALAHMIKFRGHFLIEGDLNPDNSDVDKLFIQLVQTYNQLFEENPINASGVDAKAILSARLSKSRRLENLIAQLPGEKKNGLFGNLIALSLGLTPNFKSNFDLAEDAKLQLSKDTYDDDLDNLLAQIGDQYADLFLAAKNLSDAILLSDILRVNTEITKAPLSASMIKRYDEHHQDLTLLKALVRQQLPEKYKEIFFDQSKNGYAGYIDGGASQEEFYKFIKPILEKMDGTEELLVKLNREDLLRKQRTFDNGSIPHQIHLGELHAILRRQEDFYPFLKDNREKIEKILTFRIPYYVGPLARGNSRFAWMTRKSEETITPWNFEEVVDKGASAQSFIERMTNFDKNLPNEKVLPKHSLLYEYFTVYNELTKVKYVTEGMRKPAFLSGEQKKAIVDLLFKTNRKVTVKQLKEDYFKKIECFDSVEISGVEDRFNASLGTYHDLLKIIKDKDFLDNEENEDILEDIVLTLTLFEDREMIEERLKTYAHLFDDKVMKQLKRRRYTGWGRLSRKLINGIRDKQSGKTILDFLKSDGFANRNFMQLIHDDSLTFKEDIQKAQVSGQGDSLHEHIANLAGSPAIKKGILQTVKVVDELVKVMGRHKPENIVIEMARENQTTQKGQKNSRERMKRIEEGIKELGSQILKEHPVENTQLQNEKLYLYYLQNGRDMYVDQELDINRLSDYDVDHIVPQSFLKDDSIDNKVLTRSDKARGKSDNVPSEEVVKKMKNYWRQLLNAKLITQRKFDNLTKAERGGLSELDKAGFIKRQLVETRQITKHVAQILDSRMNTKYDENDKLIREVKVITLKSKLVSDFRKDFQFYKVREINNYHHAHDAYLNAVVGTALIKKYPKLESEFVYGDYKVYDVRKMIAKSEQEIGKATAKYFFYSNIMNFFKTEITLANGEIRKRPLIETNGETGEIVWDKGRDFATVRKVLSMPQVNIVKKTEVQTGGFSKESILPKRNSDKLIARKKDWDPKKYGGFDSPTVAYSVLVVAKVEKGKSKKLKSVKELLGITIMERSSFEKNPIDFLEAKGYKEVKKDLIIKLPKYSLFELENGRKRMLASAGELQKGNELALPSKYVNFLYLASHYEKLKGSPEDNEQKQLFVEQHKHYLDEIIEQISEFSKRVILADANLDKVLSAYNKHRDKPIREQAENIIHLFTLTNLGAPAAFKYFDTTIDRKRYTSTKEVLDATLIHQSITGLYETRIDLSQLGGDGGGGSGGTVSLQDEHRLFDIPVTTSLPDVWLQDFPQAWAETGGLGRAKCQAPIIIDLKPTAVPVSIKQYPMSLEAHMGIRQHIIKFLELGVLRPCRSPWNTPLLPVKKPGTQDYRPVQDLREINKRTVDIHPTVPNPYNLLSTLKPDYSWYTVLDLKDAFFCLPLAPQSQELFAFEWKDPERGISGQLTWTRLPQGFKNSPTLFDEALHRDLTDFRTQHPEVTLLQYVDDLLLAAPTKKACTQGTRHLLQELGEKGYRASAKKAQICQTKVTYLGYILSEGKRWLTPGRIETVARIPPPRNPREVREFLGTAGFCRLWIPGFAELAAPLYALTKESTPFTWQTEHQLAFEALKKALLSAPALGLPDTSKPFTLFLDERQGIAKGVLTQKLGPWKRPVAYLSKKLDPVAAGWPPCLRIMAATAMLVKDSAKLTLGQPLTVITPHTLEAIVRQPPDRWITNARLTHYQALLLDTDRVQFGPPVTLNPATLLPVPENQPSPHDCRQVLAETHGTREDLKDQELPDADHTWYTDGSSYLDSGTRRAGAAVVDGHNTIWAQSLPPGTSAQKAELIALTKALELSKGKKANIYTDSRYAFATAHTHGSIYERRGLLTSEGKEIKNKAEIIALLKALFLPQEVAIIHCPGHQKGQDPVAVGNRQADRVARQAAMAEVLTLATEPDNTSHITAGKRTADGSEFEKRTADGSEFESPKKKAKVE

SEQ ID NO: 6003 - protein, 2079 aa, synthetic construct
MPAAKRVKLDGGDKKYSIGLDIGTNSVGWAVITDEYKVPSKKFKVLGNTDRHSIKKNLIGALLFDSGETAEATRLKRTARRRYTRRKNRICYLQEIFSNEMAKVDDSFFHRLEESFLVEEDKKHERHPIFGNIVDEVAYHEKYPTIYHLRKKLVDSTDKADLRLIYLALAHMIKFRGHFLIEGDLNPDNSDVDKLFIQLVQTYNQLFEENPINASGVDAKAILSARLSKSRRLENLIAQLPGEKKNGLFGNLIALSLGLTPNFKSNFDLAEDAKLQLSKDTYDDDLDNLLAQIGDQYADLFLAAKNLSDAILLSDILRVNTEITKAPLSASMIKRYDEHHQDLTLLKALVRQQLPEKYKEIFFDQSKNGYAGYIDGGASQEEFYKFIKPILEKMDGTEELLVKLNREDLLRKQRTFDNGSIPHQIHLGELHAILRRQEDFYPFLKDNREKIEKILTFRIPYYVGPLARGNSRFAWMTRKSEETITPWNFEEVVDKGASAQSFIERMTNFDKNLPNEKVLPKHSLLYEYFTVYNELTKVKYVTEGMRKPAFLSGEQKKAIVDLLFKTNRKVTVKQLKEDYFKKIECFDSVEISGVEDRFNASLGTYHDLLKIIKDKDFLDNEENEDILEDIVLTLTLFEDREMIEERLKTYAHLFDDKVMKQLKRRRYTGWGRLSRKLINGIRDKQSGKTILDFLKSDGFANRNFMQLIHDDSLTFKEDIQKAQVSGQGDSLHEHIANLAGSPAIKKGILQTVKVVDELVKVMGRHKPENIVIEMARENQTTQKGQKNSRERMKRIEEGIKELGSQILKEHPVENTQLQNEKLYLYYLQNGRDMYVDQELDINRLSDYDVDHIVPQSFLKDDSIDNKVLTRSDKARGKSDNVPSEEVVKKMKNYWRQLLNAKLITQRKFDNLTKAERGGLSELDKAGFIKRQLVETRQITKHVAQILDSRMNTKYDENDKLIREVKVITLKSKLVSDFRKDFQFYKVREINNYHHAHDAYLNAVVGTALIKKYPKLESEFVYGDYKVYDVRKMIAKSEQEIGKATAKYFFYSNIMNFFKTEITLANGEIRKRPLIETNGETGEIVWDKGRDFATVRKVLSMPQVNIVKKTEVQTGGFSKESILPKRNSDKLIARKKDWDPKKYGGFDSPTVAYSVLVVAKVEKGKSKKLKSVKELLGITIMERSSFEKNPIDFLEAKGYKEVKKDLIIKLPKYSLFELENGRKRMLASAGELQKGNELALPSKYVNFLYLASHYEKLKGSPEDNEQKQLFVEQHKHYLDEIIEQISEFSKRVILADANLDKVLSAYNKHRDKPIREQAENIIHLFTLTNLGAPAAFKYFDTTIDRKRYTSTKEVLDATLIHQSITGLYETRIDLSQLGGDGGGGSGGVPWILKKPLELTIKLDLEEQQGTLLNNSILSKKGKEELKQLFEKYSALWQSWENQVGHRRIRPHKIATGTVKPTPQKQYHINPKAKPDIQIVINDLLKQGVLIQKESTMNTPVYPVPKPNGRWRMVLDYRAVNKVTPLIAVQNQHSYGILGSLFKGRYKTTIDLSNGFWAHPIVPEDYWITAFTWQGKQYCWTVLPQGFLNSPGLFTGDVVDLLQGIPNVEVYVDDVYISHDSEKEHLEYLDILFNRLKEAGYIISLKKSNIANSIVDFLGFQITNEGRGLTDTFKEKLENITAPTTLKQLQSILGLLNFARNFIPDFTELIAPLYALIPKSTKNYVPWQIEHSTTLETLITKLNGAEYLQGRKGDKTLIMKVNASYTTGYIRYYNEGEKKPISYVSIVFSKTELKFTELEKLLTTVHKGLLKALDLSMGQNIHVYSPIVSMQNIQKTPQTAKKALASRWLSWLSYLEDPRIRFFYDPQMPALKDLPAVDTGKDNKKHPSNFQHIFYTDGSAITSPTKEGHLNAGMGIVYFINKDGNLQKQQEWSISLGNHTAQFAEIAAFEFALKKCLPLGGNILVVTDSNYVAKAYNEELDVWASNGFVNNRKKPLKHISKWKSVADLKRLRPDVVVTHEPGHQKLDSSPHAYGNNLADQLATQASFKVHAGKRTADGSEFEKRTADGSEFESPKKKAKVE

SEQ ID NO: 6004 - protein, 2087 aa, synthetic construct
MPAAKRVKLDGGDKKYSIGLDIGTNSVGWAVITDEYKVPSKKFKVLGNTDRHSIKKNLIGALLFDSGETAEATRLKRTARRRYTRRKNRICYLQEIFSNEMAKVDDSFFHRLEESFLVEEDKKHERHPIFGNIVDEVAYHEKYPTIYHLRKKLVDSTDKADLRLIYLALAHMIKFRGHFLIEGDLNPDNSDVDKLFIQLVQTYNQLFEENPINASGVDAKAILSARLSKSRRLENLIAQLPGEKKNGLFGNLIALSLGLTPNFKSNFDLAEDAKLQLSKDTYDDDLDNLLAQIGDQYADLFLAAKNLSDAILLSDILRVNTEITKAPLSASMIKRYDEHHQDLTLLKALVRQQLPEKYKEIFFDQSKNGYAGYIDGGASQEEFYKFIKPILEKMDGTEELLVKLNREDLLRKQRTFDNGSIPHQIHLGELHAILRRQEDFYPFLKDNREKIEKILTFRIPYYVGPLARGNSRFAWMTRKSEETITPWNFEEVVDKGASAQSFIERMTNFDKNLPNEKVLPKHSLLYEYFTVYNELTKVKYVTEGMRKPAFLSGEQKKAIVDLLFKTNRKVTVKQLKEDYFKKIECFDSVEISGVEDRFNASLGTYHDLLKIIKDKDFLDNEENEDILEDIVLTLTLFEDREMIEERLKTYAHLFDDKVMKQLKRRRYTGWGRLSRKLINGIRDKQSGKTILDFLKSDGFANRNFMQLIHDDSLTFKEDIQKAQVSGQGDSLHEHIANLAGSPAIKKGILQTVKVVDELVKVMGRHKPENIVIEMARENQTTQKGQKNSRERMKRIEEGIKELGSQILKEHPVENTQLQNEKLYLYYLQNGRDMYVDQELDINRLSDYDVDHIVPQSFLKDDSIDNKVLTRSDKARGKSDNVPSEEVVKKMKNYWRQLLNAKLITQRKFDNLTKAERGGLSELDKAGFIKRQLVETRQITKHVAQILDSRMNTKYDENDKLIREVKVITLKSKLVSDFRKDFQFYKVREINNYHHAHDAYLNAVVGTALIKKYPKLESEFVYGDYKVYDVRKMIAKSEQEIGKATAKYFFYSNIMNFFKTEITLANGEIRKRPLIETNGETGEIVWDKGRDFATVRKVLSMPQVNIVKKTEVQTGGFSKESILPKRNSDKLIARKKDWDPKKYGGFDSPTVAYSVLVVAKVEKGKSKKLKSVKELLGITIMERSSFEKNPIDFLEAKGYKEVKKDLIIKLPKYSLFELENGRKRMLASAGELQKGNELALPSKYVNFLYLASHYEKLKGSPEDNEQKQLFVEQHKHYLDEIIEQISEFSKRVILADANLDKVLSAYNKHRDKPIREQAENIIHLFTLTNLGAPAAFKYFDTTIDRKRYTSTKEVLDATLIHQSITGLYETRIDLSQLGGDGGGGSGGTLQLEEEYRLFEPESTQKQEMDIWLKNFPQAWAETGGMGTAHCQAPVLIQLKATATPISIRQYPMPHEAYQGIKPHIRRMLDQGILKPCQSPWNTPLLPVKKPGTEDYRPVQDLREVNKRVEDIHPTVPNPYNLLSTLPPSHPWYTVLDLKDAFFCLRLHSESQLLFAFEWRDPEIGLSGQLTWTRLPQGFKNSPTLFNEALHSDLADFRVRYPALVLLQYVDDLLLAAATRTECLEGTKALLETLGNKGYRASAKKAQICLQEVTYLGYSLKDGQRWLTKARKEAILSIPVPKNSRQVREFLGKAGYCRLFIPGFAELAAPLYPLTRPGTLFQWGTEQQLAFEDIKKALLSSPALGLPDITKPFELFIDENSGFAKGVLVQKLGPWKRPVAYLSKKLDTVASGWPPCLRMVAAIAILVKDAGKLTLGQPLTILTSHPVEALVRQPPNKWLSNARMTHYQAMLLDAERVHFGPTVSLNPATLLPLPSGGNHHDCLQILAETHGTRPDLTDQPLPDADLTWYTDGSSFIRNGEREAGAAVTTESEVIWAAPLPPGTSAQRAELIALTQALKMAEGKKLTVYTDSRYAFATTHVHGEIYRRRGWLTSEGKEIKNKNEILALLEALFLPKRLSIIHCPGHQKGDSPQAKGNRLADDTAKKAATETHSSLTVLPAGKRTADGSEFEKRTADGSEFESPKKKAKVE

SEQ ID NO: 6005 - protein, 2079 aa, synthetic construct
MPAAKRVKLDGGDKKYSIGLDIGTNSVGWAVITDEYKVPSKKFKVLGNTDRHSIKKNLIGALLFDSGETAEATRLKRTARRRYTRRKNRICYLQEIFSNEMAKVDDSFFHRLEESFLVEEDKKHERHPIFGNIVDEVAYHEKYPTIYHLRKKLVDSTDKADLRLIYLALAHMIKFRGHFLIEGDLNPDNSDVDKLFIQLVQTYNQLFEENPINASGVDAKAILSARLSKSRRLENLIAQLPGEKKNGLFGNLIALSLGLTPNFKSNFDLAEDAKLQLSKDTYDDDLDNLLAQIGDQYADLFLAAKNLSDAILLSDILRVNTEITKAPLSASMIKRYDEHHQDLTLLKALVRQQLPEKYKEIFFDQSKNGYAGYIDGGASQEEFYKFIKPILEKMDGTEELLVKLNREDLLRKQRTFDNGSIPHQIHLGELHAILRRQEDFYPFLKDNREKIEKILTFRIPYYVGPLARGNSRFAWMTRKSEETITPWNFEEVVDKGASAQSFIERMTNFDKNLPNEKVLPKHSLLYEYFTVYNELTKVKYVTEGMRKPAFLSGEQKKAIVDLLFKTNRKVTVKQLKEDYFKKIECFDSVEISGVEDRFNASLGTYHDLLKIIKDKDFLDNEENEDILEDIVLTLTLFEDREMIEERLKTYAHLFDDKVMKQLKRRRYTGWGRLSRKLINGIRDKQSGKTILDFLKSDGFANRNFMQLIHDDSLTFKEDIQKAQVSGQGDSLHEHIANLAGSPAIKKGILQTVKVVDELVKVMGRHKPENIVIEMARENQTTQKGQKNSRERMKRIEEGIKELGSQILKEHPVENTQLQNEKLYLYYLQNGRDMYVDQELDINRLSDYDVDHIVPQSFLKDDSIDNKVLTRSDKARGKSDNVPSEEVVKKMKNYWRQLLNAKLITQRKFDNLTKAERGGLSELDKAGFIKRQLVETRQITKHVAQILDSRMNTKYDENDKLIREVKVITLKSKLVSDFRKDFQFYKVREINNYHHAHDAYLNAVVGTALIKKYPKLESEFVYGDYKVYDVRKMIAKSEQEIGKATAKYFFYSNIMNFFKTEITLANGEIRKRPLIETNGETGEIVWDKGRDFATVRKVLSMPQVNIVKKTEVQTGGFSKESILPKRNSDKLIARKKDWDPKKYGGFDSPTVAYSVLVVAKVEKGKSKKLKSVKELLGITIMERSSFEKNPIDFLEAKGYKEVKKDLIIKLPKYSLFELENGRKRMLASAGELQKGNELALPSKYVNFLYLASHYEKLKGSPEDNEQKQLFVEQHKHYLDEIIEQISEFSKRVILADANLDKVLSAYNKHRDKPIREQAENIIHLFTLTNLGAPAAFKYFDTTIDRKRYTSTKEVLDATLIHQSITGLYETRIDLSQLGGDGGGGSGGVPWLTQQPLQLTILVPLQEYQEKILSKTALPEDQKQQLKTLFVKYDNLWQHWENQVGHRKIRPHNIATGDYPPRPQKQYPINPKAKPSIQIVIDDLLKQGVLTPQNSTMNTPVYPVPKPDGRWRMVLDYREVNKTIPLTAAQNQHSAGILATIVRQKYKTTLDLANGFWAHPITPESYWLTAFTWQGKQYCWTRLPQGFLNSPALFNADVVDLLKEIPNVQVYVDDIYLSHDDPKEHVQQLEKVFQILLQAGYVVSLKKSEIGQKTVEFLGFNITKEGRGLTDTFKTKLLNITPPKDLKQLQSILGKLNFARNFIPNFAELVQPLYNLIAPAKGKYIEWSEENTKQLNMVIEALNTASNLEERLPEQRLVIKVNTSPSAGYVRYYNETGKKPIMYLNYVFSKAELKFSMLEKLLTTMHKALIKAMDLAMGQEILVYSPIVSMTKIQKTPLPERKALPIRWITWMTYLEDPRIQFHYDKTLPELKHIPDVYTSSQSPVKHPSQYEGVFYTDGSAIKSPDPTKSNNAGMGIVHATYKPEYQVLNQWSIPLGNHTAQMAEIAAVEFACKKALKIPGPVLVITDSFYVAESANKELPYWKSNGFVNNKKKPLKHISKWKSIAECLSMKPDITIQHEKGISLQIPVFILKGNALADKLATQGSYVVNAGKRTADGSEFEKRTADGSEFESPKKKAKVE

SEQ ID NO: 6006 - protein, 2210 aa, synthetic construct
MPAAKRVKLDGGDKKYSIGLDIGTNSVGWAVITDEYKVPSKKFKVLGNTDRHSIKKNLIGALLFDSGETAEATRLKRTARRRYTRRKNRICYLQEIFSNEMAKVDDSFFHRLEESFLVEEDKKHERHPIFGNIVDEVAYHEKYPTIYHLRKKLVDSTDKADLRLIYLALAHMIKFRGHFLIEGDLNPDNSDVDKLFIQLVQTYNQLFEENPINASGVDAKAILSARLSKSRRLENLIAQLPGEKKNGLFGNLIALSLGLTPNFKSNFDLAEDAKLQLSKDTYDDDLDNLLAQIGDQYADLFLAAKNLSDAILLSDILRVNTEITKAPLSASMIKRYDEHHQDLTLLKALVRQQLPEKYKEIFFDQSKNGYAGYIDGGASQEEFYKFIKPILEKMDGTEELLVKLNREDLLRKQRTFDNGSIPHQIHLGELHAILRRQEDFYPFLKDNREKIEKILTFRIPYYVGPLARGNSRFAWMTRKSEETITPWNFEEVVDKGASAQSFIERMTNFDKNLPNEKVLPKHSLLYEYFTVYNELTKVKYVTEGMRKPAFLSGEQKKAIVDLLFKTNRKVTVKQLKEDYFKKIECFDSVEISGVEDRFNASLGTYHDLLKIIKDKDFLDNEENEDILEDIVLTLTLFEDREMIEERLKTYAHLFDDKVMKQLKRRRYTGWGRLSRKLINGIRDKQSGKTILDFLKSDGFANRNFMQLIHDDSLTFKEDIQKAQVSGQGDSLHEHIANLAGSPAIKKGILQTVKVVDELVKVMGRHKPENIVIEMARENQTTQKGQKNSRERMKRIEEGIKELGSQILKEHPVENTQLQNEKLYLYYLQNGRDMYVDQELDINRLSDYDVDHIVPQSFLKDDSIDNKVLTRSDKARGKSDNVPSEEVVKKMKNYWRQLLNAKLITQRKFDNLTKAERGGLSELDKAGFIKRQLVETRQITKHVAQILDSRMNTKYDENDKLIREVKVITLKSKLVSDFRKDFQFYKVREINNYHHAHDAYLNAVVGTALIKKYPKLESEFVYGDYKVYDVRKMIAKSEQEIGKATAKYFFYSNIMNFFKTEITLANGEIRKRPLIETNGETGEIVWDKGRDFATVRKVLSMPQVNIVKKTEVQTGGFSKESILPKRNSDKLIARKKDWDPKKYGGFDSPTVAYSVLVVAKVEKGKSKKLKSVKELLGITIMERSSFEKNPIDFLEAKGYKEVKKDLIIKLPKYSLFELENGRKRMLASAGELQKGNELALPSKYVNFLYLASHYEKLKGSPEDNEQKQLFVEQHKHYLDEIIEQISEFSKRVILADANLDKVLSAYNKHRDKPIREQAENIIHLFTLTNLGAPAAFKYFDTTIDRKRYTSTKEVLDATLIHQSITGLYETRIDLSQLGGDGGGGSGGTLGDQGSRGSDPLPEPRVTLTVEGIPTEFLVNTGAEHSVLTKPMGKMGSKRTVVAGATGSKVYPWTTKRLLKIGQKQVTHSFLVIPECPAPLLGRDLLTKLKAQIQFSTEGPQVTWEDRPAMCLVLNLEEEYRLHEKPVPPSIDPSWLQLFPMVWAEKAGMGLANQVPPVVVELKSDASPVAVRQYPMSKEAREGIRPHIQRFLDLGILVPCQSPWNTPLLPVKKPGTNDYRPVQDLREVNKRVQDIHPTVPNPYNLLSSLPPSHTWYSVLDLKDAFFCLKLHPNSQPLFAFEWRDPEKGNTGQLTWTRLPQGFKNSPTLFDEALHRDLASFRALNPQVVMLQYVDDLLVAAPTYRDCKEGTRRLLQELSKLGYRVSAKKAQLCREEVTYLGYLLKGGKRWLTPARKATVMKIPTPTTPRQVREFLGTAGFCRLWIPGFASLAAPLYPLTREKVPFTWTEAHQEAFGRIKEALLSAPALALPDLTKPFALYVDEKEGVARGVLTQTLGPWRRPVAYLSKKLDPVASGWPTCLKAIAAVALLLKDADKLTLGQNVLVIAPHNLESIVRQPPDRWMTNARMTHYQSLLLNERVSFAPPAILNPATLLPVESDDTPIHICSEILAEETGTRPDLRDQPLPGVPAWYTDGSSFIMDGRRQAGAAIVDNKRTVWASNLPEGTSAQKAELIALTQALRLAEGKSINIYTDSRYAFATAHVHGAIYKQRGLLTSAGKDIKNKEEILALLEAIHLPKRVAIIHCPGHQRGTDPVATGNRKADEAAKQAAQSTRILTETTKNAGKRTADGSEFEKRTADGSEFESPKKKAKVE

SEQ ID NO: 6007 - protein, 2210 aa, synthetic construct
MPAAKRVKLDGGDKKYSIGLDIGTNSVGWAVITDEYKVPSKKFKVLGNTDRHSIKKNLIGALLFDSGETAEATRLKRTARRRYTRRKNRICYLQEIFSNEMAKVDDSFFHRLEESFLVEEDKKHERHPIFGNIVDEVAYHEKYPTIYHLRKKLVDSTDKADLRLIYLALAHMIKFRGHFLIEGDLNPDNSDVDKLFIQLVQTYNQLFEENPINASGVDAKAILSARLSKSRRLENLIAQLPGEKKNGLFGNLIALSLGLTPNFKSNFDLAEDAKLQLSKDTYDDDLDNLLAQIGDQYADLFLAAKNLSDAILLSDILRVNTEITKAPLSASMIKRYDEHHQDLTLLKALVRQQLPEKYKEIFFDQSKNGYAGYIDGGASQEEFYKFIKPILEKMDGTEELLVKLNREDLLRKQRTFDNGSIPHQIHLGELHAILRRQEDFYPFLKDNREKIEKILTFRIPYYVGPLARGNSRFAWMTRKSEETITPWNFEEVVDKGASAQSFIERMTNFDKNLPNEKVLPKHSLLYEYFTVYNELTKVKYVTEGMRKPAFLSGEQKKAIVDLLFKTNRKVTVKQLKEDYFKKIECFDSVEISGVEDRFNASLGTYHDLLKIIKDKDFLDNEENEDILEDIVLTLTLFEDREMIEERLKTYAHLFDDKVMKQLKRRRYTGWGRLSRKLINGIRDKQSGKTILDFLKSDGFANRNFMQLIHDDSLTFKEDIQKAQVSGQGDSLHEHIANLAGSPAIKKGILQTVKVVDELVKVMGRHKPENIVIEMARENQTTQKGQKNSRERMKRIEEGIKELGSQILKEHPVENTQLQNEKLYLYYLQNGRDMYVDQELDINRLSDYDVDHIVPQSFLKDDSIDNKVLTRSDKARGKSDNVPSEEVVKKMKNYWRQLLNAKLITQRKFDNLTKAERGGLSELDKAGFIKRQLVETRQITKHVAQILDSRMNTKYDENDKLIREVKVITLKSKLVSDFRKDFQFYKVREINNYHHAHDAYLNAVVGTALIKKYPKLESEFVYGDYKVYDVRKMIAKSEQEIGKATAKYFFYSNIMNFFKTEITLANGEIRKRPLIETNGETGEIVWDKGRDFATVRKVLSMPQVNIVKKTEVQTGGFSKESILPKRNSDKLIARKKDWDPKKYGGFDSPTVAYSVLVVAKVEKGKSKKLKSVKELLGITIMERSSFEKNPIDFLEAKGYKEVKKDLIIKLPKYSLFELENGRKRMLASAGELQKGNELALPSKYVNFLYLASHYEKLKGSPEDNEQKQLFVEQHKHYLDEIIEQISEFSKRVILADANLDKVLSAYNKHRDKPIREQAENIIHLFTLTNLGAPAAFKYFDTTIDRKRYTSTKEVLDATLIHQSITGLYETRIDLSQLGGDGGGGSGGTLGDQGSRGSDPLPEPRVTLTVEGIPTEFLVNTGAEHSVLTKPMGKMGSKRTVVAGATGSKVYPWTTKRLLKIGQKQVTHSFLVIPECPAPLLGRDLLTKLKAQIQFSTEGPQVTWEDRPAMCLVLNLEEEYRLHEKPVPPSIDPSWLQLFPMVWAEKAGMGLANQVPPVVVELKSDASPVAVRQYPMSKEAREGIRPHIQRFLDLGILVPCQSPWNTPLLPVKKPGTNDYRPVQDLREVNKRVQDIHPTVPNPYNLLSSLPPSHTWYSVLDLKDAFFCLKLHPNSQPLFAFEWRDPEKGNTGQLTWTRLPQGFKNSPTLFNEALHRDLASFRALNPQVVMLQYVDDLLVAAPTYRDCKEGTRRLLQELSKLGYRVSAKKAQLCREEVTYLGYLLKGGKRWLTPARKATVMKIPTPTTPRQVREFLGTAGFCRLWIPGFASLAAPLYPLTRPKVPFTWTEAHQEAFGRIKEALLSAPALALPDLTKPFALYVDEKEGVARGVLTQTLGPWRRPVAYLSKKLDPVASGWPTCLKAIAAVALLLKDADKLTLGQNVLVIAPHNLESIVRQPPDRWMTNARMTHYQSLLLNERVSFAPPAILNPATLLPVESDDTPIHICSEILAEETGTRPDLRDQPLPGVPAWYTDGSSFIMDGRRQAGAAIVDNKRTVWASNLPEGTSAQKAELIALTQALRLAEGKSINIYTDSRYAFATAHVHGAIYKQRGWLTSAGKDIKNKEEILALLEAIHLPKRVAIIHCPGHQRGTDPVATGNRKADEAAKQAAQSTRILTETTKNAGKRTADGSEFEKRTADGSEFESPKKKAKVE

SEQ ID NO: 6008 - protein, 2088 aa, synthetic construct
MPAAKRVKLDGGDKKYSIGLDIGTNSVGWAVITDEYKVPSKKFKVLGNTDRHSIKKNLIGALLFDSGETAEATRLKRTARRRYTRRKNRICYLQEIFSNEMAKVDDSFFHRLEESFLVEEDKKHERHPIFGNIVDEVAYHEKYPTIYHLRKKLVDSTDKADLRLIYLALAHMIKFRGHFLIEGDLNPDNSDVDKLFIQLVQTYNQLFEENPINASGVDAKAILSARLSKSRRLENLIAQLPGEKKNGLFGNLIALSLGLTPNFKSNFDLAEDAKLQLSKDTYDDDLDNLLAQIGDQYADLFLAAKNLSDAILLSDILRVNTEITKAPLSASMIKRYDEHHQDLTLLKALVRQQLPEKYKEIFFDQSKNGYAGYIDGGASQEEFYKFIKPILEKMDGTEELLVKLNREDLLRKQRTFDNGSIPHQIHLGELHAILRRQEDFYPFLKDNREKIEKILTFRIPYYVGPLARGNSRFAWMTRKSEETITPWNFEEVVDKGASAQSFIERMTNFDKNLPNEKVLPKHSLLYEYFTVYNELTKVKYVTEGMRKPAFLSGEQKKAIVDLLFKTNRKVTVKQLKEDYFKKIECFDSVEISGVEDRFNASLGTYHDLLKIIKDKDFLDNEENEDILEDIVLTLTLFEDREMIEERLKTYAHLFDDKVMKQLKRRRYTGWGRLSRKLINGIRDKQSGKTILDFLKSDGFANRNFMQLIHDDSLTFKEDIQKAQVSGQGDSLHEHIANLAGSPAIKKGILQTVKVVDELVKVMGRHKPENIVIEMARENQTTQKGQKNSRERMKRIEEGIKELGSQILKEHPVENTQLQNEKLYLYYLQNGRDMYVDQELDINRLSDYDVDHIVPQSFLKDDSIDNKVLTRSDKARGKSDNVPSEEVVKKMKNYWRQLLNAKLITQRKFDNLTKAERGGLSELDKAGFIKRQLVETRQITKHVAQILDSRMNTKYDENDKLIREVKVITLKSKLVSDFRKDFQFYKVREINNYHHAHDAYLNAVVGTALIKKYPKLESEFVYGDYKVYDVRKMIAKSEQEIGKATAKYFFYSNIMNFFKTEITLANGEIRKRPLIETNGETGEIVWDKGRDFATVRKVLSMPQVNIVKKTEVQTGGFSKESILPKRNSDKLIARKKDWDPKKYGGFDSPTVAYSVLVVAKVEKGKSKKLKSVKELLGITIMERSSFEKNPIDFLEAKGYKEVKKDLIIKLPKYSLFELENGRKRMLASAGELQKGNELALPSKYVNFLYLASHYEKLKGSPEDNEQKQLFVEQHKHYLDEIIEQISEFSKRVILADANLDKVLSAYNKHRDKPIREQAENIIHLFTLTNLGAPAAFKYFDTTIDRKRYTSTKEVLDATLIHQSITGLYETRIDLSQLGGDGGGGSGGTLNLEDEYRLYETSAEPEVSPGSTWLSDFPQAWAETGGMGLAVRQAPLIIPLKATSTPVSIKQYPMSQEAKLGIKPHIQRLLDQGILVPCQSPWNTPLLPVKKPGTNDYRPVQDLREVNKRVEDIHPTVPNPYNLLSGLPPSHRWYTVLDLKDAFFCLRLHPTSQPLFAFEWRDPGMGISGQLTWTRLPQGFKNSPTLFNEALHRDLADFRIQHPDLILLQYVDDILLAATSELDCQQGTRALLLTLGNLGYRASAKKAQLCQKQVKYLGYLLKEGQRWLTEARKETVMGQPTPKTPRQLREFLGKAGFCRLFIPGFAEMAAPLYPLTKPGTLFNWGPDQQKAYQEIKQALLTAPALGLPDLTKPFELFVDEKQGYAKGVLTQKLGPWRRPVAYLSKKLDPVAAGWPPCLRMVAAIAVLRKDAGKLTMGQPLVILAPHAVEALVKQPPDRWLSNARMTHYQAMLLDTDRVQFGPVVALNPATLLPLPEEGAPHDCLEILAETHGTRPDLTDQPIPDADHTWYTDGSSFLQEGQRKAGAAVTTETEVIWARALPAGTSAQRAELIALTQALKMAEGKRLNVYTDSRYAFATAHIHGEIYRRRGWLTSEGREIKNKSEILALLKALFLPKRLSIIHCLGHQKGDSAEARGNRLADQAAREAAIKTPPDTSTLLAGKRTADGSEFEKRTADGSEFESPKKKAKVE

SEQ ID NO: 6009 - protein, 2088 aa, synthetic construct
MPAAKRVKLDGGDKKYSIGLDIGTNSVGWAVITDEYKVPSKKFKVLGNTDRHSIKKNLIGALLFDSGETAEATRLKRTARRRYTRRKNRICYLQEIFSNEMAKVDDSFFHRLEESFLVEEDKKHERHPIFGNIVDEVAYHEKYPTIYHLRKKLVDSTDKADLRLIYLALAHMIKFRGHFLIEGDLNPDNSDVDKLFIQLVQTYNQLFEENPINASGVDAKAILSARLSKSRRLENLIAQLPGEKKNGLFGNLIALSLGLTPNFKSNFDLAEDAKLQLSKDTYDDDLDNLLAQIGDQYADLFLAAKNLSDAILLSDILRVNTEITKAPLSASMIKRYDEHHQDLTLLKALVRQQLPEKYKEIFFDQSKNGYAGYIDGGASQEEFYKFIKPILEKMDGTEELLVKLNREDLLRKQRTFDNGSIPHQIHLGELHAILRRQEDFYPFLKDNREKIEKILTFRIPYYVGPLARGNSRFAWMTRKSEETITPWNFEEVVDKGASAQSFIERMTNFDKNLPNEKVLPKHSLLYEYFTVYNELTKVKYVTEGMRKPAFLSGEQKKAIVDLLFKTNRKVTVKQLKEDYFKKIECFDSVEISGVEDRFNASLGTYHDLLKIIKDKDFLDNEENEDILEDIVLTLTLFEDREMIEERLKTYAHLFDDKVMKQLKRRRYTGWGRLSRKLINGIRDKQSGKTILDFLKSDGFANRNFMQLIHDDSLTFKEDIQKAQVSGQGDSLHEHIANLAGSPAIKKGILQTVKVVDELVKVMGRHKPENIVIEMARENQTTQKGQKNSRERMKRIEEGIKELGSQILKEHPVENTQLQNEKLYLYYLQNGRDMYVDQELDINRLSDYDVDHIVPQSFLKDDSIDNKVLTRSDKARGKSDNVPSEEVVKKMKNYWRQLLNAKLITQRKFDNLTKAERGGLSELDKAGFIKRQLVETRQITKHVAQILDSRMNTKYDENDKLIREVKVITLKSKLVSDFRKDFQFYKVREINNYHHAHDAYLNAVVGTALIKKYPKLESEFVYGDYKVYDVRKMIAKSEQEIGKATAKYFFYSNIMNFFKTEITLANGEIRKRPLIETNGETGEIVWDKGRDFATVRKVLSMPQVNIVKKTEVQTGGFSKESILPKRNSDKLIARKKDWDPKKYGGFDSPTVAYSVLVVAKVEKGKSKKLKSVKELLGITIMERSSFEKNPIDFLEAKGYKEVKKDLIIKLPKYSLFELENGRKRMLASAGELQKGNELALPSKYVNFLYLASHYEKLKGSPEDNEQKQLFVEQHKHYLDEIIEQISEFSKRVILADANLDKVLSAYNKHRDKPIREQAENIIHLFTLTNLGAPAAFKYFDTTIDRKRYTSTKEVLDATLIHQSITGLYETRIDLSQLGGDGGGGSGGTLGIEDEYRLHETSTEPDVSLGSTWLSDFPQAWAETGGMGLAVRQAPLIIPLKATSTPVSIQQYPMSHEARLGIKPHIQRLLDQGILVPCQSPWNTPLLPVKKPGTNDYRPVQDLREVNKRVEDIHPTVPNPYNLLSGLPPSHQWYTVLDLKDAFFCLRLHPTSQPLFAFEWRDPGMGISGQLTWTRLPQGFKNSPTLFNEALHRDLADFRIQHPDLILLQYVDDILLAATSELDCQQGTRALLQTLGDLGYRASAKKAQICQKQVKYLGYLLREGQRWLTEARKETVMGQPVPKTPRQLREFLGTAGFCRLWIPGFAEMAAPLYPLTKPGTLFSWGPDQQKAYQEIKQALLTAPALGLPDLTKPFELFVDEKQGYAKGVLTQKLGPWRRPVAYLSKKLDPVAAGWPPCLRMVAAIAVLTKDAGKLTMGQPLVILAPHAVEALVKQPPDRWLSNARMTHYQAMLLDTDRVQFGPVVALNPATLLPLPEEGAPHDCLEILAETHGTRPDLTDQPIPDADHTWYTDGSSFLQEGQRKAGAAVTTETEVIWAGALPAGTSAQRAELIALTQALKMAEGKRLNVYTDSRYAFATAHIHGEIYRRRGWLTSEGREIKNKSEILALLKALFLPKRLSIIHCLGHQKGDSAEARGNRLADQAAREAAIKTPPDTSTLLAGKRTADGSEFEKRTADGSEFESPKKKAKVE

SEQ ID NO: 6010 - protein, 2088 aa, synthetic construct
MPAAKRVKLDGGDKKYSIGLDIGTNSVGWAVITDEYKVPSKKFKVLGNTDRHSIKKNLIGALLFDSGETAEATRLKRTARRRYTRRKNRICYLQEIFSNEMAKVDDSFFHRLEESFLVEEDKKHERHPIFGNIVDEVAYHEKYPTIYHLRKKLVDSTDKADLRLIYLALAHMIKFRGHFLIEGDLNPDNSDVDKLFIQLVQTYNQLFEENPINASGVDAKAILSARLSKSRRLENLIAQLPGEKKNGLFGNLIALSLGLTPNFKSNFDLAEDAKLQLSKDTYDDDLDNLLAQIGDQYADLFLAAKNLSDAILLSDILRVNTEITKAPLSASMIKRYDEHHQDLTLLKALVRQQLPEKYKEIFFDQSKNGYAGYIDGGASQEEFYKFIKPILEKMDGTEELLVKLNREDLLRKQRTFDNGSIPHQIHLGELHAILRRQEDFYPFLKDNREKIEKILTFRIPYYVGPLARGNSRFAWMTRKSEETITPWNFEEVVDKGASAQSFIERMTNFDKNLPNEKVLPKHSLLYEYFTVYNELTKVKYVTEGMRKPAFLSGEQKKAIVDLLFKTNRKVTVKQLKEDYFKKIECFDSVEISGVEDRFNASLGTYHDLLKIIKDKDFLDNEENEDILEDIVLTLTLFEDREMIEERLKTYAHLFDDKVMKQLKRRRYTGWGRLSRKLINGIRDKQSGKTILDFLKSDGFANRNFMQLIHDDSLTFKEDIQKAQVSGQGDSLHEHIANLAGSPAIKKGILQTVKVVDELVKVMGRHKPENIVIEMARENQTTQKGQKNSRERMKRIEEGIKELGSQILKEHPVENTQLQNEKLYLYYLQNGRDMYVDQELDINRLSDYDVDHIVPQSFLKDDSIDNKVLTRSDKARGKSDNVPSEEVVKKMKNYWRQLLNAKLITQRKFDNLTKAERGGLSELDKAGFIKRQLVETRQITKHVAQILDSRMNTKYDENDKLIREVKVITLKSKLVSDFRKDFQFYKVREINNYHHAHDAYLNAVVGTALIKKYPKLESEFVYGDYKVYDVRKMIAKSEQEIGKATAKYFFYSNIMNFFKTEITLANGEIRKRPLIETNGETGEIVWDKGRDFATVRKVLSMPQVNIVKKTEVQTGGFSKESILPKRNSDKLIARKKDWDPKKYGGFDSPTVAYSVLVVAKVEKGKSKKLKSVKELLGITIMERSSFEKNPIDFLEAKGYKEVKKDLIIKLPKYSLFELENGRKRMLASAGELQKGNELALPSKYVNFLYLASHYEKLKGSPEDNEQKQLFVEQHKHYLDEIIEQISEFSKRVILADANLDKVLSAYNKHRDKPIREQAENIIHLFTLTNLGAPAAFKYFDTTIDRKRYTSTKEVLDATLIHQSITGLYETRIDLSQLGGDGGGGSGGTLNIEDEYRLHETSKEPDVSLGSTWLSDFPQAWAETGGMGLAVRQAPLIIPLKATSTPVSIKQYPMSQEARLGIKPHIQRLLDQGILVPCQSPWNTPLLPVKKPGTNDYRPVQDLREVNKRVEDIHPTVPNPYNLLSGLPPSHQWYTVLDLKDAFFCLRLHPTSQPLFAFEWRDPEMGISGQLTWTRLPQGFKNSPTLFNEALHRDLAGFRIQHPDLILLQYVDDLLLAATSELDCQQGTRALLQTLGDLGYRASAKKAQICQKQVKYLGYLLKEGQRWLTEARKETVMGQPIPKTPRQLREFLGTAGFCRLWIPGFAEMAAPLYPLTKPGTLFNWGPDQQKAFQEIKQALLTAPALGLPDLTKPFELFVDEKQGYAKGVLTQKLGPWRRPVAYLSKKLDPVAAGWPPCLRMVAAIAVLTKDAGKLTMGQPLVILAPHAVEALVKQPPDRWLSNARMTHYQALLLDTDRVQFGPVVALNPATLLPLPEEGLQHDCLDILAEAHGTRSDLMDQPLPDADHTWYTDGSSFLQEGQRKAGAAVTTETEVIWARALPAGTSAQRAELIALTQALKMAEGKKLNVYTDSRYAFATAHIHGEIYRRRGWLTSEGKEIKNKDEILALLKALFLPKRLSIIHCPGHQKGNSAEARGNRMADQAAREVATRETPETSTLLAGKRTADGSEFEKRTADGSEFESPKKKAKVE

SEQ ID NO: 6011 - protein, 2088 aa, synthetic construct
MPAAKRVKLDGGDKKYSIGLDIGTNSVGWAVITDEYKVPSKKFKVLGNTDRHSIKKNLIGALLFDSGETAEATRLKRTARRRYTRRKNRICYLQEIFSNEMAKVDDSFFHRLEESFLVEEDKKHERHPIFGNIVDEVAYHEKYPTIYHLRKKLVDSTDKADLRLIYLALAHMIKFRGHFLIEGDLNPDNSDVDKLFIQLVQTYNQLFEENPINASGVDAKAILSARLSKSRRLENLIAQLPGEKKNGLFGNLIALSLGLTPNFKSNFDLAEDAKLQLSKDTYDDDLDNLLAQIGDQYADLFLAAKNLSDAILLSDILRVNTEITKAPLSASMIKRYDEHHQDLTLLKALVRQQLPEKYKEIFFDQSKNGYAGYIDGGASQEEFYKFIKPILEKMDGTEELLVKLNREDLLRKQRTFDNGSIPHQIHLGELHAILRRQEDFYPFLKDNREKIEKILTFRIPYYVGPLARGNSRFAWMTRKSEETITPWNFEEVVDKGASAQSFIERMTNFDKNLPNEKVLPKHSLLYEYFTVYNELTKVKYVTEGMRKPAFLSGEQKKAIVDLLFKTNRKVTVKQLKEDYFKKIECFDSVEISGVEDRFNASLGTYHDLLKIIKDKDFLDNEENEDILEDIVLTLTLFEDREMIEERLKTYAHLFDDKVMKQLKRRRYTGWGRLSRKLINGIRDKQSGKTILDFLKSDGFANRNFMQLIHDDSLTFKEDIQKAQVSGQGDSLHEHIANLAGSPAIKKGILQTVKVVDELVKVMGRHKPENIVIEMARENQTTQKGQKNSRERMKRIEEGIKELGSQILKEHPVENTQLQNEKLYLYYLQNGRDMYVDQELDINRLSDYDVDHIVPQSFLKDDSIDNKVLTRSDKARGKSDNVPSEEVVKKMKNYWRQLLNAKLITQRKFDNLTKAERGGLSELDKAGFIKRQLVETRQITKHVAQILDSRMNTKYDENDKLIREVKVITLKSKLVSDFRKDFQFYKVREINNYHHAHDAYLNAVVGTALIKKYPKLESEFVYGDYKVYDVRKMIAKSEQEIGKATAKYFFYSNIMNFFKTEITLANGEIRKRPLIETNGETGEIVWDKGRDFATVRKVLSMPQVNIVKKTEVQTGGFSKESILPKRNSDKLIARKKDWDPKKYGGFDSPTVAYSVLVVAKVEKGKSKKLKSVKELLGITIMERSSFEKNPIDFLEAKGYKEVKKDLIIKLPKYSLFELENGRKRMLASAGELQKGNELALPSKYVNFLYLASHYEKLKGSPEDNEQKQLFVEQHKHYLDEIIEQISEFSKRVILADANLDKVLSAYNKHRDKPIREQAENIIHLFTLTNLGAPAAFKYFDTTIDRKRYTSTKEVLDATLIHQSITGLYETRIDLSQLGGDGGGGSGGTLNIEDEYRLHETSKGPDVPLGSTWLSDFPQAWAETGGMGLAVRQAPLIIPLKATSTPVSIKQYPMSQEARLGIKPHIQRLLDQGILVPCQSPWNTPLLPVKKPGTNDYRPVQDLREVNKRVEDIHPTVPNPYNLLSGLPPSHQWYTVLDLKDAFFCLRLHPTSQSLFAFEWRDPEMGISGQLTWTRLPQGFKNSPTLFNEALHRDLADFRIQHPDLILLQYVDDLLLAATSELDCQQGTRALLQTLGDLGYRASAKKAQICQKQVKYLGYLLKEGQRWLTEARKETVMGQPTPKTPRQLREFLGTAGFCRLWIPGFAEMAAPLYPLTKPGTLFEWGPDQQKAYQEIKQALLTAPALGLPDLTKPFELFVDEKQGYAKGVLTQKLGPWRRPVAYLSKKLDPVAAGWPPCLRMVAAIAVLTKDAGKLTMGQPLVILAPHAVEALVKQPPDRWLSNARMTHYQALLLDTDRVQFGPIVALNPATLLPLPEEGLQHDCLDILAEAHGTRPDLTDQPLPDADHTWYTDGSSFLQEGQRKAGAAVTTETEVVWAKALPAGTSAQRAELIALTQALKMAEGKKLNVYTDSRYAFATAHIHGEIYRRRGWLTSEGKEIKNKDEILALLKALFLPKRLSIIHCPGHQKGNRAEARGNRMADQAAREVATRETPETSTLLAGKRTADGSEFEKRTADGSEFESPKKKAKVE

SEQ ID NO: 6012 - protein, 2088 aa, synthetic construct
MPAAKRVKLDGGDKKYSIGLDIGTNSVGWAVITDEYKVPSKKFKVLGNTDRHSIKKNLIGALLFDSGETAEATRLKRTARRRYTRRKNRICYLQEIFSNEMAKVDDSFFHRLEESFLVEEDKKHERHPIFGNIVDEVAYHEKYPTIYHLRKKLVDSTDKADLRLIYLALAHMIKFRGHFLIEGDLNPDNSDVDKLFIQLVQTYNQLFEENPINASGVDAKAILSARLSKSRRLENLIAQLPGEKKNGLFGNLIALSLGLTPNFKSNFDLAEDAKLQLSKDTYDDDLDNLLAQIGDQYADLFLAAKNLSDAILLSDILRVNTEITKAPLSASMIKRYDEHHQDLTLLKALVRQQLPEKYKEIFFDQSKNGYAGYIDGGASQEEFYKFIKPILEKMDGTEELLVKLNREDLLRKQRTFDNGSIPHQIHLGELHAILRRQEDFYPFLKDNREKIEKILTFRIPYYVGPLARGNSRFAWMTRKSEETITPWNFEEVVDKGASAQSFIERMTNFDKNLPNEKVLPKHSLLYEYFTVYNELTKVKYVTEGMRKPAFLSGEQKKAIVDLLFKTNRKVTVKQLKEDYFKKIECFDSVEISGVEDRFNASLGTYHDLLKIIKDKDFLDNEENEDILEDIVLTLTLFEDREMIEERLKTYAHLFDDKVMKQLKRRRYTGWGRLSRKLINGIRDKQSGKTILDFLKSDGFANRNFMQLIHDDSLTFKEDIQKAQVSGQGDSLHEHIANLAGSPAIKKGILQTVKVVDELVKVMGRHKPENIVIEMARENQTTQKGQKNSRERMKRIEEGIKELGSQILKEHPVENTQLQNEKLYLYYLQNGRDMYVDQELDINRLSDYDVDHIVPQSFLKDDSIDNKVLTRSDKARGKSDNVPSEEVVKKMKNYWRQLLNAKLITQRKFDNLTKAERGGLSELDKAGFIKRQLVETRQITKHVAQILDSRMNTKYDENDKLIREVKVITLKSKLVSDFRKDFQFYKVREINNYHHAHDAYLNAVVGTALIKKYPKLESEFVYGDYKVYDVRKMIAKSEQEIGKATAKYFFYSNIMNFFKTEITLANGEIRKRPLIETNGETGEIVWDKGRDFATVRKVLSMPQVNIVKKTEVQTGGFSKESILPKRNSDKLIARKKDWDPKKYGGFDSPTVAYSVLVVAKVEKGKSKKLKSVKELLGITIMERSSFEKNPIDFLEAKGYKEVKKDLIIKLPKYSLFELENGRKRMLASAGELQKGNELALPSKYVNFLYLASHYEKLKGSPEDNEQKQLFVEQHKHYLDEIIEQISEFSKRVILADANLDKVLSAYNKHRDKPIREQAENIIHLFTLTNLGAPAAFKYFDTTIDRKRYTSTKEVLDATLIHQSITGLYETRIDLSQLGGDGGGGSGGTLNIEDEYRLHETSKGPDVPLGSTWLSDFPQAWAETGGMGLAVRQAPLIIPLKATSTPVSIKQYPMSQEARLGIKPHIQRLLDQGILVPCQSPWNTPLLPVKKPGTNDYRPVQDLREVNKRVEDIHPTVPNPYNLLSGLPPSHQWYTVLDLKDAFFCLRLHPTSQSLFAFEWRDPEMGISGQLTWTRLPQGFKNSPTLFNEALHRDLADFRIQHPDLILLQYVDDLLLAATSELDCQQGTRALLQTLGDLGYRASAKKAQICQKQVKYLGYLLKEGQRWLTEARKETVMGQPTPKTPRQLREFLGKAGFCRLFIPGFAEMAAPLYPLTKPGTLFEWGPDQQKAYQEIKQALLTAPALGLPDLTKPFELFVDEKQGYAKGVLTQKLGPWRRPVAYLSKKLDPVAAGWPPCLRMVAAIAVLTKDAGKLTMGQPLVILAPHAVEALVKQPPDRWLSNARMTHYQALLLDTDRVQFGPIVALNPATLLPLPEEGLQHDCLDILAEAHGTRPDLTDQPLPDADHTWYTDGSSFLQEGQRKAGAAVTTETEVVWAKALPAGTSAQRAELIALTQALKMAEGKKLNVYTDSRYAFATAHIHGEIYRRRGWLTSEGKEIKNKDEILALLKALFLPKRLSIIHCPGHQKGNRAEARGNRMADQAAREVATRETPETSTLLAGKRTADGSEFEKRTADGSEFESPKKKAKVE

SEQ ID NO: 6013 - protein, 2086 aa, synthetic construct
MPAAKRVKLDGGDKKYSIGLDIGTNSVGWAVITDEYKVPSKKFKVLGNTDRHSIKKNLIGALLFDSGETAEATRLKRTARRRYTRRKNRICYLQEIFSNEMAKVDDSFFHRLEESFLVEEDKKHERHPIFGNIVDEVAYHEKYPTIYHLRKKLVDSTDKADLRLIYLALAHMIKFRGHFLIEGDLNPDNSDVDKLFIQLVQTYNQLFEENPINASGVDAKAILSARLSKSRRLENLIAQLPGEKKNGLFGNLIALSLGLTPNFKSNFDLAEDAKLQLSKDTYDDDLDNLLAQIGDQYADLFLAAKNLSDAILLSDILRVNTEITKAPLSASMIKRYDEHHQDLTLLKALVRQQLPEKYKEIFFDQSKNGYAGYIDGGASQEEFYKFIKPILEKMDGTEELLVKLNREDLLRKQRTFDNGSIPHQIHLGELHAILRRQEDFYPFLKDNREKIEKILTFRIPYYVGPLARGNSRFAWMTRKSEETITPWNFEEVVDKGASAQSFIERMTNFDKNLPNEKVLPKHSLLYEYFTVYNELTKVKYVTEGMRKPAFLSGEQKKAIVDLLFKTNRKVTVKQLKEDYFKKIECFDSVEISGVEDRFNASLGTYHDLLKIIKDKDFLDNEENEDILEDIVLTLTLFEDREMIEERLKTYAHLFDDKVMKQLKRRRYTGWGRLSRKLINGIRDKQSGKTILDFLKSDGFANRNFMQLIHDDSLTFKEDIQKAQVSGQGDSLHEHIANLAGSPAIKKGILQTVKVVDELVKVMGRHKPENIVIEMARENQTTQKGQKNSRERMKRIEEGIKELGSQILKEHPVENTQLQNEKLYLYYLQNGRDMYVDQELDINRLSDYDVDHIVPQSFLKDDSIDNKVLTRSDKARGKSDNVPSEEVVKKMKNYWRQLLNAKLITQRKFDNLTKAERGGLSELDKAGFIKRQLVETRQITKHVAQILDSRMNTKYDENDKLIREVKVITLKSKLVSDFRKDFQFYKVREINNYHHAHDAYLNAVVGTALIKKYPKLESEFVYGDYKVYDVRKMIAKSEQEIGKATAKYFFYSNIMNFFKTEITLANGEIRKRPLIETNGETGEIVWDKGRDFATVRKVLSMPQVNIVKKTEVQTGGFSKESILPKRNSDKLIARKKDWDPKKYGGFDSPTVAYSVLVVAKVEKGKSKKLKSVKELLGITIMERSSFEKNPIDFLEAKGYKEVKKDLIIKLPKYSLFELENGRKRMLASAGELQKGNELALPSKYVNFLYLASHYEKLKGSPEDNEQKQLFVEQHKHYLDEIIEQISEFSKRVILADANLDKVLSAYNKHRDKPIREQAENIIHLFTLTNLGAPAAFKYFDTTIDRKRYTSTKEVLDATLIHQSITGLYETRIDLSQLGGDGGGGSGGVLNLEEEYRLHEKPVPSSIDPSWLQLFPTVWAERAGMGLANQVPPVVVELRSGASPVAVRQYPMSKEAREGIRPHIQRFLDLGVLVPCQSPWNTPLLPVKKPGTNDYRPVQDLREINKRVQDIHPTVPNPYNLLSSLPPSHTWYSVLDLKDAFFCLKLHPNSQPLFAFEWRDPEKGNTGQLTWTRLPQGFKNSPTLFNEALHRDLAPFRALNPQVVLLQYVDDLLVAAPTYRDCKEGTQKLLQELSKLGYRVSAKKAQLCQKEVTYLGYLLKEGKRWLTPARKATVMKIPPPTTPRQVREFLGKAGFCRLFIPGFASLAAPLYPLTKPSIPFIWTEEHQKAFDRIKEALLSAPALALPDLTKPFTLYVDERAGVARGVLTQTLGPWRRPVAYLSKKLDPVASGWPTCLKAVAAVALLLKDADKLTLGQNVTVIASHSLESIVRQPPDRWMTNARMTHYQSLLLNERVSFAPPAVLNPATLLPVESEATPVHRCSEILAEETGTRRDLKDQPLPGVPAWYTDGSSFIAEGKRRAGAAIVDGKRTVWASSLPEGTSAQKAELVALTQALRLAEGKDINIYTDSRYAFATAHIHGAIYKQRGWLTSAGKDIKNKEEILALLEAIHLPKRVAIIHCPGHQKGNDPVATGNRRADEAAKQAALSTRVLAETTKPAGKRTADGSEFEKRTADGSEFESPKKKAKVE

SEQ ID NO: 6014 - protein, 2088 aa, synthetic construct
MPAAKRVKLDGGDKKYSIGLDIGTNSVGWAVITDEYKVPSKKFKVLGNTDRHSIKKNLIGALLFDSGETAEATRLKRTARRRYTRRKNRICYLQEIFSNEMAKVDDSFFHRLEESFLVEEDKKHERHPIFGNIVDEVAYHEKYPTIYHLRKKLVDSTDKADLRLIYLALAHMIKFRGHFLIEGDLNPDNSDVDKLFIQLVQTYNQLFEENPINASGVDAKAILSARLSKSRRLENLIAQLPGEKKNGLFGNLIALSLGLTPNFKSNFDLAEDAKLQLSKDTYDDDLDNLLAQIGDQYADLFLAAKNLSDAILLSDILRVNTEITKAPLSASMIKRYDEHHQDLTLLKALVRQQLPEKYKEIFFDQSKNGYAGYIDGGASQEEFYKFIKPILEKMDGTEELLVKLNREDLLRKQRTFDNGSIPHQIHLGELHAILRRQEDFYPFLKDNREKIEKILTFRIPYYVGPLARGNSRFAWMTRKSEETITPWNFEEVVDKGASAQSFIERMTNFDKNLPNEKVLPKHSLLYEYFTVYNELTKVKYVTEGMRKPAFLSGEQKKAIVDLLFKTNRKVTVKQLKEDYFKKIECFDSVEISGVEDRFNASLGTYHDLLKIIKDKDFLDNEENEDILEDIVLTLTLFEDREMIEERLKTYAHLFDDKVMKQLKRRRYTGWGRLSRKLINGIRDKQSGKTILDFLKSDGFANRNFMQLIHDDSLTFKEDIQKAQVSGQGDSLHEHIANLAGSPAIKKGILQTVKVVDELVKVMGRHKPENIVIEMARENQTTQKGQKNSRERMKRIEEGIKELGSQILKEHPVENTQLQNEKLYLYYLQNGRDMYVDQELDINRLSDYDVDHIVPQSFLKDDSIDNKVLTRSDKARGKSDNVPSEEVVKKMKNYWRQLLNAKLITQRKFDNLTKAERGGLSELDKAGFIKRQLVETRQITKHVAQILDSRMNTKYDENDKLIREVKVITLKSKLVSDFRKDFQFYKVREINNYHHAHDAYLNAVVGTALIKKYPKLESEFVYGDYKVYDVRKMIAKSEQEIGKATAKYFFYSNIMNFFKTEITLANGEIRKRPLIETNGETGEIVWDKGRDFATVRKVLSMPQVNIVKKTEVQTGGFSKESILPKRNSDKLIARKKDWDPKKYGGFDSPTVAYSVLVVAKVEKGKSKKLKSVKELLGITIMERSSFEKNPIDFLEAKGYKEVKKDLIIKLPKYSLFELENGRKRMLASAGELQKGNELALPSKYVNFLYLASHYEKLKGSPEDNEQKQLFVEQHKHYLDEIIEQISEFSKRVILADANLDKVLSAYNKHRDKPIREQAENIIHLFTLTNLGAPAAFKYFDTTIDRKRYTSTKEVLDATLIHQSITGLYETRIDLSQLGGDGGGGSGGTLNIEDEYRLHETSKEPDVPLGSTWLSDFPQAWAETGGMGLAVRQAPLIIPLKATSTPVSIKQYPMSQEARLGIKPHIQRLLDQGILVPCQSPWNTPLLPVKKPGTNDYRPVQDLREVNKRVEDIHPTVPNPYNLLSGLPPSHQWYTVLDLKDAFFCLRLHPTSQPLFAFEWRDPEMGISGQLTWTRLPQGFKNSPTLFNEALHRDLADFRIQHPDLILLQYVDDLLLAATSEQDCQRGTRALLQTLGNLGYRASAKKAQICQKQVKYLGYLLKEGQRWLTEARKETVMGQPTPKTPRQLREFLGKAGFCRLFIPGFAEMAAPLYPLTKPGTLFNWGPDQQKAYQEIKQALLTAPALGLPDLTKPFELFVDEKQGYAKGVLTQKLGPWRRPVAYLSKKLDPVAAGWPPCLRMVAAIAVLTKDAGKLTMGQPLVILAPHAVEALVKQPPDRWLSNARMTHYQAMLLDTDRVQFGPVVALNPATLLPLPEKEAPHDCLEILAETHGTRPDLTDQPIPDADYTWYTDGSSFLQEGQRRAGAAVTTETEVIWARALPAGTSAQRAELIALTQALKMAEGKKLNVYTDSRYAFATAHVHGEIYRRRGWLTSEGREIKNKNEILALLKALFLPKRLSIIHCPGHQKGNSAEARGNRMADQAAREAAMKAVLETSTLLAGKRTADGSEFEKRTADGSEFESPKKKAKVE

SEQ ID NO: 6015 - protein, 2093 aa, synthetic construct
MPAAKRVKLDGGDKKYSIGLDIGTNSVGWAVITDEYKVPSKKFKVLGNTDRHSIKKNLIGALLFDSGETAEATRLKRTARRRYTRRKNRICYLQEIFSNEMAKVDDSFFHRLEESFLVEEDKKHERHPIFGNIVDEVAYHEKYPTIYHLRKKLVDSTDKADLRLIYLALAHMIKFRGHFLIEGDLNPDNSDVDKLFIQLVQTYNQLFEENPINASGVDAKAILSARLSKSRRLENLIAQLPGEKKNGLFGNLIALSLGLTPNFKSNFDLAEDAKLQLSKDTYDDDLDNLLAQIGDQYADLFLAAKNLSDAILLSDILRVNTEITKAPLSASMIKRYDEHHQDLTLLKALVRQQLPEKYKEIFFDQSKNGYAGYIDGGASQEEFYKFIKPILEKMDGTEELLVKLNREDLLRKQRTFDNGSIPHQIHLGELHAILRRQEDFYPFLKDNREKIEKILTFRIPYYVGPLARGNSRFAWMTRKSEETITPWNFEEVVDKGASAQSFIERMTNFDKNLPNEKVLPKHSLLYEYFTVYNELTKVKYVTEGMRKPAFLSGEQKKAIVDLLFKTNRKVTVKQLKEDYFKKIECFDSVEISGVEDRFNASLGTYHDLLKIIKDKDFLDNEENEDILEDIVLTLTLFEDREMIEERLKTYAHLFDDKVMKQLKRRRYTGWGRLSRKLINGIRDKQSGKTILDFLKSDGFANRNFMQLIHDDSLTFKEDIQKAQVSGQGDSLHEHIANLAGSPAIKKGILQTVKVVDELVKVMGRHKPENIVIEMARENQTTQKGQKNSRERMKRIEEGIKELGSQILKEHPVENTQLQNEKLYLYYLQNGRDMYVDQELDINRLSDYDVDHIVPQSFLKDDSIDNKVLTRSDKARGKSDNVPSEEVVKKMKNYWRQLLNAKLITQRKFDNLTKAERGGLSELDKAGFIKRQLVETRQITKHVAQILDSRMNTKYDENDKLIREVKVITLKSKLVSDFRKDFQFYKVREINNYHHAHDAYLNAVVGTALIKKYPKLESEFVYGDYKVYDVRKMIAKSEQEIGKATAKYFFYSNIMNFFKTEITLANGEIRKRPLIETNGETGEIVWDKGRDFATVRKVLSMPQVNIVKKTEVQTGGFSKESILPKRNSDKLIARKKDWDPKKYGGFDSPTVAYSVLVVAKVEKGKSKKLKSVKELLGITIMERSSFEKNPIDFLEAKGYKEVKKDLIIKLPKYSLFELENGRKRMLASAGELQKGNELALPSKYVNFLYLASHYEKLKGSPEDNEQKQLFVEQHKHYLDEIIEQISEFSKRVILADANLDKVLSAYNKHRDKPIREQAENIIHLFTLTNLGAPAAFKYFDTTIDRKRYTSTKEVLDATLIHQSITGLYETRIDLSQLGGDGGGGSGGSGGTAPLEEEYRLFLEAPIQNVTLLEQWKREIPKVWAEINPPGLASTQAPIHVQLLSTALPVRVRQYPITLEAKRSLRETIRKFRAAGILRPVHSPWNTPLLPVRKSGTSEYRMVQDLREVNKRVETIHPTVPNPYTLLSLLPPDRIWYSVLDLKDAFFCIPLAPESQLIFAFEWADAEEGESGQLTWTRLPQGFKNSPTLFNEALNRDLQGFRLDHPSVSLLQYVDDLLIAADTQAACLSATRDLLMTLAELGYRVSGKKAQLCQEEVTYLGFKIHKGSRSLSNSRTQAILQIPVPKTKRQVREFLGTIGYCRLWIPGFAELAQPLYAATRPGNDPLVWGEKEEEAFQSLKLALTQPPALALPSLDKPFQLFVEETSGAAKGVLTQALGPWKRPVAYLSKRLDPVAAGWPRCLRAIAAAALLTREASKLTFGQDIEITSSHNLESLLRSPPDKWLTNARITQYQVLLLDPPRVRFKQTAALNPATLLPETDDTLPIHHCLDTLDSLTSTRPDLTDQPLAQAEATLFTDGSSYIRDGKRYAGAAVVTLDSVIWAEPLPIGTSAQKAELIALTKALEWSKDKSVNIYTDSRYAFATLHVHGMIYRERGWLTAGGKAIKNAPEILALLTAVWLPKRVAVMHCKGHQKDDAPTSTGNRRADEVAREVAIRPLSTQATISAGKRTADGSEFEKRTADGSEFESPKKKAKVE

SEQ ID NO: 6016 - protein, 2082 aa, synthetic construct
MPAAKRVKLDGGDKKYSIGLDIGTNSVGWAVITDEYKVPSKKFKVLGNTDRHSIKKNLIGALLFDSGETAEATRLKRTARRRYTRRKNRICYLQEIFSNEMAKVDDSFFHRLEESFLVEEDKKHERHPIFGNIVDEVAYHEKYPTIYHLRKKLVDSTDKADLRLIYLALAHMIKFRGHFLIEGDLNPDNSDVDKLFIQLVQTYNQLFEENPINASGVDAKAILSARLSKSRRLENLIAQLPGEKKNGLFGNLIALSLGLTPNFKSNFDLAEDAKLQLSKDTYDDDLDNLLAQIGDQYADLFLAAKNLSDAILLSDILRVNTEITKAPLSASMIKRYDEHHQDLTLLKALVRQQLPEKYKEIFFDQSKNGYAGYIDGGASQEEFYKFIKPILEKMDGTEELLVKLNREDLLRKQRTFDNGSIPHQIHLGELHAILRRQEDFYPFLKDNREKIEKILTFRIPYYVGPLARGNSRFAWMTRKSEETITPWNFEEVVDKGASAQSFIERMTNFDKNLPNEKVLPKHSLLYEYFTVYNELTKVKYVTEGMRKPAFLSGEQKKAIVDLLFKTNRKVTVKQLKEDYFKKIECFDSVEISGVEDRFNASLGTYHDLLKIIKDKDFLDNEENEDILEDIVLTLTLFEDREMIEERLKTYAHLFDDKVMKQLKRRRYTGWGRLSRKLINGIRDKQSGKTILDFLKSDGFANRNFMQLIHDDSLTFKEDIQKAQVSGQGDSLHEHIANLAGSPAIKKGILQTVKVVDELVKVMGRHKPENIVIEMARENQTTQKGQKNSRERMKRIEEGIKELGSQILKEHPVENTQLQNEKLYLYYLQNGRDMYVDQELDINRLSDYDVDHIVPQSFLKDDSIDNKVLTRSDKARGKSDNVPSEEVVKKMKNYWRQLLNAKLITQRKFDNLTKAERGGLSELDKAGFIKRQLVETRQITKHVAQILDSRMNTKYDENDKLIREVKVITLKSKLVSDFRKDFQFYKVREINNYHHAHDAYLNAVVGTALIKKYPKLESEFVYGDYKVYDVRKMIAKSEQEIGKATAKYFFYSNIMNFFKTEITLANGEIRKRPLIETNGETGEIVWDKGRDFATVRKVLSMPQVNIVKKTEVQTGGFSKESILPKRNSDKLIARKKDWDPKKYGGFDSPTVAYSVLVVAKVEKGKSKKLKSVKELLGITIMERSSFEKNPIDFLEAKGYKEVKKDLIIKLPKYSLFELENGRKRMLASAGELQKGNELALPSKYVNFLYLASHYEKLKGSPEDNEQKQLFVEQHKHYLDEIIEQISEFSKRVILADANLDKVLSAYNKHRDKPIREQAENIIHLFTLTNLGAPAAFKYFDTTIDRKRYTSTKEVLDATLIHQSITGLYETRIDLSQLGGDGGGGSGGSGGVPWILKKPLELTIKLDLEEQQGTLLNNSILSKKGKEELKQLFEKYSALWQSWENQVGHRRIRPHKIATGTVKPTPQKQYHINPKAKPDIQIVINDLLKQGVLIQKESTMNTPVYPVPKPNGRWRMVLDYRAVNKVTPLIAVQNQHSYGILGSLFKGRYKTTIDLSNGFWAHPIVPEDYWITAFTWQGKQYCWTVLPQGFLNSPGLFNGDVVDLLQGIPNVEVYVDDVYISHDSEKEHLEYLDILFNRLKEAGYIISLKKSNIANSIVDFLGFQITNEGRGLTDTFKEKLENITAPTTLKQLQSILGKLNFARNFIPDFTELIAPLYALIPKSPKNYVPWQIEHSTTLETLITKLNGAEYLQGRKGDKTLIMKVNASYTTGYIRYYNEGEKKPISYVSIVFSKTELKFTELEKLLTTVHKGLLKALDLSMGQNIHVYSPIVSMQNIQKTPQTAKKALASRWLSWLSYLEDPRIRFFYDPQMPALKDLPAVDTGKDNKKHPSNFQHIFYTDGSAITSPTKEGHLNAGMGIVYFINKDGNLQKQQEWSISLGNHTAQFAEIAAFEFALKKCLPLGGNILVVTDSNYVAKAYNEELDVWASNGFVNNRKKPLKHISKWKSVADLKRLRPDVVVTHEPGHQKLDSSPHAYGNNLADQLATQASFKVHAGKRTADGSEFEKRTADGSEFESPKKKAKVE

SEQ ID NO: 6017 - protein, 2090 aa, synthetic construct
MPAAKRVKLDGGDKKYSIGLDIGTNSVGWAVITDEYKVPSKKFKVLGNTDRHSIKKNLIGALLFDSGETAEATRLKRTARRRYTRRKNRICYLQEIFSNEMAKVDDSFFHRLEESFLVEEDKKHERHPIFGNIVDEVAYHEKYPTIYHLRKKLVDSTDKADLRLIYLALAHMIKFRGHFLIEGDLNPDNSDVDKLFIQLVQTYNQLFEENPINASGVDAKAILSARLSKSRRLENLIAQLPGEKKNGLFGNLIALSLGLTPNFKSNFDLAEDAKLQLSKDTYDDDLDNLLAQIGDQYADLFLAAKNLSDAILLSDILRVNTEITKAPLSASMIKRYDEHHQDLTLLKALVRQQLPEKYKEIFFDQSKNGYAGYIDGGASQEEFYKFIKPILEKMDGTEELLVKLNREDLLRKQRTFDNGSIPHQIHLGELHAILRRQEDFYPFLKDNREKIEKILTFRIPYYVGPLARGNSRFAWMTRKSEETITPWNFEEVVDKGASAQSFIERMTNFDKNLPNEKVLPKHSLLYEYFTVYNELTKVKYVTEGMRKPAFLSGEQKKAIVDLLFKTNRKVTVKQLKEDYFKKIECFDSVEISGVEDRFNASLGTYHDLLKIIKDKDFLDNEENEDILEDIVLTLTLFEDREMIEERLKTYAHLFDDKVMKQLKRRRYTGWGRLSRKLINGIRDKQSGKTILDFLKSDGFANRNFMQLIHDDSLTFKEDIQKAQVSGQGDSLHEHIANLAGSPAIKKGILQTVKVVDELVKVMGRHKPENIVIEMARENQTTQKGQKNSRERMKRIEEGIKELGSQILKEHPVENTQLQNEKLYLYYLQNGRDMYVDQELDINRLSDYDVDHIVPQSFLKDDSIDNKVLTRSDKARGKSDNVPSEEVVKKMKNYWRQLLNAKLITQRKFDNLTKAERGGLSELDKAGFIKRQLVETRQITKHVAQILDSRMNTKYDENDKLIREVKVITLKSKLVSDFRKDFQFYKVREINNYHHAHDAYLNAVVGTALIKKYPKLESEFVYGDYKVYDVRKMIAKSEQEIGKATAKYFFYSNIMNFFKTEITLANGEIRKRPLIETNGETGEIVWDKGRDFATVRKVLSMPQVNIVKKTEVQTGGFSKESILPKRNSDKLIARKKDWDPKKYGGFDSPTVAYSVLVVAKVEKGKSKKLKSVKELLGITIMERSSFEKNPIDFLEAKGYKEVKKDLIIKLPKYSLFELENGRKRMLASAGELQKGNELALPSKYVNFLYLASHYEKLKGSPEDNEQKQLFVEQHKHYLDEIIEQISEFSKRVILADANLDKVLSAYNKHRDKPIREQAENIIHLFTLTNLGAPAAFKYFDTTIDRKRYTSTKEVLDATLIHQSITGLYETRIDLSQLGGDGGGGSGGSGGTLQLEEEYRLFEPESTQKQEMDIWLKNFPQAWAETGGMGTAHCQAPVLIQLKATATPISIRQYPMPHEAYQGIKPHIRRMLDQGILKPCQSPWNTPLLPVKKPGTEDYRPVQDLREVNKRVEDIHPTVPNPYNLLSTLPPSHPWYTVLDLKDAFFCLRLHSESQLLFAFEWRDPEIGLSGQLTWTRLPQGFKNSPTLFNEALHSDLADFRVRYPALVLLQYVDDLLLAAATRTECLEGTKALLETLGNKGYRASAKKAQICLQEVTYLGYSLKDGQRWLTKARKEAILSIPVPKNSRQVREFLGKAGYCRLFIPGFAELAAPLYPLTRPGTLFQWGTEQQLAFEDIKKALLSSPALGLPDITKPFELFIDENSGFAKGVLVQKLGPWKRPVAYLSKKLDTVASGWPPCLRMVAAIAILVKDAGKLTLGQPLTILTSHPVEALVRQPPNKWLSNARMTHYQAMLLDAERVHFGPTVSLNPATLLPLPSGGNHHDCLQILAETHGTRPDLTDQPLPDADLTWYTDGSSFIRNGEREAGAAVTTESEVIWAAPLPPGTSAQRAELIALTQALKMAEGKKLTVYTDSRYAFATTHVHGEIYRRRGWLTSEGKEIKNKNEILALLEALFLPKRLSIIHCPGHQKGDSPQAKGNRLADDTAKKAATETHSSLTVLPAGKRTADGSEFEKRTADGSEFESPKKKAKVE

SEQ ID NO: 6018 - protein, 2171 aa, synthetic construct
MPAAKRVKLDGGDKKYSIGLDIGTNSVGWAVITDEYKVPSKKFKVLGNTDRHSIKKNLIGALLFDSGETAEATRLKRTARRRYTRRKNRICYLQEIFSNEMAKVDDSFFHRLEESFLVEEDKKHERHPIFGNIVDEVAYHEKYPTIYHLRKKLVDSTDKADLRLIYLALAHMIKFRGHFLIEGDLNPDNSDVDKLFIQLVQTYNQLFEENPINASGVDAKAILSARLSKSRRLENLIAQLPGEKKNGLFGNLIALSLGLTPNFKSNFDLAEDAKLQLSKDTYDDDLDNLLAQIGDQYADLFLAAKNLSDAILLSDILRVNTEITKAPLSASMIKRYDEHHQDLTLLKALVRQQLPEKYKEIFFDQSKNGYAGYIDGGASQEEFYKFIKPILEKMDGTEELLVKLNREDLLRKQRTFDNGSIPHQIHLGELHAILRRQEDFYPFLKDNREKIEKILTFRIPYYVGPLARGNSRFAWMTRKSEETITPWNFEEVVDKGASAQSFIERMTNFDKNLPNEKVLPKHSLLYEYFTVYNELTKVKYVTEGMRKPAFLSGEQKKAIVDLLFKTNRKVTVKQLKEDYFKKIECFDSVEISGVEDRFNASLGTYHDLLKIIKDKDFLDNEENEDILEDIVLTLTLFEDREMIEERLKTYAHLFDDKVMKQLKRRRYTGWGRLSRKLINGIRDKQSGKTILDFLKSDGFANRNFMQLIHDDSLTFKEDIQKAQVSGQGDSLHEHIANLAGSPAIKKGILQTVKVVDELVKVMGRHKPENIVIEMARENQTTQKGQKNSRERMKRIEEGIKELGSQILKEHPVENTQLQNEKLYLYYLQNGRDMYVDQELDINRLSDYDVDHIVPQSFLKDDSIDNKVLTRSDKARGKSDNVPSEEVVKKMKNYWRQLLNAKLITQRKFDNLTKAERGGLSELDKAGFIKRQLVETRQITKHVAQILDSRMNTKYDENDKLIREVKVITLKSKLVSDFRKDFQFYKVREINNYHHAHDAYLNAVVGTALIKKYPKLESEFVYGDYKVYDVRKMIAKSEQEIGKATAKYFFYSNIMNFFKTEITLANGEIRKRPLIETNGETGEIVWDKGRDFATVRKVLSMPQVNIVKKTEVQTGGFSKESILPKRNSDKLIARKKDWDPKKYGGFDSPTVAYSVLVVAKVEKGKSKKLKSVKELLGITIMERSSFEKNPIDFLEAKGYKEVKKDLIIKLPKYSLFELENGRKRMLASAGELQKGNELALPSKYVNFLYLASHYEKLKGSPEDNEQKQLFVEQHKHYLDEIIEQISEFSKRVILADANLDKVLSAYNKHRDKPIREQAENIIHLFTLTNLGAPAAFKYFDTTIDRKRYTSTKEVLDATLIHQSITGLYETRIDLSQLGGDGGGGSGGSGGMNPLQLLQPLPAEIKGTKLLAHWNSGATITCIPESFLEDEQPIKKTLIKTIHGEKQQNVYYVTFKVKGRKVEAEVIASPYEYILLSPTDVPWLTQQPLQLTILVPLQEYQEKILSKTALPEDQKQQLKTLFVKYDNLWQHWENQVGHRKIRPHNIATGDYPPRPQKQYPINPKAKPSIQIVIDDLLKQGVLTPQNSTMNTPVYPVPKPDGRWRMVLDYREVNKTIPLTAAQNQHSAGILATIVRQKYKTTLDLANGFWAHPITPESYWLTAFTWQGKQYCWTRLPQGFLNSPALFNADVVDLLKEIPNVQVYVDDIYLSHDDPKEHVQQLEKVFQILLQAGYVVSLKKSEIGQKTVEFLGFNITKEGRGLTDTFKTKLLNITPPKDLKQLQSILGLLNFARNFIPNFAELVQPLYNLIAPAKGKYIEWSEENTKQLNMVIEALNTASNLEERLPEQRLVIKVNTSPSAGYVRYYNETGKKPIMYLNYVFSKAELKFSMLEKLLTTMHKALIKAMDLAMGQEILVYSPIVSMTKIQKTPLPERKALPIRWITWMTYLEDPRIQFHYDKTLPELKHIPDVYTSSQSPVKHPSQYEGVFYTDGSAIKSPDPTKSNNAGMGIVHATYKPEYQVLNQWSIPLGNHTAQMAEIAAVEFACKKALKIPGPVLVITDSFYVAESANKELPYWKSNGFVNNKKKPLKHISKWKSIAECLSMKPDITIQHEKGISLQIPVFILKGNALADKLATQGSYVVNAGKRTADGSEFEKRTADGSEFESPKKKAKVE

SEQ ID NO: 6019 - protein, 2213 aa, synthetic construct
MPAAKRVKLDGGDKKYSIGLDIGTNSVGWAVITDEYKVPSKKFKVLGNTDRHSIKKNLIGALLFDSGETAEATRLKRTARRRYTRRKNRICYLQEIFSNEMAKVDDSFFHRLEESFLVEEDKKHERHPIFGNIVDEVAYHEKYPTIYHLRKKLVDSTDKADLRLIYLALAHMIKFRGHFLIEGDLNPDNSDVDKLFIQLVQTYNQLFEENPINASGVDAKAILSARLSKSRRLENLIAQLPGEKKNGLFGNLIALSLGLTPNFKSNFDLAEDAKLQLSKDTYDDDLDNLLAQIGDQYADLFLAAKNLSDAILLSDILRVNTEITKAPLSASMIKRYDEHHQDLTLLKALVRQQLPEKYKEIFFDQSKNGYAGYIDGGASQEEFYKFIKPILEKMDGTEELLVKLNREDLLRKQRTFDNGSIPHQIHLGELHAILRRQEDFYPFLKDNREKIEKILTFRIPYYVGPLARGNSRFAWMTRKSEETITPWNFEEVVDKGASAQSFIERMTNFDKNLPNEKVLPKHSLLYEYFTVYNELTKVKYVTEGMRKPAFLSGEQKKAIVDLLFKTNRKVTVKQLKEDYFKKIECFDSVEISGVEDRFNASLGTYHDLLKIIKDKDFLDNEENEDILEDIVLTLTLFEDREMIEERLKTYAHLFDDKVMKQLKRRRYTGWGRLSRKLINGIRDKQSGKTILDFLKSDGFANRNFMQLIHDDSLTFKEDIQKAQVSGQGDSLHEHIANLAGSPAIKKGILQTVKVVDELVKVMGRHKPENIVIEMARENQTTQKGQKNSRERMKRIEEGIKELGSQILKEHPVENTQLQNEKLYLYYLQNGRDMYVDQELDINRLSDYDVDHIVPQSFLKDDSIDNKVLTRSDKARGKSDNVPSEEVVKKMKNYWRQLLNAKLITQRKFDNLTKAERGGLSELDKAGFIKRQLVETRQITKHVAQILDSRMNTKYDENDKLIREVKVITLKSKLVSDFRKDFQFYKVREINNYHHAHDAYLNAVVGTALIKKYPKLESEFVYGDYKVYDVRKMIAKSEQEIGKATAKYFFYSNIMNFFKTEITLANGEIRKRPLIETNGETGEIVWDKGRDFATVRKVLSMPQVNIVKKTEVQTGGFSKESILPKRNSDKLIARKKDWDPKKYGGFDSPTVAYSVLVVAKVEKGKSKKLKSVKELLGITIMERSSFEKNPIDFLEAKGYKEVKKDLIIKLPKYSLFELENGRKRMLASAGELQKGNELALPSKYVNFLYLASHYEKLKGSPEDNEQKQLFVEQHKHYLDEIIEQISEFSKRVILADANLDKVLSAYNKHRDKPIREQAENIIHLFTLTNLGAPAAFKYFDTTIDRKRYTSTKEVLDATLIHQSITGLYETRIDLSQLGGDGGGGSGGSGGTLGDQGSRGSDPLPEPRVTLTVEGIPTEFLVNTGAEHSVLTKPMGKMGSKRTVVAGATGSKVYPWTTKRLLKIGQKQVTHSFLVIPECPAPLLGRDLLTKLKAQIQFSTEGPQVTWEDRPAMCLVLNLEEEYRLHEKPVPPSIDPSWLQLFPMVWAEKAGMGLANQVPPVVVELKSDASPVAVRQYPMSKEAREGIRPHIQRFLDLGILVPCQSPWNTPLLPVKKPGTNDYRPVQDLREVNKRVQDIHPTVPNPYNLLSSLPPSHTWYSVLDLKDAFFCLKLHPNSQPLFAFEWRDPEKGNTGQLTWTRLPQGFKNSPTLFDEALHRDLASFRALNPQVVMLQYVDDLLVAAPTYRDCKEGTRRLLQELSKLGYRVSAKKAQLCREEVTYLGYLLKGGKRWLTPARKATVMKIPTPTTPRQVREFLGTAGFCRLWIPGFASLAAPLYPLTREKVPFTWTEAHQEAFGRIKEALLSAPALALPDLTKPFALYVDEKEGVARGVLTQTLGPWRRPVAYLSKKLDPVASGWPTCLKAIAAVALLLKDADKLTLGQNVLVIAPHNLESIVRQPPDRWMTNARMTHYQSLLLNERVSFAPPAILNPATLLPVESDDTPIHICSEILAEETGTRPDLRDQPLPGVPAWYTDGSSFIMDGRRQAGAAIVDNKRTVWASNLPEGTSAQKAELIALTQALRLAEGKSINIYTDSRYAFATAHVHGAIYKQRGLLTSAGKDIKNKEEILALLEAIHLPKRVAIIHCPGHQRGTDPVATGNRKADEAAKQAAQSTRILTETTKNAGKRTADGSEFEKRTADGSEFESPKKKAKVE

SEQ ID NO: 6020 - protein, 2122 aa, synthetic construct
MPAAKRVKLDGGDKKYSIGLDIGTNSVGWAVITDEYKVPSKKFKVLGNTDRHSIKKNLIGALLFDSGETAEATRLKRTARRRYTRRKNRICYLQEIFSNEMAKVDDSFFHRLEESFLVEEDKKHERHPIFGNIVDEVAYHEKYPTIYHLRKKLVDSTDKADLRLIYLALAHMIKFRGHFLIEGDLNPDNSDVDKLFIQLVQTYNQLFEENPINASGVDAKAILSARLSKSRRLENLIAQLPGEKKNGLFGNLIALSLGLTPNFKSNFDLAEDAKLQLSKDTYDDDLDNLLAQIGDQYADLFLAAKNLSDAILLSDILRVNTEITKAPLSASMIKRYDEHHQDLTLLKALVRQQLPEKYKEIFFDQSKNGYAGYIDGGASQEEFYKFIKPILEKMDGTEELLVKLNREDLLRKQRTFDNGSIPHQIHLGELHAILRRQEDFYPFLKDNREKIEKILTFRIPYYVGPLARGNSRFAWMTRKSEETITPWNFEEVVDKGASAQSFIERMTNFDKNLPNEKVLPKHSLLYEYFTVYNELTKVKYVTEGMRKPAFLSGEQKKAIVDLLFKTNRKVTVKQLKEDYFKKIECFDSVEISGVEDRFNASLGTYHDLLKIIKDKDFLDNEENEDILEDIVLTLTLFEDREMIEERLKTYAHLFDDKVMKQLKRRRYTGWGRLSRKLINGIRDKQSGKTILDFLKSDGFANRNFMQLIHDDSLTFKEDIQKAQVSGQGDSLHEHIANLAGSPAIKKGILQTVKVVDELVKVMGRHKPENIVIEMARENQTTQKGQKNSRERMKRIEEGIKELGSQILKEHPVENTQLQNEKLYLYYLQNGRDMYVDQELDINRLSDYDVDHIVPQSFLKDDSIDNKVLTRSDKARGKSDNVPSEEVVKKMKNYWRQLLNAKLITQRKFDNLTKAERGGLSELDKAGFIKRQLVETRQITKHVAQILDSRMNTKYDENDKLIREVKVITLKSKLVSDFRKDFQFYKVREINNYHHAHDAYLNAVVGTALIKKYPKLESEFVYGDYKVYDVRKMIAKSEQEIGKATAKYFFYSNIMNFFKTEITLANGEIRKRPLIETNGETGEIVWDKGRDFATVRKVLSMPQVNIVKKTEVQTGGFSKESILPKRNSDKLIARKKDWDPKKYGGFDSPTVAYSVLVVAKVEKGKSKKLKSVKELLGITIMERSSFEKNPIDFLEAKGYKEVKKDLIIKLPKYSLFELENGRKRMLASAGELQKGNELALPSKYVNFLYLASHYEKLKGSPEDNEQKQLFVEQHKHYLDEIIEQISEFSKRVILADANLDKVLSAYNKHRDKPIREQAENIIHLFTLTNLGAPAAFKYFDTTIDRKRYTSTKEVLDATLIHQSITGLYETRIDLSQLGGDGGGGSGGSGGLLGRDLLTKLKAQIQFSTEGPQVTWEDRPAMCLVLNLEEEYRLHEKPVPPSIDPSWLQLFPMVWAEKAGMGLANQVPPVVVELKSDASPVAVRQYPMSKEAREGIRPHIQRFLDLGILVPCQSPWNTPLLPVKKPGTNDYRPVQDLREVNKRVQDIHPTVPNPYNLLSSLPPSHTWYSVLDLKDAFFCLKLHPNSQPLFAFEWRDPEKGNTGQLTWTRLPQGFKNSPTLFDEALHRDLASFRALNPQVVMLQYVDDLLVAAPTYRDCKEGTRRLLQELSKLGYRVSAKKAQLCREEVTYLGYLLKGGKRWLTPARKATVMKIPTPTTPRQVREFLGTAGFCRLWIPGFASLAAPLYPLTREKVPFTWTEAHQEAFGRIKEALLSAPALALPDLTKPFALYVDEKEGVARGVLTQTLGPWRRPVAYLSKKLDPVASGWPTCLKAIAAVALLLKDADKLTLGQNVLVIAPHNLESIVRQPPDRWMTNARMTHYQSLLLNERVSFAPPAILNPATLLPVESDDTPIHICSEILAEETGTRPDLRDQPLPGVPAWYTDGSSFIMDGRRQAGAAIVDNKRTVWASNLPEGTSAQKAELIALTQALRLAEGKSINIYTDSRYAFATAHVHGAIYKQRGLLTSAGKDIKNKEEILALLEAIHLPKRVAIIHCPGHQRGTDPVATGNRKADEAAKQAAQSTRILTETTKNAGKRTADGSEFEKRTADGSEFESPKKKAKVE

SEQ ID NO: 6021 - protein, 2213 aa, synthetic construct
MPAAKRVKLDGGDKKYSIGLDIGTNSVGWAVITDEYKVPSKKFKVLGNTDRHSIKKNLIGALLFDSGETAEATRLKRTARRRYTRRKNRICYLQEIFSNEMAKVDDSFFHRLEESFLVEEDKKHERHPIFGNIVDEVAYHEKYPTIYHLRKKLVDSTDKADLRLIYLALAHMIKFRGHFLIEGDLNPDNSDVDKLFIQLVQTYNQLFEENPINASGVDAKAILSARLSKSRRLENLIAQLPGEKKNGLFGNLIALSLGLTPNFKSNFDLAEDAKLQLSKDTYDDDLDNLLAQIGDQYADLFLAAKNLSDAILLSDILRVNTEITKAPLSASMIKRYDEHHQDLTLLKALVRQQLPEKYKEIFFDQSKNGYAGYIDGGASQEEFYKFIKPILEKMDGTEELLVKLNREDLLRKQRTFDNGSIPHQIHLGELHAILRRQEDFYPFLKDNREKIEKILTFRIPYYVGPLARGNSRFAWMTRKSEETITPWNFEEVVDKGASAQSFIERMTNFDKNLPNEKVLPKHSLLYEYFTVYNELTKVKYVTEGMRKPAFLSGEQKKAIVDLLFKTNRKVTVKQLKEDYFKKIECFDSVEISGVEDRFNASLGTYHDLLKIIKDKDFLDNEENEDILEDIVLTLTLFEDREMIEERLKTYAHLFDDKVMKQLKRRRYTGWGRLSRKLINGIRDKQSGKTILDFLKSDGFANRNFMQLIHDDSLTFKEDIQKAQVSGQGDSLHEHIANLAGSPAIKKGILQTVKVVDELVKVMGRHKPENIVIEMARENQTTQKGQKNSRERMKRIEEGIKELGSQILKEHPVENTQLQNEKLYLYYLQNGRDMYVDQELDINRLSDYDVDHIVPQSFLKDDSIDNKVLTRSDKARGKSDNVPSEEVVKKMKNYWRQLLNAKLITQRKFDNLTKAERGGLSELDKAGFIKRQLVETRQITKHVAQILDSRMNTKYDENDKLIREVKVITLKSKLVSDFRKDFQFYKVREINNYHHAHDAYLNAVVGTALIKKYPKLESEFVYGDYKVYDVRKMIAKSEQEIGKATAKYFFYSNIMNFFKTEITLANGEIRKRPLIETNGETGEIVWDKGRDFATVRKVLSMPQVNIVKKTEVQTGGFSKESILPKRNSDKLIARKKDWDPKKYGGFDSPTVAYSVLVVAKVEKGKSKKLKSVKELLGITIMERSSFEKNPIDFLEAKGYKEVKKDLIIKLPKYSLFELENGRKRMLASAGELQKGNELALPSKYVNFLYLASHYEKLKGSPEDNEQKQLFVEQHKHYLDEIIEQISEFSKRVILADANLDKVLSAYNKHRDKPIREQAENIIHLFTLTNLGAPAAFKYFDTTIDRKRYTSTKEVLDATLIHQSITGLYETRIDLSQLGGDGGGGSGGSGGTLGDQGSRGSDPLPEPRVTLTVEGIPTEFLVNTGAEHSVLTKPMGKMGSKRTVVAGATGSKVYPWTTKRLLKIGQKQVTHSFLVIPECPAPLLGRDLLTKLKAQIQFSTEGPQVTWEDRPAMCLVLNLEEEYRLHEKPVPPSIDPSWLQLFPMVWAEKAGMGLANQVPPVVVELKSDASPVAVRQYPMSKEAREGIRPHIQRFLDLGILVPCQSPWNTPLLPVKKPGTNDYRPVQDLREVNKRVQDIHPTVPNPYNLLSSLPPSHTWYSVLDLKDAFFCLKLHPNSQPLFAFEWRDPEKGNTGQLTWTRLPQGFKNSPTLFNEALHRDLASFRALNPQVVMLQYVDDLLVAAPTYRDCKEGTRRLLQELSKLGYRVSAKKAQLCREEVTYLGYLLKGGKRWLTPARKATVMKIPTPTTPRQVREFLGTAGFCRLWIPGFASLAAPLYPLTRPKVPFTWTEAHQEAFGRIKEALLSAPALALPDLTKPFALYVDEKEGVARGVLTQTLGPWRRPVAYLSKKLDPVASGWPTCLKAIAAVALLLKDADKLTLGQNVLVIAPHNLESIVRQPPDRWMTNARMTHYQSLLLNERVSFAPPAILNPATLLPVESDDTPIHICSEILAEETGTRPDLRDQPLPGVPAWYTDGSSFIMDGRRQAGAAIVDNKRTVWASNLPEGTSAQKAELIALTQALRLAEGKSINIYTDSRYAFATAHVHGAIYKQRGWLTSAGKDIKNKEEILALLEAIHLPKRVAIIHCPGHQRGTDPVATGNRKADEAAKQAAQSTRILTETTKNAGKRTADGSEFEKRTADGSEFESPKKKAKVE

SEQ ID NO: 6022 - protein, 2091 aa, synthetic construct
MPAAKRVKLDGGDKKYSIGLDIGTNSVGWAVITDEYKVPSKKFKVLGNTDRHSIKKNLIGALLFDSGETAEATRLKRTARRRYTRRKNRICYLQEIFSNEMAKVDDSFFHRLEESFLVEEDKKHERHPIFGNIVDEVAYHEKYPTIYHLRKKLVDSTDKADLRLIYLALAHMIKFRGHFLIEGDLNPDNSDVDKLFIQLVQTYNQLFEENPINASGVDAKAILSARLSKSRRLENLIAQLPGEKKNGLFGNLIALSLGLTPNFKSNFDLAEDAKLQLSKDTYDDDLDNLLAQIGDQYADLFLAAKNLSDAILLSDILRVNTEITKAPLSASMIKRYDEHHQDLTLLKALVRQQLPEKYKEIFFDQSKNGYAGYIDGGASQEEFYKFIKPILEKMDGTEELLVKLNREDLLRKQRTFDNGSIPHQIHLGELHAILRRQEDFYPFLKDNREKIEKILTFRIPYYVGPLARGNSRFAWMTRKSEETITPWNFEEVVDKGASAQSFIERMTNFDKNLPNEKVLPKHSLLYEYFTVYNELTKVKYVTEGMRKPAFLSGEQKKAIVDLLFKTNRKVTVKQLKEDYFKKIECFDSVEISGVEDRFNASLGTYHDLLKIIKDKDFLDNEENEDILEDIVLTLTLFEDREMIEERLKTYAHLFDDKVMKQLKRRRYTGWGRLSRKLINGIRDKQSGKTILDFLKSDGFANRNFMQLIHDDSLTFKEDIQKAQVSGQGDSLHEHIANLAGSPAIKKGILQTVKVVDELVKVMGRHKPENIVIEMARENQTTQKGQKNSRERMKRIEEGIKELGSQILKEHPVENTQLQNEKLYLYYLQNGRDMYVDQELDINRLSDYDVDHIVPQSFLKDDSIDNKVLTRSDKARGKSDNVPSEEVVKKMKNYWRQLLNAKLITQRKFDNLTKAERGGLSELDKAGFIKRQLVETRQITKHVAQILDSRMNTKYDENDKLIREVKVITLKSKLVSDFRKDFQFYKVREINNYHHAHDAYLNAVVGTALIKKYPKLESEFVYGDYKVYDVRKMIAKSEQEIGKATAKYFFYSNIMNFFKTEITLANGEIRKRPLIETNGETGEIVWDKGRDFATVRKVLSMPQVNIVKKTEVQTGGFSKESILPKRNSDKLIARKKDWDPKKYGGFDSPTVAYSVLVVAKVEKGKSKKLKSVKELLGITIMERSSFEKNPIDFLEAKGYKEVKKDLIIKLPKYSLFELENGRKRMLASAGELQKGNELALPSKYVNFLYLASHYEKLKGSPEDNEQKQLFVEQHKHYLDEIIEQISEFSKRVILADANLDKVLSAYNKHRDKPIREQAENIIHLFTLTNLGAPAAFKYFDTTIDRKRYTSTKEVLDATLIHQSITGLYETRIDLSQLGGDGGGGSGGSGGLGIEDEYRLHETSTEPDVSLGSTWLSDFPQAWAETGGMGLAVRQAPLIIPLKATSTPVSIQQYPMSHEARLGIKPHIQRLLDQGILVPCQSPWNTPLLPVKKPGTNDYRPVQDLREVNKRVEDIHPTVPNPYNLLSGLPPSHQWYTVLDLKDAFFCLRLHPTSQPLFAFEWRDPGMGISGQLTWTRLPQGFKNSPTLFNEALHRDLADFRIQHPDLILLQYVDDILLAATSELDCQQGTRALLQTLGDLGYRASAKKAQICQKQVKYLGYLLREGQRWLTEARKETVMGQPVPKTPRQLREFLGKAGFCRLFIPGFAEMAAPLYPLTKPGTLFSWGPDQQKAYQEIKQALLTAPALGLPDLTKPFELFVDEKQGYAKGVLTQKLGPWRRPVAYLSKKLDPVAAGWPPCLRMVAAIAVLTKDAGKLTMGQPLVILAPHAVEALVKQPPDRWLSNARMTHYQAMLLDTDRVQFGPVVALNPATLLPLPEEGAPHDCLEILAETHGTRPDLTDQPIPDADHTWYTDGSSFLQEGQRKAGAAVTTETEVIWAGALPAGTSAQRAELIALTQALKMAEGKRLNVYTDSRYAFATAHIHGEIYRRRGWLTSEGREIKNKSEILALLKALFLPKRLSIIHCLGHQKGDSAEARGNRLADQAAREAAIKTPPDTSTLLIAGKRTADGSEFEKRTADGSEFESPKKKAKVE

SEQ ID NO: 6023 - protein, 2091 aa, synthetic construct
MPAAKRVKLDGGDKKYSIGLDIGTNSVGWAVITDEYKVPSKKFKVLGNTDRHSIKKNLIGALLFDSGETAEATRLKRTARRRYTRRKNRICYLQEIFSNEMAKVDDSFFHRLEESFLVEEDKKHERHPIFGNIVDEVAYHEKYPTIYHLRKKLVDSTDKADLRLIYLALAHMIKFRGHFLIEGDLNPDNSDVDKLFIQLVQTYNQLFEENPINASGVDAKAILSARLSKSRRLENLIAQLPGEKKNGLFGNLIALSLGLTPNFKSNFDLAEDAKLQLSKDTYDDDLDNLLAQIGDQYADLFLAAKNLSDAILLSDILRVNTEITKAPLSASMIKRYDEHHQDLTLLKALVRQQLPEKYKEIFFDQSKNGYAGYIDGGASQEEFYKFIKPILEKMDGTEELLVKLNREDLLRKQRTFDNGSIPHQIHLGELHAILRRQEDFYPFLKDNREKIEKILTFRIPYYVGPLARGNSRFAWMTRKSEETITPWNFEEVVDKGASAQSFIERMTNFDKNLPNEKVLPKHSLLYEYFTVYNELTKVKYVTEGMRKPAFLSGEQKKAIVDLLFKTNRKVTVKQLKEDYFKKIECFDSVEISGVEDRFNASLGTYHDLLKIIKDKDFLDNEENEDILEDIVLTLTLFEDREMIEERLKTYAHLFDDKVMKQLKRRRYTGWGRLSRKLINGIRDKQSGKTILDFLKSDGFANRNFMQLIHDDSLTFKEDIQKAQVSGQGDSLHEHIANLAGSPAIKKGILQTVKVVDELVKVMGRHKPENIVIEMARENQTTQKGQKNSRERMKRIEEGIKELGSQILKEHPVENTQLQNEKLYLYYLQNGRDMYVDQELDINRLSDYDVDHIVPQSFLKDDSIDNKVLTRSDKARGKSDNVPSEEVVKKMKNYWRQLLNAKLITQRKFDNLTKAERGGLSELDKAGFIKRQLVETRQITKHVAQILDSRMNTKYDENDKLIREVKVITLKSKLVSDFRKDFQFYKVREINNYHHAHDAYLNAVVGTALIKKYPKLESEFVYGDYKVYDVRKMIAKSEQEIGKATAKYFFYSNIMNFFKTEITLANGEIRKRPLIETNGETGEIVWDKGRDFATVRKVLSMPQVNIVKKTEVQTGGFSKESILPKRNSDKLIARKKDWDPKKYGGFDSPTVAYSVLVVAKVEKGKSKKLKSVKELLGITIMERSSFEKNPIDFLEAKGYKEVKKDLIIKLPKYSLFELENGRKRMLASAGELQKGNELALPSKYVNFLYLASHYEKLKGSPEDNEQKQLFVEQHKHYLDEIIEQISEFSKRVILADANLDKVLSAYNKHRDKPIREQAENIIHLFTLTNLGAPAAFKYFDTTIDRKRYTSTKEVLDATLIHQSITGLYETRIDLSQLGGDGGGGSGGSGGTLGIEDEYRLHETSTEPDVSLGSTWLSDFPQAWAETGGMGLAVRQAPLIIPLKATSTPVSIQQYPMSHEARLGIKPHIQRLLDQGILVPCQSPWNTPLLPVKKPGTNDYRPVQDLREVNKRVEDIHPTVPNPYNLLSGLPPSHQWYTVLDLKDAFFCLRLHPTSQPLFAFEWRDPGMGISGQLTWTRLPQGFKNSPTLFNEALHRDLADFRIQHPDLILLQYVDDILLAATSELDCQQGTRALLQTLGDLGYRASAKKAQICQKQVKYLGYLLREGQRWLTEARKETVMGQPVPKTPRQLREFLGTAGFCRLWIPGFAEMAAPLYPLTKPGTLFSWGPDQQKAYQEIKQALLTAPALGLPDLTKPFELFVDEKQGYAKGVLTQKLGPWRRPVAYLSKKLDPVAAGWPPCLRMVAAIAVLTKDAGKLTMGQPLVILAPHAVEALVKQPPDRWLSNARMTHYQAMLLDTDRVQFGPVVALNPATLLPLPEEGAPHDCLEILAETHGTRPDLTDQPIPDADHTWYTDGSSFLQEGQRKAGAAVTTETEVIWAGALPAGTSAQRAELIALTQALKMAEGKRLNVYTDSRYAFATAHIHGEIYRRRGWLTSEGREIKNKSEILALLKALFLPKRLSIIHCLGHQKGDSAEARGNRLADQAAREAAIKTPPDTSTLLAGKRTADGSEFEKRTADGSEFESPKKKAKVE

SEQ ID NO: 6024 - protein, 2091 aa, synthetic construct
MPAAKRVKLDGGDKKYSIGLDIGTNSVGWAVITDEYKVPSKKFKVLGNTDRHSIKKNLIGALLFDSGETAEATRLKRTARRRYTRRKNRICYLQEIFSNEMAKVDDSFFHRLEESFLVEEDKKHERHPIFGNIVDEVAYHEKYPTIYHLRKKLVDSTDKADLRLIYLALAHMIKFRGHFLIEGDLNPDNSDVDKLFIQLVQTYNQLFEENPINASGVDAKAILSARLSKSRRLENLIAQLPGEKKNGLFGNLIALSLGLTPNFKSNFDLAEDAKLQLSKDTYDDDLDNLLAQIGDQYADLFLAAKNLSDAILLSDILRVNTEITKAPLSASMIKRYDEHHQDLTLLKALVRQQLPEKYKEIFFDQSKNGYAGYIDGGASQEEFYKFIKPILEKMDGTEELLVKLNREDLLRKQRTFDNGSIPHQIHLGELHAILRRQEDFYPFLKDNREKIEKILTFRIPYYVGPLARGNSRFAWMTRKSEETITPWNFEEVVDKGASAQSFIERMTNFDKNLPNEKVLPKHSLLYEYFTVYNELTKVKYVTEGMRKPAFLSGEQKKAIVDLLFKTNRKVTVKQLKEDYFKKIECFDSVEISGVEDRFNASLGTYHDLLKIIKDKDFLDNEENEDILEDIVLTLTLFEDREMIEERLKTYAHLFDDKVMKQLKRRRYTGWGRLSRKLINGIRDKQSGKTILDFLKSDGFANRNFMQLIHDDSLTFKEDIQKAQVSGQGDSLHEHIANLAGSPAIKKGILQTVKVVDELVKVMGRHKPENIVIEMARENQTTQKGQKNSRERMKRIEEGIKELGSQILKEHPVENTQLQNEKLYLYYLQNGRDMYVDQELDINRLSDYDVDHIVPQSFLKDDSIDNKVLTRSDKARGKSDNVPSEEVVKKMKNYWRQLLNAKLITQRKFDNLTKAERGGLSELDKAGFIKRQLVETRQITKHVAQILDSRMNTKYDENDKLIREVKVITLKSKLVSDFRKDFQFYKVREINNYHHAHDAYLNAVVGTALIKKYPKLESEFVYGDYKVYDVRKMIAKSEQEIGKATAKYFFYSNIMNFFKTEITLANGEIRKRPLIETNGETGEIVWDKGRDFATVRKVLSMPQVNIVKKTEVQTGGFSKESILPKRNSDKLIARKKDWDPKKYGGFDSPTVAYSVLVVAKVEKGKSKKLKSVKELLGITIMERSSFEKNPIDFLEAKGYKEVKKDLIIKLPKYSLFELENGRKRMLASAGELQKGNELALPSKYVNFLYLASHYEKLKGSPEDNEQKQLFVEQHKHYLDEIIEQISEFSKRVILADANLDKVLSAYNKHRDKPIREQAENIIHLFTLTNLGAPAAFKYFDTTIDRKRYTSTKEVLDATLIHQSITGLYETRIDLSQLGGDGGGGSGGSGGTLNIEDEYRLHETSKEPDVSLGSTWLSDFPQAWAETGGMGLAVRQAPLIIPLKATSTPVSIKQYPMSQEARLGIKPHIQRLLDQGILVPCQSPWNTPLLPVKKPGTNDYRPVQDLREVNKRVEDIHPTVPNPYNLLSGLPPSHQWYTVLDLKDAFFCLRLHPTSQPLFAFEWRDPEMGISGQLTWTRLPQGFKNSPTLFNEALHRDLAGFRIQHPDLILLQYVDDLLLAATSELDCQQGTRALLQTLGDLGYRASAKKAQICQKQVKYLGYLLKEGQRWLTEARKETVMGQPIPKTPRQLREFLGTAGFCRLWIPGFAEMAAPLYPLTKPGTLFNWGPDQQKAFQEIKQALLTAPALGLPDLTKPFELFVDEKQGYAKGVLTQKLGPWRRPVAYLSKKLDPVAAGWPPCLRMVAAIAVLTKDAGKLTMGQPLVILAPHAVEALVKQPPDRWLSNARMTHYQALLLDTDRVQFGPVVALNPATLLPLPEEGLQHDCLDILAEAHGTRSDLMDQPLPDADHTWYTDGSSFLQEGQRKAGAAVTTETEVIWARALPAGTSAQRAELIALTQALKMAEGKKLNVYTDSRYAFATAHIHGEIYRRRGWLTSEGKEIKNKDEILALLKALFLPKRLSIIHCPGHQKGNSAEARGNRMADQAAREVATRETPETSTLLAGKRTADGSEFEKRTADGSEFESPKKKAKVE

SEQ ID NO: 6025 - protein, 2091 aa, synthetic construct
MPAAKRVKLDGGDKKYSIGLDIGTNSVGWAVITDEYKVPSKKFKVLGNTDRHSIKKNLIGALLFDSGETAEATRLKRTARRRYTRRKNRICYLQEIFSNEMAKVDDSFFHRLEESFLVEEDKKHERHPIFGNIVDEVAYHEKYPTIYHLRKKLVDSTDKADLRLIYLALAHMIKFRGHFLIEGDLNPDNSDVDKLFIQLVQTYNQLFEENPINASGVDAKAILSARLSKSRRLENLIAQLPGEKKNGLFGNLIALSLGLTPNFKSNFDLAEDAKLQLSKDTYDDDLDNLLAQIGDQYADLFLAAKNLSDAILLSDILRVNTEITKAPLSASMIKRYDEHHQDLTLLKALVRQQLPEKYKEIFFDQSKNGYAGYIDGGASQEEFYKFIKPILEKMDGTEELLVKLNREDLLRKQRTFDNGSIPHQIHLGELHAILRRQEDFYPFLKDNREKIEKILTFRIPYYVGPLARGNSRFAWMTRKSEETITPWNFEEVVDKGASAQSFIERMTNFDKNLPNEKVLPKHSLLYEYFTVYNELTKVKYVTEGMRKPAFLSGEQKKAIVDLLFKTNRKVTVKQLKEDYFKKIECFDSVEISGVEDRFNASLGTYHDLLKIIKDKDFLDNEENEDILEDIVLTLTLFEDREMIEERLKTYAHLFDDKVMKQLKRRRYTGWGRLSRKLINGIRDKQSGKTILDFLKSDGFANRNFMQLIHDDSLTFKEDIQKAQVSGQGDSLHEHIANLAGSPAIKKGILQTVKVVDELVKVMGRHKPENIVIEMARENQTTQKGQKNSRERMKRIEEGIKELGSQILKEHPVENTQLQNEKLYLYYLQNGRDMYVDQELDINRLSDYDVDHIVPQSFLKDDSIDNKVLTRSDKARGKSDNVPSEEVVKKMKNYWRQLLNAKLITQRKFDNLTKAERGGLSELDKAGFIKRQLVETRQITKHVAQILDSRMNTKYDENDKLIREVKVITLKSKLVSDFRKDFQFYKVREINNYHHAHDAYLNAVVGTALIKKYPKLESEFVYGDYKVYDVRKMIAKSEQEIGKATAKYFFYSNIMNFFKTEITLANGEIRKRPLIETNGETGEIVWDKGRDFATVRKVLSMPQVNIVKKTEVQTGGFSKESILPKRNSDKLIARKKDWDPKKYGGFDSPTVAYSVLVVAKVEKGKSKKLKSVKELLGITIMERSSFEKNPIDFLEAKGYKEVKKDLIIKLPKYSLFELENGRKRMLASAGELQKGNELALPSKYVNFLYLASHYEKLKGSPEDNEQKQLFVEQHKHYLDEIIEQISEFSKRVILADANLDKVLSAYNKHRDKPIREQAENIIHLFTLTNLGAPAAFKYFDTTIDRKRYTSTKEVLDATLIHQSITGLYETRIDLSQLGGDGGGGSGGSGGTLNIEDEHRLHETSKEPDVSLGSTWLSDFPQAWAETGGMGLAVRQAPLIIPLKATSTPVSIKQYPMSQEARLGIKPHIQRLLDQGILVPCQSPWNTPLLPVKKPGTNDYRPVQDLREVNKRVEDIHPTVPNPYNLLSGLPPSHQWYTVLDLKDAFFCLRLHPTSQPLFAFEWRDPEMGISGQLTWTRLPQGFKNSPTLFNEALHRDLADFRIQHPDLILLQYVDDLLLAATSELDCQQGTRALLQTLGNLGYRASAKKAQICQKQVKYLGYLLKEGQRWLTEARKETVMGQPTPKTPRQLREFLGTAGFCRLWIPGFAEMAAPLYPLTKPGTLFNWGPDQQKAYQEIKQALLTAPALGLPDLTKPFELFVDEKQGYAKGVLTQKLGPWRRPVAYLSKKLDPVAAGWPPCLRMVAAIAVLTKDAGKLTMGQPLVILAPHAVEALVKQPPDRWLSNARMTHYQALLLDTDRVQFGPVVALNPATLLPLPEEGLQHNCLDILAEAHGTRPDLTDQPLPDADHTWYTDGSSLLQEGQRKAGAAVTTETEVIWAKALPAGTSAQRAELIALTQALKMAEGKKLNVYTDSRYAFATAHIHGEIYRRRGWLTSEGKEIKNKDEILALLKALFLPKRLSIIHCPGHQKGHSAEARGNRMADQAARKAAITETPDTSTLLAGKRTADGSEFEKRTADGSEFESPKKKAKVE

SEQ ID NO: 6026 - protein, 2085 aa, synthetic construct
MPAAKRVKLDGGDKKYSIGLDIGTNSVGWAVITDEYKVPSKKFKVLGNTDRHSIKKNLIGALLFDSGETAEATRLKRTARRRYTRRKNRICYLQEIFSNEMAKVDDSFFHRLEESFLVEEDKKHERHPIFGNIVDEVAYHEKYPTIYHLRKKLVDSTDKADLRLIYLALAHMIKFRGHFLIEGDLNPDNSDVDKLFIQLVQTYNQLFEENPINASGVDAKAILSARLSKSRRLENLIAQLPGEKKNGLFGNLIALSLGLTPNFKSNFDLAEDAKLQLSKDTYDDDLDNLLAQIGDQYADLFLAAKNLSDAILLSDILRVNTEITKAPLSASMIKRYDEHHQDLTLLKALVRQQLPEKYKEIFFDQSKNGYAGYIDGGASQEEFYKFIKPILEKMDGTEELLVKLNREDLLRKQRTFDNGSIPHQIHLGELHAILRRQEDFYPFLKDNREKIEKILTFRIPYYVGPLARGNSRFAWMTRKSEETITPWNFEEVVDKGASAQSFIERMTNFDKNLPNEKVLPKHSLLYEYFTVYNELTKVKYVTEGMRKPAFLSGEQKKAIVDLLFKTNRKVTVKQLKEDYFKKIECFDSVEISGVEDRFNASLGTYHDLLKIIKDKDFLDNEENEDILEDIVLTLTLFEDREMIEERLKTYAHLFDDKVMKQLKRRRYTGWGRLSRKLINGIRDKQSGKTILDFLKSDGFANRNFMQLIHDDSLTFKEDIQKAQVSGQGDSLHEHIANLAGSPAIKKGILQTVKVVDELVKVMGRHKPENIVIEMARENQTTQKGQKNSRERMKRIEEGIKELGSQILKEHPVENTQLQNEKLYLYYLQNGRDMYVDQELDINRLSDYDVDHIVPQSFLKDDSIDNKVLTRSDKARGKSDNVPSEEVVKKMKNYWRQLLNAKLITQRKFDNLTKAERGGLSELDKAGFIKRQLVETRQITKHVAQILDSRMNTKYDENDKLIREVKVITLKSKLVSDFRKDFQFYKVREINNYHHAHDAYLNAVVGTALIKKYPKLESEFVYGDYKVYDVRKMIAKSEQEIGKATAKYFFYSNIMNFFKTEITLANGEIRKRPLIETNGETGEIVWDKGRDFATVRKVLSMPQVNIVKKTEVQTGGFSKESILPKRNSDKLIARKKDWDPKKYGGFDSPTVAYSVLVVAKVEKGKSKKLKSVKELLGITIMERSSFEKNPIDFLEAKGYKEVKKDLIIKLPKYSLFELENGRKRMLASAGELQKGNELALPSKYVNFLYLASHYEKLKGSPEDNEQKQLFVEQHKHYLDEIIEQISEFSKRVILADANLDKVLSAYNKHRDKPIREQAENIIHLFTLTNLGAPAAFKYFDTTIDRKRYTSTKEVLDATLIHQSITGLYETRIDLSQLGGDGGGGSGGSGGTLQLDDEYRLYSPLVKPDQNIQFWLEQFPQAWAETAGMGLAKQVPPQVIQLKASATPVSVRQYPLSKEAQEGIRPHVQRLIQQGILVPVQSPWNTPLLPVRKPGTNDYRPVQDLREVNKRVQDIHPTVPNPYNLLCALPPQRSWYTVLDLKDAFFCLRLHPTSQPLFAFEWRDPGTGRTGQLTWTRLPQGFKNSPTIFDEALHRDLANFRIQHPQVTLLQYVDDLLLAGATKQDCLEGTKALLLELSDLGYRASAKKAQICRREVTYLGYSLRDGQRWLTEARKKTVVQIPAPTTAKQVREFLGTAGFCRLWIPGFATLAAPLYPLTKEKGEFSWAPEHQKAFDAIKKALLSAPALALPDVTKPFTLYVDERKGVARGVLTQTLGPWRRPVAYLSKKLDPVASGWPVCLKAIAAVAILVKDADKLTLGQNITVIAPHALENIVRQPPDRWMTNARMTHYQSLLLTERVTFAPPAALNPATLLPEETDEPVTHDCHQLLIEETGVRKDLTDIPLTGEVLTWFTDGSSYVVEGKRMAGAAVVDGTRTIWASSLPEGTSAQKAELMALTQALRLAEGKSINIYTDSRYAFATAHVHGAIYKQRGLLTSAGREIKNKEEILSLLEALHLPKRLAIIHCPGHQKAKDPISRGNQMADRVAKQAAQGVNLLAGKRTADGSEFEKRTADGSEFESPKKKAKVE

SEQ ID NO: 6027 - protein, 2171 aa, synthetic construct
MPAAKRVKLDGGDKKYSIGLDIGTNSVGWAVITDEYKVPSKKFKVLGNTDRHSIKKNLIGALLFDSGETAEATRLKRTARRRYTRRKNRICYLQEIFSNEMAKVDDSFFHRLEESFLVEEDKKHERHPIFGNIVDEVAYHEKYPTIYHLRKKLVDSTDKADLRLIYLALAHMIKFRGHFLIEGDLNPDNSDVDKLFIQLVQTYNQLFEENPINASGVDAKAILSARLSKSRRLENLIAQLPGEKKNGLFGNLIALSLGLTPNFKSNFDLAEDAKLQLSKDTYDDDLDNLLAQIGDQYADLFLAAKNLSDAILLSDILRVNTEITKAPLSASMIKRYDEHHQDLTLLKALVRQQLPEKYKEIFFDQSKNGYAGYIDGGASQEEFYKFIKPILEKMDGTEELLVKLNREDLLRKQRTFDNGSIPHQIHLGELHAILRRQEDFYPFLKDNREKIEKILTFRIPYYVGPLARGNSRFAWMTRKSEETITPWNFEEVVDKGASAQSFIERMTNFDKNLPNEKVLPKHSLLYEYFTVYNELTKVKYVTEGMRKPAFLSGEQKKAIVDLLFKTNRKVTVKQLKEDYFKKIECFDSVEISGVEDRFNASLGTYHDLLKIIKDKDFLDNEENEDILEDIVLTLTLFEDREMIEERLKTYAHLFDDKVMKQLKRRRYTGWGRLSRKLINGIRDKQSGKTILDFLKSDGFANRNFMQLIHDDSLTFKEDIQKAQVSGQGDSLHEHIANLAGSPAIKKGILQTVKVVDELVKVMGRHKPENIVIEMARENQTTQKGQKNSRERMKRIEEGIKELGSQILKEHPVENTQLQNEKLYLYYLQNGRDMYVDQELDINRLSDYDVDHIVPQSFLKDDSIDNKVLTRSDKARGKSDNVPSEEVVKKMKNYWRQLLNAKLITQRKFDNLTKAERGGLSELDKAGFIKRQLVETRQITKHVAQILDSRMNTKYDENDKLIREVKVITLKSKLVSDFRKDFQFYKVREINNYHHAHDAYLNAVVGTALIKKYPKLESEFVYGDYKVYDVRKMIAKSEQEIGKATAKYFFYSNIMNFFKTEITLANGEIRKRPLIETNGETGEIVWDKGRDFATVRKVLSMPQVNIVKKTEVQTGGFSKESILPKRNSDKLIARKKDWDPKKYGGFDSPTVAYSVLVVAKVEKGKSKKLKSVKELLGITIMERSSFEKNPIDFLEAKGYKEVKKDLIIKLPKYSLFELENGRKRMLASAGELQKGNELALPSKYVNFLYLASHYEKLKGSPEDNEQKQLFVEQHKHYLDEIIEQISEFSKRVILADANLDKVLSAYNKHRDKPIREQAENIIHLFTLTNLGAPAAFKYFDTTIDRKRYTSTKEVLDATLIHQSITGLYETRIDLSQLGGDGGGGSGGSGGMDPLQLLQPLEAEIKGTKLKAHWNSGATITCVPQAFLEEEVPIKNIWIKTIHGEKEQPVYYLTFKIQGRKVEAEVISSPYDYILVSPSDIPWLMKKPLQLTTLVPLQEYEERLLKQTMLTGSYKEKLQSLFLKYDALWQHWENQVGHRRIKPHHIATGTVNPRPQKQYPINPKAKASIQTVINDLLKQGVLIQQNSIMNTPVYPVPKPDGKWRMVLDYREVNKTIPLIAAQNQHSAGILSSIFRGKYKTTLDLSNGFWAHSITPESYWLTAFTWLGQQYCWTRLPQGFLNSPALFNADVVDLLKEVPNVQVYVDDIYISHDDPREHLEQLEKVFSLLLNAGYVVSLKKSEIAQHEVEFLGFNITKEGRGLTETFKQKLLNITPPRDLKQLQSILGLLNFARNFIPNFSELVKPLYNIIATAPGKYITWTTDNSQQLQNIISMLNSAENLEERNPEVRLIMKVNTSPSAGYIRFYNEFAKRPIMYLNYVYTKAEVKFTNTEKLLTTIHKGLIKALDLGMGQEILVYSPIVSMTKIQKTPLPERKALPIRWITWMSYLEDPRIQFHYDKTLPELQQVPTVTDDIIAKIKHPSEFSMVFYTDGSAIKHPNVNKSHNAGMGIAQVQFKPEFTVINTWSIPLGDHTAQLAEVAAVEFACKKALKIDGPVLIVTDSFYVAESVNKELPYWQSNGFFNNKKKPLKHVSKWKSIADCIQLKPDIIIIHEKGHQPTASTFHTEGNNLADKLATQGSYVVNAGKRTADGSEFEKRTADGSEFESPKKKAKVE

SEQ ID NO: 6028 - protein, 2091 aa, synthetic construct
MPAAKRVKLDGGDKKYSIGLDIGTNSVGWAVITDEYKVPSKKFKVLGNTDRHSIKKNLIGALLFDSGETAEATRLKRTARRRYTRRKNRICYLQEIFSNEMAKVDDSFFHRLEESFLVEEDKKHERHPIFGNIVDEVAYHEKYPTIYHLRKKLVDSTDKADLRLIYLALAHMIKFRGHFLIEGDLNPDNSDVDKLFIQLVQTYNQLFEENPINASGVDAKAILSARLSKSRRLENLIAQLPGEKKNGLFGNLIALSLGLTPNFKSNFDLAEDAKLQLSKDTYDDDLDNLLAQIGDQYADLFLAAKNLSDAILLSDILRVNTEITKAPLSASMIKRYDEHHQDLTLLKALVRQQLPEKYKEIFFDQSKNGYAGYIDGGASQEEFYKFIKPILEKMDGTEELLVKLNREDLLRKQRTFDNGSIPHQIHLGELHAILRRQEDFYPFLKDNREKIEKILTFRIPYYVGPLARGNSRFAWMTRKSEETITPWNFEEVVDKGASAQSFIERMTNFDKNLPNEKVLPKHSLLYEYFTVYNELTKVKYVTEGMRKPAFLSGEQKKAIVDLLFKTNRKVTVKQLKEDYFKKIECFDSVEISGVEDRFNASLGTYHDLLKIIKDKDFLDNEENEDILEDIVLTLTLFEDREMIEERLKTYAHLFDDKVMKQLKRRRYTGWGRLSRKLINGIRDKQSGKTILDFLKSDGFANRNFMQLIHDDSLTFKEDIQKAQVSGQGDSLHEHIANLAGSPAIKKGILQTVKVVDELVKVMGRHKPENIVIEMARENQTTQKGQKNSRERMKRIEEGIKELGSQILKEHPVENTQLQNEKLYLYYLQNGRDMYVDQELDINRLSDYDVDHIVPQSFLKDDSIDNKVLTRSDKARGKSDNVPSEEVVKKMKNYWRQLLNAKLITQRKFDNLTKAERGGLSELDKAGFIKRQLVETRQITKHVAQILDSRMNTKYDENDKLIREVKVITLKSKLVSDFRKDFQFYKVREINNYHHAHDAYLNAVVGTALIKKYPKLESEFVYGDYKVYDVRKMIAKSEQEIGKATAKYFFYSNIMNFFKTEITLANGEIRKRPLIETNGETGEIVWDKGRDFATVRKVLSMPQVNIVKKTEVQTGGFSKESILPKRNSDKLIARKKDWDPKKYGGFDSPTVAYSVLVVAKVEKGKSKKLKSVKELLGITIMERSSFEKNPIDFLEAKGYKEVKKDLIIKLPKYSLFELENGRKRMLASAGELQKGNELALPSKYVNFLYLASHYEKLKGSPEDNEQKQLFVEQHKHYLDEIIEQISEFSKRVILADANLDKVLSAYNKHRDKPIREQAENIIHLFTLTNLGAPAAFKYFDTTIDRKRYTSTKEVLDATLIHQSITGLYETRIDLSQLGGDGGGGSGGSGGTLNIEDEYRLHETSKEPDVPLGSTWLSDFPQAWAETGGMGLAVRQAPLIIPLKATSTPVSIKQYPMSQEARLGIKPHIQRLLDQGILVPCQSPWNTPLLPVKKPGTNDYRPVQDLREVNKRVEDIHPTVPNPYNLLSGLPPSHQWYTVLDLKDAFFCLRLHPTSQPLFAFEWRDPEMGISGQLTWTRLPQGFKNSPTLFNEALHRDLADFRIQHPDLILLQYVDDLLLAATSEQDCQRGTRALLQTLGNLGYRASAKKAQICQKQVKYLGYLLKEGQRWLTEARKETVMGQPTPKTPRQLREFLGTAGFCRLWIPGFAEMAAPLYPLTKPGTLFNWGPDQQKAYQEIKQALLTAPALGLPDLTKPFELFVDEKQGYAKGVLTQKLGPWRRPVAYLSKKLDPVAAGWPPCLRMVAAIAVLTKDAGKLTMGQPLVILAPHAVEALVKQPPDRWLSNARMTHYQAMLLDTDRVQFGPVVALNPATLLPLPEKEAPHDCLEILAETHGTRPDLTDQPIPDADYTWYTDGSSFLQEGQRRAGAAVTTETEVIWARALPAGTSAQRAELIALTQALKMAEGKKLNVYTDSRYAFATAHVHGEIYRRRGWLTSEGREIKNKNEILALLKALFLPKRLSIIHCPGHQKGNSAEARGNRMADQAAREAAMKAVLETSTLLAGKRTADGSEFEKRTADGSEFESPKKKAKVE

SEQ ID NO: 6029 - protein, 2096 aa, synthetic construct
MPAAKRVKLDGGDKKYSIGLDIGTNSVGWAVITDEYKVPSKKFKVLGNTDRHSIKKNLIGALLFDSGETAEATRLKRTARRRYTRRKNRICYLQEIFSNEMAKVDDSFFHRLEESFLVEEDKKHERHPIFGNIVDEVAYHEKYPTIYHLRKKLVDSTDKADLRLIYLALAHMIKFRGHFLIEGDLNPDNSDVDKLFIQLVQTYNQLFEENPINASGVDAKAILSARLSKSRRLENLIAQLPGEKKNGLFGNLIALSLGLTPNFKSNFDLAEDAKLQLSKDTYDDDLDNLLAQIGDQYADLFLAAKNLSDAILLSDILRVNTEITKAPLSASMIKRYDEHHQDLTLLKALVRQQLPEKYKEIFFDQSKNGYAGYIDGGASQEEFYKFIKPILEKMDGTEELLVKLNREDLLRKQRTFDNGSIPHQIHLGELHAILRRQEDFYPFLKDNREKIEKILTFRIPYYVGPLARGNSRFAWMTRKSEETITPWNFEEVVDKGASAQSFIERMTNFDKNLPNEKVLPKHSLLYEYFTVYNELTKVKYVTEGMRKPAFLSGEQKKAIVDLLFKTNRKVTVKQLKEDYFKKIECFDSVEISGVEDRFNASLGTYHDLLKIIKDKDFLDNEENEDILEDIVLTLTLFEDREMIEERLKTYAHLFDDKVMKQLKRRRYTGWGRLSRKLINGIRDKQSGKTILDFLKSDGFANRNFMQLIHDDSLTFKEDIQKAQVSGQGDSLHEHIANLAGSPAIKKGILQTVKVVDELVKVMGRHKPENIVIEMARENQTTQKGQKNSRERMKRIEEGIKELGSQILKEHPVENTQLQNEKLYLYYLQNGRDMYVDQELDINRLSDYDVDHIVPQSFLKDDSIDNKVLTRSDKARGKSDNVPSEEVVKKMKNYWRQLLNAKLITQRKFDNLTKAERGGLSELDKAGFIKRQLVETRQITKHVAQILDSRMNTKYDENDKLIREVKVITLKSKLVSDFRKDFQFYKVREINNYHHAHDAYLNAVVGTALIKKYPKLESEFVYGDYKVYDVRKMIAKSEQEIGKATAKYFFYSNIMNFFKTEITLANGEIRKRPLIETNGETGEIVWDKGRDFATVRKVLSMPQVNIVKKTEVQTGGFSKESILPKRNSDKLIARKKDWDPKKYGGFDSPTVAYSVLVVAKVEKGKSKKLKSVKELLGITIMERSSFEKNPIDFLEAKGYKEVKKDLIIKLPKYSLFELENGRKRMLASAGELQKGNELALPSKYVNFLYLASHYEKLKGSPEDNEQKQLFVEQHKHYLDEIIEQISEFSKRVILADANLDKVLSAYNKHRDKPIREQAENIIHLFTLTNLGAPAAFKYFDTTIDRKRYTSTKEVLDATLIHQSITGLYETRIDLSQLGGDGGGGSGGSGGSGGTAPLEEEYRLFLEAPIQNVTLLEQWKREIPKVWAEINPPGLASTQAPIHVQLLSTALPVRVRQYPITLEAKRSLRETIRKFRAAGILRPVHSPWNTPLLPVRKSGTSEYRMVQDLREVNKRVETIHPTVPNPYTLLSLLPPDRIWYSVLDLKDAFFCIPLAPESQLIFAFEWADAEEGESGQLTWTRLPQGFKNSPTLFNEALNRDLQGFRLDHPSVSLLQYVDDLLIAADTQAACLSATRDLLMTLAELGYRVSGKKAQLCQEEVTYLGFKIHKGSRSLSNSRTQAILQIPVPKTKRQVREFLGTIGYCRLWIPGFAELAQPLYAATRPGNDPLVWGEKEEEAFQSLKLALTQPPALALPSLDKPFQLFVEETSGAAKGVLTQALGPWKRPVAYLSKRLDPVAAGWPRCLRAIAAAALLTREASKLTFGQDIEITSSHNLESLLRSPPDKWLTNARITQYQVLLLDPPRVRFKQTAALNPATLLPETDDTLPIHHCLDTLDSLTSTRPDLTDQPLAQAEATLFTDGSSYIRDGKRYAGAAVVTLDSVIWAEPLPIGTSAQKAELIALTKALEWSKDKSVNIYTDSRYAFATLHVHGMIYRERGWLTAGGKAIKNAPEILALLTAVWLPKRVAVMHCKGHQKDDAPTSTGNRRADEVAREVAIRPLSTQATISAGKRTADGSEFEKRTADGSEFESPKKKAKVE

SEQ ID NO: 6030 - protein, 2096 aa, synthetic construct; identical to SEQ ID NO: 4501

SEQ ID NO: 6031 - protein, 2093 aa, synthetic construct
MPAAKRVKLDGGDKKYSIGLDIGTNSVGWAVITDEYKVPSKKFKVLGNTDRHSIKKNLIGALLFDSGETAEATRLKRTARRRYTRRKNRICYLQEIFSNEMAKVDDSFFHRLEESFLVEEDKKHERHPIFGNIVDEVAYHEKYPTIYHLRKKLVDSTDKADLRLIYLALAHMIKFRGHFLIEGDLNPDNSDVDKLFIQLVQTYNQLFEENPINASGVDAKAILSARLSKSRRLENLIAQLPGEKKNGLFGNLIALSLGLTPNFKSNFDLAEDAKLQLSKDTYDDDLDNLLAQIGDQYADLFLAAKNLSDAILLSDILRVNTEITKAPLSASMIKRYDEHHQDLTLLKALVRQQLPEKYKEIFFDQSKNGYAGYIDGGASQEEFYKFIKPILEKMDGTEELLVKLNREDLLRKQRTFDNGSIPHQIHLGELHAILRRQEDFYPFLKDNREKIEKILTFRIPYYVGPLARGNSRFAWMTRKSEETITPWNFEEVVDKGASAQSFIERMTNFDKNLPNEKVLPKHSLLYEYFTVYNELTKVKYVTEGMRKPAFLSGEQKKAIVDLLFKTNRKVTVKQLKEDYFKKIECFDSVEISGVEDRFNASLGTYHDLLKIIKDKDFLDNEENEDILEDIVLTLTLFEDREMIEERLKTYAHLFDDKVMKQLKRRRYTGWGRLSRKLINGIRDKQSGKTILDFLKSDGFANRNFMQLIHDDSLTFKEDIQKAQVSGQGDSLHEHIANLAGSPAIKKGILQTVKVVDELVKVMGRHKPENIVIEMARENQTTQKGQKNSRERMKRIEEGIKELGSQILKEHPVENTQLQNEKLYLYYLQNGRDMYVDQELDINRLSDYDVDHIVPQSFLKDDSIDNKVLTRSDKARGKSDNVPSEEVVKKMKNYWRQLLNAKLITQRKFDNLTKAERGGLSELDKAGFIKRQLVETRQITKHVAQILDSRMNTKYDENDKLIREVKVITLKSKLVSDFRKDFQFYKVREINNYHHAHDAYLNAVVGTALIKKYPKLESEFVYGDYKVYDVRKMIAKSEQEIGKATAKYFFYSNIMNFFKTEITLANGEIRKRPLIETNGETGEIVWDKGRDFATVRKVLSMPQVNIVKKTEVQTGGFSKESILPKRNSDKLIARKKDWDPKKYGGFDSPTVAYSVLVVAKVEKGKSKKLKSVKELLGITIMERSSFEKNPIDFLEAKGYKEVKKDLIIKLPKYSLFELENGRKRMLASAGELQKGNELALPSKYVNFLYLASHYEKLKGSPEDNEQKQLFVEQHKHYLDEIIEQISEFSKRVILADANLDKVLSAYNKHRDKPIREQAENIIHLFTLTNLGAPAAFKYFDTTIDRKRYTSTKEVLDATLIHQSITGLYETRIDLSQLGGDGGGGSGGSGGSGGTLQLEEEYRLFEPESTQKQEMDIWLKNFPQAWAETGGMGTAHCQAPVLIQLKATATPISIRQYPMPHEAYQGIKPHIRRMLDQGILKPCQSPWNTPLLPVKKPGTEDYRPVQDLREVNKRVEDIHPTVPNPYNLLSTLPPSHPWYTVLDLKDAFFCLRLHSESQLLFAFEWRDPEIGLSGQLTWTRLPQGFKNSPTLFNEALHSDLADFRVRYPALVLLQYVDDLLLAAATRTECLEGTKALLETLGNKGYRASAKKAQICLQEVTYLGYSLKDGQRWLTKARKEAILSIPVPKNSRQVREFLGKAGYCRLFIPGFAELAAPLYPLTRPGTLFQWGTEQQLAFEDIKKALLSSPALGLPDITKPFELFIDENSGFAKGVLVQKLGPWKRPVAYLSKKLDTVASGWPPCLRMVAAIAILVKDAGKLTLGQPLTILTSHPVEALVRQPPNKWLSNARMTHYQAMLLDAERVHFGPTVSLNPATLLPLPSGGNHHDCLQILAETHGTRPDLTDQPLPDADLTWYTDGSSFIRNGEREAGAAVTTESEVIWAAPLPPGTSAQRAELIALTQALKMAEGKKLTVYTDSRYAFATTHVHGEIYRRRGWLTSEGKEIKNKNEILALLEALFLPKRLSIIHCPGHQKGDSPQAKGNRLADDTAKKAATETHSSLTVLPAGKRTADGSEFEKRTADGSEFESPKKKAKVE

SEQ ID NO: 6032 - protein, 2094 aa, synthetic construct
MPAAKRVKLDGGDKKYSIGLDIGTNSVGWAVITDEYKVPSKKFKVLGNTDRHSIKKNLIGALLFDSGETAEATRLKRTARRRYTRRKNRICYLQEIFSNEMAKVDDSFFHRLEESFLVEEDKKHERHPIFGNIVDEVAYHEKYPTIYHLRKKLVDSTDKADLRLIYLALAHMIKFRGHFLIEGDLNPDNSDVDKLFIQLVQTYNQLFEENPINASGVDAKAILSARLSKSRRLENLIAQLPGEKKNGLFGNLIALSLGLTPNFKSNFDLAEDAKLQLSKDTYDDDLDNLLAQIGDQYADLFLAAKNLSDAILLSDILRVNTEITKAPLSASMIKRYDEHHQDLTLLKALVRQQLPEKYKEIFFDQSKNGYAGYIDGGASQEEFYKFIKPILEKMDGTEELLVKLNREDLLRKQRTFDNGSIPHQIHLGELHAILRRQEDFYPFLKDNREKIEKILTFRIPYYVGPLARGNSRFAWMTRKSEETITPWNFEEVVDKGASAQSFIERMTNFDKNLPNEKVLPKHSLLYEYFTVYNELTKVKYVTEGMRKPAFLSGEQKKAIVDLLFKTNRKVTVKQLKEDYFKKIECFDSVEISGVEDRFNASLGTYHDLLKIIKDKDFLDNEENEDILEDIVLTLTLFEDREMIEERLKTYAHLFDDKVMKQLKRRRYTGWGRLSRKLINGIRDKQSGKTILDFLKSDGFANRNFMQLIHDDSLTFKEDIQKAQVSGQGDSLHEHIANLAGSPAIKKGILQTVKVVDELVKVMGRHKPENIVIEMARENQTTQKGQKNSRERMKRIEEGIKELGSQILKEHPVENTQLQNEKLYLYYLQNGRDMYVDQELDINRLSDYDVDHIVPQSFLKDDSIDNKVLTRSDKARGKSDNVPSEEVVKKMKNYWRQLLNAKLITQRKFDNLTKAERGGLSELDKAGFIKRQLVETRQITKHVAQILDSRMNTKYDENDKLIREVKVITLKSKLVSDFRKDFQFYKVREINNYHHAHDAYLNAVVGTALIKKYPKLESEFVYGDYKVYDVRKMIAKSEQEIGKATAKYFFYSNIMNFFKTEITLANGEIRKRPLIETNGETGEIVWDKGRDFATVRKVLSMPQVNIVKKTEVQTGGFSKESILPKRNSDKLIARKKDWDPKKYGGFDSPTVAYSVLVVAKVEKGKSKKLKSVKELLGITIMERSSFEKNPIDFLEAKGYKEVKKDLIIKLPKYSLFELENGRKRMLASAGELQKGNELALPSKYVNFLYLASHYEKLKGSPEDNEQKQLFVEQHKHYLDEIIEQISEFSKRVILADANLDKVLSAYNKHRDKPIREQAENIIHLFTLTNLGAPAAFKYFDTTIDRKRYTSTKEVLDATLIHQSITGLYETRIDLSQLGGDGGGGSGGSGGSGGTLNLEDEYRLYETSAEPEVSPGSTWLSDFPQAWAETGGMGLAVRQAPLIIPLKATSTPVSIKQYPMSQEAKLGIKPHIQRLLDQGILVPCQSPWNTPLLPVKKPGTNDYRPVQDLREVNKRVEDIHPTVPNPYNLLSGLPPSHRWYTVLDLKDAFFCLRLHPTSQPLFAFEWRDPGMGISGQLTWTRLPQGFKNSPTLFNEALHRDLADFRIQHPDLILLQYVDDILLAATSELDCQQGTRALLLTLGNLGYRASAKKAQLCQKQVKYLGYLLKEGQRWLTEARKETVMGQPTPKTPRQLREFLGTAGFCRLWIPGFAEMAAPLYPLTKPGTLFNWGPDQQKAYQEIKQALLTAPALGLPDLTKPFELFVDEKQGYAKGVLTQKLGPWRRPVAYLSKKLDPVAAGWPPCLRMVAAIAVLRKDAGKLTMGQPLVILAPHAVEALVKQPPDRWLSNARMTHYQAMLLDTDRVQFGPVVALNPATLLPLPEEGAPHDCLEILAETHGTRPDLTDQPIPDADHTWYTDGSSFLQEGQRKAGAAVTTETEVIWARALPAGTSAQRAELIALTQALKMAEGKRLNVYTDSRYAFATAHIHGEIYRRRGWLTSEGREIKNKSEILALLKALFLPKRLSIIHCLGHQKGDSAEARGNRLADQAAREAAIKTPPDTSTLLAGKRTADGSEFEKRTADGSEFESPKKKAKVE

SEQ ID NO: 6033 - protein, 2094 aa, synthetic construct
MPAAKRVKLDGGDKKYSIGLDIGTNSVGWAVITDEYKVPSKKFKVLGNTDRHSIKKNLIGALLFDSGETAEATRLKRTARRRYTRRKNRICYLQEIFSNEMAKVDDSFFHRLEESFLVEEDKKHERHPIFGNIVDEVAYHEKYPTIYHLRKKLVDSTDKADLRLIYLALAHMIKFRGHFLIEGDLNPDNSDVDKLFIQLVQTYNQLFEENPINASGVDAKAILSARLSKSRRLENLIAQLPGEKKNGLFGNLIALSLGLTPNFKSNFDLAEDAKLQLSKDTYDDDLDNLLAQIGDQYADLFLAAKNLSDAILLSDILRVNTEITKAPLSASMIKRYDEHHQDLTLLKALVRQQLPEKYKEIFFDQSKNGYAGYIDGGASQEEFYKFIKPILEKMDGTEELLVKLNREDLLRKQRTFDNGSIPHQIHLGELHAILRRQEDFYPFLKDNREKIEKILTFRIPYYVGPLARGNSRFAWMTRKSEETITPWNFEEVVDKGASAQSFIERMTNFDKNLPNEKVLPKHSLLYEYFTVYNELTKVKYVTEGMRKPAFLSGEQKKAIVDLLFKTNRKVTVKQLKEDYFKKIECFDSVEISGVEDRFNASLGTYHDLLKIIKDKDFLDNEENEDILEDIVLTLTLFEDREMIEERLKTYAHLFDDKVMKQLKRRRYTGWGRLSRKLINGIRDKQSGKTILDFLKSDGFANRNFMQLIHDDSLTFKEDIQKAQVSGQGDSLHEHIANLAGSPAIKKGILQTVKVVDELVKVMGRHKPENIVIEMARENQTTQKGQKNSRERMKRIEEGIKELGSQILKEHPVENTQLQNEKLYLYYLQNGRDMYVDQELDINRLSDYDVDHIVPQSFLKDDSIDNKVLTRSDKARGKSDNVPSEEVVKKMKNYWRQLLNAKLITQRKFDNLTKAERGGLSELDKAGFIKRQLVETRQITKHVAQILDSRMNTKYDENDKLIREVKVITLKSKLVSDFRKDFQFYKVREINNYHHAHDAYLNAVVGTALIKKYPKLESEFVYGDYKVYDVRKMIAKSEQEIGKATAKYFFYSNIMNFFKTEITLANGEIRKRPLIETNGETGEIVWDKGRDFATVRKVLSMPQVNIVKKTEVQTGGFSKESILPKRNSDKLIARKKDWDPKKYGGFDSPTVAYSVLVVAKVEKGKSKKLKSVKELLGITIMERSSFEKNPIDFLEAKGYKEVKKDLIIKLPKYSLFELENGRKRMLASAGELQKGNELALPSKYVNFLYLASHYEKLKGSPEDNEQKQLFVEQHKHYLDEIIEQISEFSKRVILADANLDKVLSAYNKHRDKPIREQAENIIHLFTLTNLGAPAAFKYFDTTIDRKRYTSTKEVLDATLIHQSITGLYETRIDLSQLGGDGGGGSGGSGGSGGTLNLEDEYRLYETSAEPEVSPGSTWLSDFPQAWAETGGMGLAVRQAPLIIPLKATSTPVSIKQYPMSQEAKLGIKPHIQRLLDQGILVPCQSPWNTPLLPVKKPGTNDYRPVQDLREVNKRVEDIHPTVPNPYNLLSGLPPSHRWYTVLDLKDAFFCLRLHPTSQPLFAFEWRDPGMGISGQLTWTRLPQGFKNSPTLFNEALHRDLADFRIQHPDLILLQYVDDILLAATSELDCQQGTRALLLTLGNLGYRASAKKAQLCQKQVKYLGYLLKEGQRWLTEARKETVMGQPTPKTPRQLREFLGKAGFCRLFIPGFAEMAAPLYPLTKPGTLFNWGPDQQKAYQEIKQALLTAPALGLPDLTKPFELFVDEKQGYAKGVLTQKLGPWRRPVAYLSKKLDPVAAGWPPCLRMVAAIAVLRKDAGKLTMGQPLVILAPHAVEALVKQPPDRWLSNARMTHYQAMLLDTDRVQFGPVVALNPATLLPLPEEGAPHDCLEILAETHGTRPDLTDQPIPDADHTWYTDGSSFLQEGQRKAGAAVTTETEVIWARALPAGTSAQRAELIALTQALKMAEGKRLNVYTDSRYAFATAHIHGEIYRRRGWLTSEGREIKNKSEILALLKALFLPKRLSIIHCLGHQKGDSAEARGNRLADQAAREAAIKTPPDTSTLLAGKRTADGSEFEKRTADGSEFESPKKKAKVE

SEQ ID NO: 6034 - protein, 2094 aa, synthetic construct
MPAAKRVKLDGGDKKYSIGLDIGTNSVGWAVITDEYKVPSKKFKVLGNTDRHSIKKNLIGALLFDSGETAEATRLKRTARRRYTRRKNRICYLQEIFSNEMAKVDDSFFHRLEESFLVEEDKKHERHPIFGNIVDEVAYHEKYPTIYHLRKKLVDSTDKADLRLIYLALAHMIKFRGHFLIEGDLNPDNSDVDKLFIQLVQTYNQLFEENPINASGVDAKAILSARLSKSRRLENLIAQLPGEKKNGLFGNLIALSLGLTPNFKSNFDLAEDAKLQLSKDTYDDDLDNLLAQIGDQYADLFLAAKNLSDAILLSDILRVNTEITKAPLSASMIKRYDEHHQDLTLLKALVRQQLPEKYKEIFFDQSKNGYAGYIDGGASQEEFYKFIKPILEKMDGTEELLVKLNREDLLRKQRTFDNGSIPHQIHLGELHAILRRQEDFYPFLKDNREKIEKILTFRIPYYVGPLARGNSRFAWMTRKSEETITPWNFEEVVDKGASAQSFIERMTNFDKNLPNEKVLPKHSLLYEYFTVYNELTKVKYVTEGMRKPAFLSGEQKKAIVDLLFKTNRKVTVKQLKEDYFKKIECFDSVEISGVEDRFNASLGTYHDLLKIIKDKDFLDNEENEDILEDIVLTLTLFEDREMIEERLKTYAHLFDDKVMKQLKRRRYTGWGRLSRKLINGIRDKQSGKTILDFLKSDGFANRNFMQLIHDDSLTFKEDIQKAQVSGQGDSLHEHIANLAGSPAIKKGILQTVKVVDELVKVMGRHKPENIVIEMARENQTTQKGQKNSRERMKRIEEGIKELGSQILKEHPVENTQLQNEKLYLYYLQNGRDMYVDQELDINRLSDYDVDHIVPQSFLKDDSIDNKVLTRSDKARGKSDNVPSEEVVKKMKNYWRQLLNAKLITQRKFDNLTKAERGGLSELDKAGFIKRQLVETRQITKHVAQILDSRMNTKYDENDKLIREVKVITLKSKLVSDFRKDFQFYKVREINNYHHAHDAYLNAVVGTALIKKYPKLESEFVYGDYKVYDVRKMIAKSEQEIGKATAKYFFYSNIMNFFKTEITLANGEIRKRPLIETNGETGEIVWDKGRDFATVRKVLSMPQVNIVKKTEVQTGGFSKESILPKRNSDKLIARKKDWDPKKYGGFDSPTVAYSVLVVAKVEKGKSKKLKSVKELLGITIMERSSFEKNPIDFLEAKGYKEVKKDLIIKLPKYSLFELENGRKRMLASAGELQKGNELALPSKYVNFLYLASHYEKLKGSPEDNEQKQLFVEQHKHYLDEIIEQISEFSKRVILADANLDKVLSAYNKHRDKPIREQAENIIHLFTLTNLGAPAAFKYFDTTIDRKRYTSTKEVLDATLIHQSITGLYETRIDLSQLGGDGGGGSGGSGGSGGLGIEDEYRLHETSTEPDVSLGSTWLSDFPQAWAETGGMGLAVRQAPLIIPLKATSTPVSIQQYPMSHEARLGIKPHIQRLLDQGILVPCQSPWNTPLLPVKKPGTNDYRPVQDLREVNKRVEDIHPTVPNPYNLLSGLPPSHQWYTVLDLKDAFFCLRLHPTSQPLFAFEWRDPGMGISGQLTWTRLPQGFKNSPTLFNEALHRDLADFRIQHPDLILLQYVDDILLAATSELDCQQGTRALLQTLGDLGYRASAKKAQICQKQVKYLGYLLREGQRWLTEARKETVMGQPVPKTPRQLREFLGKAGFCRLFIPGFAEMAAPLYPLTKPGTLFSWGPDQQKAYQEIKQALLTAPALGLPDLTKPFELFVDEKQGYAKGVLTQKLGPWRRPVAYLSKKLDPVAAGWPPCLRMVAAIAVLTKDAGKLTMGQPLVILAPHAVEALVKQPPDRWLSNARMTHYQAMLLDTDRVQFGPVVALNPATLLPLPEEGAPHDCLEILAETHGTRPDLTDQPIPDADHTWYTDGSSFLQEGQRKAGAAVTTETEVIWAGALPAGTSAQRAELIALTQALKMAEGKRLNVYTDSRYAFATAHIHGEIYRRRGWLTSEGREIKNKSEILALLKALFLPKRLSIIHCLGHQKGDSAEARGNRLADQAAREAAIKTPPDTSTLLIAGKRTADGSEFEKRTADGSEFESPKKKAKVE

SEQ ID NO: 6035 - protein, 2094 aa, synthetic construct
MPAAKRVKLDGGDKKYSIGLDIGTNSVGWAVITDEYKVPSKKFKVLGNTDRHSIKKNLIGALLFDSGETAEATRLKRTARRRYTRRKNRICYLQEIFSNEMAKVDDSFFHRLEESFLVEEDKKHERHPIFGNIVDEVAYHEKYPTIYHLRKKLVDSTDKADLRLIYLALAHMIKFRGHFLIEGDLNPDNSDVDKLFIQLVQTYNQLFEENPINASGVDAKAILSARLSKSRRLENLIAQLPGEKKNGLFGNLIALSLGLTPNFKSNFDLAEDAKLQLSKDTYDDDLDNLLAQIGDQYADLFLAAKNLSDAILLSDILRVNTEITKAPLSASMIKRYDEHHQDLTLLKALVRQQLPEKYKEIFFDQSKNGYAGYIDGGASQEEFYKFIKPILEKMDGTEELLVKLNREDLLRKQRTFDNGSIPHQIHLGELHAILRRQEDFYPFLKDNREKIEKILTFRIPYYVGPLARGNSRFAWMTRKSEETITPWNFEEVVDKGASAQSFIERMTNFDKNLPNEKVLPKHSLLYEYFTVYNELTKVKYVTEGMRKPAFLSGEQKKAIVDLLFKTNRKVTVKQLKEDYFKKIECFDSVEISGVEDRFNASLGTYHDLLKIIKDKDFLDNEENEDILEDIVLTLTLFEDREMIEERLKTYAHLFDDKVMKQLKRRRYTGWGRLSRKLINGIRDKQSGKTILDFLKSDGFANRNFMQLIHDDSLTFKEDIQKAQVSGQGDSLHEHIANLAGSPAIKKGILQTVKVVDELVKVMGRHKPENIVIEMARENQTTQKGQKNSRERMKRIEEGIKELGSQILKEHPVENTQLQNEKLYLYYLQNGRDMYVDQELDINRLSDYDVDHIVPQSFLKDDSIDNKVLTRSDKARGKSDNVPSEEVVKKMKNYWRQLLNAKLITQRKFDNLTKAERGGLSELDKAGFIKRQLVETRQITKHVAQILDSRMNTKYDENDKLIREVKVITLKSKLVSDFRKDFQFYKVREINNYHHAHDAYLNAVVGTALIKKYPKLESEFVYGDYKVYDVRKMIAKSEQEIGKATAKYFFYSNIMNFFKTEITLANGEIRKRPLIETNGETGEIVWDKGRDFATVRKVLSMPQVNIVKKTEVQTGGFSKESILPKRNSDKLIARKKDWDPKKYGGFDSPTVAYSVLVVAKVEKGKSKKLKSVKELLGITIMERSSFEKNPIDFLEAKGYKEVKKDLIIKLPKYSLFELENGRKRMLASAGELQKGNELALPSKYVNFLYLASHYEKLKGSPEDNEQKQLFVEQHKHYLDEIIEQISEFSKRVILADANLDKVLSAYNKHRDKPIREQAENIIHLFTLTNLGAPAAFKYFDTTIDRKRYTSTKEVLDATLIHQSITGLYETRIDLSQLGGDGGGGSGGSGGSGGTLGIEDEYRLHETSTEPDVSLGSTWLSDFPQAWAETGGMGLAVRQAPLIIPLKATSTPVSIQQYPMSHEARLGIKPHIQRLLDQGILVPCQSPWNTPLLPVKKPGTNDYRPVQDLREVNKRVEDIHPTVPNPYNLLSGLPPSHQWYTVLDLKDAFFCLRLHPTSQPLFAFEWRDPGMGISGQLTWTRLPQGFKNSPTLFNEALHRDLADFRIQHPDLILLQYVDDILLAATSELDCQQGTRALLQTLGDLGYRASAKKAQICQKQVKYLGYLLREGQRWLTEARKETVMGQPVPKTPRQLREFLGTAGFCRLWIPGFAEMAAPLYPLTKPGTLFSWGPDQQKAYQEIKQALLTAPALGLPDLTKPFELFVDEKQGYAKGVLTQKLGPWRRPVAYLSKKLDPVAAGWPPCLRMVAAIAVLTKDAGKLTMGQPLVILAPHAVEALVKQPPDRWLSNARMTHYQAMLLDTDRVQFGPVVALNPATLLPLPEEGAPHDCLEILAETHGTRPDLTDQPIPDADHTWYTDGSSFLQEGQRKAGAAVTTETEVIWAGALPAGTSAQRAELIALTQALKMAEGKRLNVYTDSRYAFATAHIHGEIYRRRGWLTSEGREIKNKSEILALLKALFLPKRLSIIHCLGHQKGDSAEARGNRLADQAAREAAIKTPPDTSTLLAGKRTADGSEFEKRTADGSEFESPKKKAKVE

SEQ ID NO: 6036 - protein, 2094 aa, synthetic construct; identical to SEQ ID NO: 6034

SEQ ID NO: 6037 - protein, 2094 aa, synthetic construct
MPAAKRVKLDGGDKKYSIGLDIGTNSVGWAVITDEYKVPSKKFKVLGNTDRHSIKKNLIGALLFDSGETAEATRLKRTARRRYTRRKNRICYLQEIFSNEMAKVDDSFFHRLEESFLVEEDKKHERHPIFGNIVDEVAYHEKYPTIYHLRKKLVDSTDKADLRLIYLALAHMIKFRGHFLIEGDLNPDNSDVDKLFIQLVQTYNQLFEENPINASGVDAKAILSARLSKSRRLENLIAQLPGEKKNGLFGNLIALSLGLTPNFKSNFDLAEDAKLQLSKDTYDDDLDNLLAQIGDQYADLFLAAKNLSDAILLSDILRVNTEITKAPLSASMIKRYDEHHQDLTLLKALVRQQLPEKYKEIFFDQSKNGYAGYIDGGASQEEFYKFIKPILEKMDGTEELLVKLNREDLLRKQRTFDNGSIPHQIHLGELHAILRRQEDFYPFLKDNREKIEKILTFRIPYYVGPLARGNSRFAWMTRKSEETITPWNFEEVVDKGASAQSFIERMTNFDKNLPNEKVLPKHSLLYEYFTVYNELTKVKYVTEGMRKPAFLSGEQKKAIVDLLFKTNRKVTVKQLKEDYFKKIECFDSVEISGVEDRFNASLGTYHDLLKIIKDKDFLDNEENEDILEDIVLTLTLFEDREMIEERLKTYAHLFDDKVMKQLKRRRYTGWGRLSRKLINGIRDKQSGKTILDFLKSDGFANRNFMQLIHDDSLTFKEDIQKAQVSGQGDSLHEHIANLAGSPAIKKGILQTVKVVDELVKVMGRHKPENIVIEMARENQTTQKGQKNSRERMKRIEEGIKELGSQILKEHPVENTQLQNEKLYLYYLQNGRDMYVDQELDINRLSDYDVDHIVPQSFLKDDSIDNKVLTRSDKARGKSDNVPSEEVVKKMKNYWRQLLNAKLITQRKFDNLTKAERGGLSELDKAGFIKRQLVETRQITKHVAQILDSRMNTKYDENDKLIREVKVITLKSKLVSDFRKDFQFYKVREINNYHHAHDAYLNAVVGTALIKKYPKLESEFVYGDYKVYDVRKMIAKSEQEIGKATAKYFFYSNIMNFFKTEITLANGEIRKRPLIETNGETGEIVWDKGRDFATVRKVLSMPQVNIVKKTEVQTGGFSKESILPKRNSDKLIARKKDWDPKKYGGFDSPTVAYSVLVVAKVEKGKSKKLKSVKELLGITIMERSSFEKNPIDFLEAKGYKEVKKDLIIKLPKYSLFELENGRKRMLASAGELQKGNELALPSKYVNFLYLASHYEKLKGSPEDNEQKQLFVEQHKHYLDEIIEQISEFSKRVILADANLDKVLSAYNKHRDKPIREQAENIIHLFTLTNLGAPAAFKYFDTTIDRKRYTSTKEVLDATLIHQSITGLYETRIDLSQLGGDGGGGSGGSGGSGGTLGIEDEYRLHETSTEPDVSLGSTWLSDFPQAWAETGGMGLAVRQAPLIIPLKATSTPVSIQQYPMSHEARLGIKPHIQRLLDQGILVPCQSPWNTPLLPVKKPGTNDYRPVQDLREVNKRVEDIHPTVPNPYNLLSGLPPSHQWYTVLDLKDAFFCLRLHPTSQPLFAFEWRDPGMGISGQLTWTRLPQGFKNSPTLFDEALHRDLADFRIQHPDLILLQYVDDILLAATSELDCQQGTRALLQTLGDLGYRASAKKAQICQKQVKYLGYLLREGQRWLTEARKETVMGQPVPKTPRQLREFLGTAGFCRLWIPGFAEMAAPLYPLTKTGTLFSWGPDQQKAYQEIKQALLTAPALGLPDLTKPFELFVDEKQGYAKGVLTQKLGPWRRPVAYLSKKLDPVAAGWPPCLRMVAAIAVLTKDAGKLTMGQPLVILAPHAVEALVKQPPDRWLSNARMTHYQAMLLDTDRVQFGPVVALNPATLLPLPEEGAPHDCLEILAETHGTRPDLTDQPIPDADHTWYTDGSSFLQEGQRKAGAAVTTETEVIWAGALPAGTSAQRAELIALTQALKMAEGKRLNVYTDSRYAFATAHIHGEIYRRRGLLTSEGREIKNKSEILALLKALFLPKRLSIIHCLGHQKGDSAEARGNRLADQAAREAAIKTPPDTSTLLAGKRTADGSEFEKRTADGSEFESPKKKAKVE

SEQ ID NO: 6038 - protein, 2094 aa, synthetic construct; identical to SEQ ID NO: 6035

SEQ ID NO: 6039 - protein, 2094 aa, synthetic construct
MPAAKRVKLDGGDKKYSIGLDIGTNSVGWAVITDEYKVPSKKFKVLGNTDRHSIKKNLIGALLFDSGETAEATRLKRTARRRYTRRKNRICYLQEIFSNEMAKVDDSFFHRLEESFLVEEDKKHERHPIFGNIVDEVAYHEKYPTIYHLRKKLVDSTDKADLRLIYLALAHMIKFRGHFLIEGDLNPDNSDVDKLFIQLVQTYNQLFEENPINASGVDAKAILSARLSKSRRLENLIAQLPGEKKNGLFGNLIALSLGLTPNFKSNFDLAEDAKLQLSKDTYDDDLDNLLAQIGDQYADLFLAAKNLSDAILLSDILRVNTEITKAPLSASMIKRYDEHHQDLTLLKALVRQQLPEKYKEIFFDQSKNGYAGYIDGGASQEEFYKFIKPILEKMDGTEELLVKLNREDLLRKQRTFDNGSIPHQIHLGELHAILRRQEDFYPFLKDNREKIEKILTFRIPYYVGPLARGNSRFAWMTRKSEETITPWNFEEVVDKGASAQSFIERMTNFDKNLPNEKVLPKHSLLYEYFTVYNELTKVKYVTEGMRKPAFLSGEQKKAIVDLLFKTNRKVTVKQLKEDYFKKIECFDSVEISGVEDRFNASLGTYHDLLKIIKDKDFLDNEENEDILEDIVLTLTLFEDREMIEERLKTYAHLFDDKVMKQLKRRRYTGWGRLSRKLINGIRDKQSGKTILDFLKSDGFANRNFMQLIHDDSLTFKEDIQKAQVSGQGDSLHEHIANLAGSPAIKKGILQTVKVVDELVKVMGRHKPENIVIEMARENQTTQKGQKNSRERMKRIEEGIKELGSQILKEHPVENTQLQNEKLYLYYLQNGRDMYVDQELDINRLSDYDVDHIVPQSFLKDDSIDNKVLTRSDKARGKSDNVPSEEVVKKMKNYWRQLLNAKLITQRKFDNLTKAERGGLSELDKAGFIKRQLVETRQITKHVAQILDSRMNTKYDENDKLIREVKVITLKSKLVSDFRKDFQFYKVREINNYHHAHDAYLNAVVGTALIKKYPKLESEFVYGDYKVYDVRKMIAKSEQEIGKATAKYFFYSNIMNFFKTEITLANGEIRKRPLIETNGETGEIVWDKGRDFATVRKVLSMPQVNIVKKTEVQTGGFSKESILPKRNSDKLIARKKDWDPKKYGGFDSPTVAYSVLVVAKVEKGKSKKLKSVKELLGITIMERSSFEKNPIDFLEAKGYKEVKKDLIIKLPKYSLFELENGRKRMLASAGELQKGNELALPSKYVNFLYLASHYEKLKGSPEDNEQKQLFVEQHKHYLDEIIEQISEFSKRVILADANLDKVLSAYNKHRDKPIREQAENIIHLFTLTNLGAPAAFKYFDTTIDRKRYTSTKEVLDATLIHQSITGLYETRIDLSQLGGDGGGGSGGSGGSGGTLNIEDEYRLHETSKGPDVPLGSTWLSDFPQAWAETGGMGLAFRQAPLIISLKATSTPVSIKQYPMSQEARLGIKPHIQRLLDQGILVPCQSPWNTPLLPVKKPGTNDYRPVQDLREVNKRVEDIHPTVPNPYNLLSGLPPSHQWYTVLDLKDAFFCLRLHPTSQSLFAFEWKDPEMGISGQLTWTRLPQGFKNSPTLFNEALHRDLADFRIQHPDLILLQYVDDLLLAATSELDCQQGTRALLQTLGDLGYRASAKKAQICQKQVKYLGYLLKEGQRWLTEARKETVMGQPTPKTPRQLREFLGKAGLCRLFIPGFAEMAAPLYPLTKPGTLFKWGPDQQKAYQEIKQALLTAPALGLPDLTKPFELFVDEKQGYAKGVLTQKLGPWRRPVAYLSKKLDPVAAGWPPCLRMVAAIAVLTKDVGKLTMGQPLVILAPHAVEALVKQPPDRWLSNARMTHYQALLLDTDRVQFGPIVALNPATLLPLPEEGLQHDCLDILAEAHGTRPDLTDQPLPDADHTWYTDGSSFLQEGQRRAGAAVTTETEVIWAKALPAGTSAQRAELIALTQALKMAAGKKLNVYTDSRYAFATAHIHGEIYRRRGWLTSEGKEIKNKDEILALLKALFLPKRLSIIHCPGHQKGNHAEARGNRMADQAAREVATRETPETSTLLAGKRTADGSEFEKRTADGSEFESPKKKAKVE

SEQ ID NO: 6040 - protein, 2094 aa, synthetic construct
MPAAKRVKLDGGDKKYSIGLDIGTNSVGWAVITDEYKVPSKKFKVLGNTDRHSIKKNLIGALLFDSGETAEATRLKRTARRRYTRRKNRICYLQEIFSNEMAKVDDSFFHRLEESFLVEEDKKHERHPIFGNIVDEVAYHEKYPTIYHLRKKLVDSTDKADLRLIYLALAHMIKFRGHFLIEGDLNPDNSDVDKLFIQLVQTYNQLFEENPINASGVDAKAILSARLSKSRRLENLIAQLPGEKKNGLFGNLIALSLGLTPNFKSNFDLAEDAKLQLSKDTYDDDLDNLLAQIGDQYADLFLAAKNLSDAILLSDILRVNTEITKAPLSASMIKRYDEHHQDLTLLKALVRQQLPEKYKEIFFDQSKNGYAGYIDGGASQEEFYKFIKPILEKMDGTEELLVKLNREDLLRKQRTFDNGSIPHQIHLGELHAILRRQEDFYPFLKDNREKIEKILTFRIPYYVGPLARGNSRFAWMTRKSEETITPWNFEEVVDKGASAQSFIERMTNFDKNLPNEKVLPKHSLLYEYFTVYNELTKVKYVTEGMRKPAFLSGEQKKAIVDLLFKTNRKVTVKQLKEDYFKKIECFDSVEISGVEDRFNASLGTYHDLLKIIKDKDFLDNEENEDILEDIVLTLTLFEDREMIEERLKTYAHLFDDKVMKQLKRRRYTGWGRLSRKLINGIRDKQSGKTILDFLKSDGFANRNFMQLIHDDSLTFKEDIQKAQVSGQGDSLHEHIANLAGSPAIKKGILQTVKVVDELVKVMGRHKPENIVIEMARENQTTQKGQKNSRERMKRIEEGIKELGSQILKEHPVENTQLQNEKLYLYYLQNGRDMYVDQELDINRLSDYDVDHIVPQSFLKDDSIDNKVLTRSDKARGKSDNVPSEEVVKKMKNYWRQLLNAKLITQRKFDNLTKAERGGLSELDKAGFIKRQLVETRQITKHVAQILDSRMNTKYDENDKLIREVKVITLKSKLVSDFRKDFQFYKVREINNYHHAHDAYLNAVVGTALIKKYPKLESEFVYGDYKVYDVRKMIAKSEQEIGKATAKYFFYSNIMNFFKTEITLANGEIRKRPLIETNGETGEIVWDKGRDFATVRKVLSMPQVNIVKKTEVQTGGFSKESILPKRNSDKLIARKKDWDPKKYGGFDSPTVAYSVLVVAKVEKGKSKKLKSVKELLGITIMERSSFEKNPIDFLEAKGYKEVKKDLIIKLPKYSLFELENGRKRMLASAGELQKGNELALPSKYVNFLYLASHYEKLKGSPEDNEQKQLFVEQHKHYLDEIIEQISEFSKRVILADANLDKVLSAYNKHRDKPIREQAENIIHLFTLTNLGAPAAFKYFDTTIDRKRYTSTKEVLDATLIHQSITGLYETRIDLSQLGGDGGGGSGGSGGSGGTLNIEDEYRLHETSKGPDVPLGSTWLSDFPQAWAETGGMGLAVRQAPLIIPLKATSTPVSIKQYPMSQEARLGIKPHIQRLLDQGILVPCQSPWNTPLLPVKKPGTNDYRPVQDLREVNKRVEDIHPTVPNPYNLLSGLPPSHQWYTVLDLKDAFFCLRLHPTSQSLFAFEWRDPEMGISGQLTWTRLPQGFKNSPTLFDEALHRDLADFRIQHPDLILLQYVDDLLLAATSELDCQQGTRALLQTLGDLGYRASAKKAQICQKQVKYLGYLLKEGQRWLTEARKETVMGQPTPKTPRQLREFLGTAGFCRLWIPGFAEMAAPLYPLTKTGTLFEWGPDQQKAYQEIKQALLTAPALGLPDLTKPFELFVDEKQGYAKGVLTQKLGPWRRPVAYLSKKLDPVAAGWPPCLRMVAAIAVLTKDAGKLTMGQPLVILAPHAVEALVKQPPDRWLSNARMTHYQALLLDTDRVQFGPIVALNPATLLPLPEEGLQHDCLDILAEAHGTRPDLTDQPLPDADHTWYTDGSSFLQEGQRKAGAAVTTETEVVWAKALPAGTSAQRAELIALTQALKMAEGKKLNVYTDSRYAFATAHIHGEIYRRRGLLTSEGKEIKNKDEILALLKALFLPKRLSIIHCPGHQKGNRAEARGNRMADQAAREVATRETPETSTLLAGKRTADGSEFEKRTADGSEFESPKKKAKVE

SEQ ID NO: 6041 - protein, 2094 aa, synthetic construct
MPAAKRVKLDGGDKKYSIGLDIGTNSVGWAVITDEYKVPSKKFKVLGNTDRHSIKKNLIGALLFDSGETAEATRLKRTARRRYTRRKNRICYLQEIFSNEMAKVDDSFFHRLEESFLVEEDKKHERHPIFGNIVDEVAYHEKYPTIYHLRKKLVDSTDKADLRLIYLALAHMIKFRGHFLIEGDLNPDNSDVDKLFIQLVQTYNQLFEENPINASGVDAKAILSARLSKSRRLENLIAQLPGEKKNGLFGNLIALSLGLTPNFKSNFDLAEDAKLQLSKDTYDDDLDNLLAQIGDQYADLFLAAKNLSDAILLSDILRVNTEITKAPLSASMIKRYDEHHQDLTLLKALVRQQLPEKYKEIFFDQSKNGYAGYIDGGASQEEFYKFIKPILEKMDGTEELLVKLNREDLLRKQRTFDNGSIPHQIHLGELHAILRRQEDFYPFLKDNREKIEKILTFRIPYYVGPLARGNSRFAWMTRKSEETITPWNFEEVVDKGASAQSFIERMTNFDKNLPNEKVLPKHSLLYEYFTVYNELTKVKYVTEGMRKPAFLSGEQKKAIVDLLFKTNRKVTVKQLKEDYFKKIECFDSVEISGVEDRFNASLGTYHDLLKIIKDKDFLDNEENEDILEDIVLTLTLFEDREMIEERLKTYAHLFDDKVMKQLKRRRYTGWGRLSRKLINGIRDKQSGKTILDFLKSDGFANRNFMQLIHDDSLTFKEDIQKAQVSGQGDSLHEHIANLAGSPAIKKGILQTVKVVDELVKVMGRHKPENIVIEMARENQTTQKGQKNSRERMKRIEEGIKELGSQILKEHPVENTQLQNEKLYLYYLQNGRDMYVDQELDINRLSDYDVDHIVPQSFLKDDSIDNKVLTRSDKARGKSDNVPSEEVVKKMKNYWRQLLNAKLITQRKFDNLTKAERGGLSELDKAGFIKRQLVETRQITKHVAQILDSRMNTKYDENDKLIREVKVITLKSKLVSDFRKDFQFYKVREINNYHHAHDAYLNAVVGTALIKKYPKLESEFVYGDYKVYDVRKMIAKSEQEIGKATAKYFFYSNIMNFFKTEITLANGEIRKRPLIETNGETGEIVWDKGRDFATVRKVLSMPQVNIVKKTEVQTGGFSKESILPKRNSDKLIARKKDWDPKKYGGFDSPTVAYSVLVVAKVEKGKSKKLKSVKELLGITIMERSSFEKNPIDFLEAKGYKEVKKDLIIKLPKYSLFELENGRKRMLASAGELQKGNELALPSKYVNFLYLASHYEKLKGSPEDNEQKQLFVEQHKHYLDEIIEQISEFSKRVILADANLDKVLSAYNKHRDKPIREQAENIIHLFTLTNLGAPAAFKYFDTTIDRKRYTSTKEVLDATLIHQSITGLYETRIDLSQLGGDGGGGSGGSGGSGGTLNIEDEHRLHETSKEPDVSLGSTWLSDFPQAWAETGGMGLAVRQAPLIIPLKATSTPVSIKQYPMSQEARLGIKPHIQRLLDQGILVPCQSPWNTPLLPVKKPGTNDYRPVQDLREVNKRVEDIHPTVPNPYNLLSGLPPSHQWYTVLDLKDAFFCLRLHPTSQPLFAFEWRDPEMGISGQLTWTRLPQGFKNSPTLFNEALHRDLADFRIQHPDLILLQYVDDLLLAATSELDCQQGTRALLQTLGNLGYRASAKKAQICQKQVKYLGYLLKEGQRWLTEARKETVMGQPTPKTPRQLREFLGTAGFCRLWIPGFAEMAAPLYPLTKPGTLFNWGPDQQKAYQEIKQALLTAPALGLPDLTKPFELFVDEKQGYAKGVLTQKLGPWRRPVAYLSKKLDPVAAGWPPCLRMVAAIAVLTKDAGKLTMGQPLVILAPHAVEALVKQPPDRWLSNARMTHYQALLLDTDRVQFGPVVALNPATLLPLPEEGLQHNCLDILAEAHGTRPDLTDQPLPDADHTWYTDGSSLLQEGQRKAGAAVTTETEVIWAKALPAGTSAQRAELIALTQALKMAEGKKLNVYTDSRYAFATAHIHGEIYRRRGWLTSEGKEIKNKDEILALLKALFLPKRLSIIHCPGHQKGHSAEARGNRMADQAARKAAITETPDTSTLLAGKRTADGSEFEKRTADGSEFESPKKKAKVE

SEQ ID NO: 6042 - protein, 2094 aa, synthetic construct
MPAAKRVKLDGGDKKYSIGLDIGTNSVGWAVITDEYKVPSKKFKVLGNTDRHSIKKNLIGALLFDSGETAEATRLKRTARRRYTRRKNRICYLQEIFSNEMAKVDDSFFHRLEESFLVEEDKKHERHPIFGNIVDEVAYHEKYPTIYHLRKKLVDSTDKADLRLIYLALAHMIKFRGHFLIEGDLNPDNSDVDKLFIQLVQTYNQLFEENPINASGVDAKAILSARLSKSRRLENLIAQLPGEKKNGLFGNLIALSLGLTPNFKSNFDLAEDAKLQLSKDTYDDDLDNLLAQIGDQYADLFLAAKNLSDAILLSDILRVNTEITKAPLSASMIKRYDEHHQDLTLLKALVRQQLPEKYKEIFFDQSKNGYAGYIDGGASQEEFYKFIKPILEKMDGTEELLVKLNREDLLRKQRTFDNGSIPHQIHLGELHAILRRQEDFYPFLKDNREKIEKILTFRIPYYVGPLARGNSRFAWMTRKSEETITPWNFEEVVDKGASAQSFIERMTNFDKNLPNEKVLPKHSLLYEYFTVYNELTKVKYVTEGMRKPAFLSGEQKKAIVDLLFKTNRKVTVKQLKEDYFKKIECFDSVEISGVEDRFNASLGTYHDLLKIIKDKDFLDNEENEDILEDIVLTLTLFEDREMIEERLKTYAHLFDDKVMKQLKRRRYTGWGRLSRKLINGIRDKQSGKTILDFLKSDGFANRNFMQLIHDDSLTFKEDIQKAQVSGQGDSLHEHIANLAGSPAIKKGILQTVKVVDELVKVMGRHKPENIVIEMARENQTTQKGQKNSRERMKRIEEGIKELGSQILKEHPVENTQLQNEKLYLYYLQNGRDMYVDQELDINRLSDYDVDHIVPQSFLKDDSIDNKVLTRSDKARGKSDNVPSEEVVKKMKNYWRQLLNAKLITQRKFDNLTKAERGGLSELDKAGFIKRQLVETRQITKHVAQILDSRMNTKYDENDKLIREVKVITLKSKLVSDFRKDFQFYKVREINNYHHAHDAYLNAVVGTALIKKYPKLESEFVYGDYKVYDVRKMIAKSEQEIGKATAKYFFYSNIMNFFKTEITLANGEIRKRPLIETNGETGEIVWDKGRDFATVRKVLSMPQVNIVKKTEVQTGGFSKESILPKRNSDKLIARKKDWDPKKYGGFDSPTVAYSVLVVAKVEKGKSKKLKSVKELLGITIMERSSFEKNPIDFLEAKGYKEVKKDLIIKLPKYSLFELENGRKRMLASAGELQKGNELALPSKYVNFLYLASHYEKLKGSPEDNEQKQLFVEQHKHYLDEIIEQISEFSKRVILADANLDKVLSAYNKHRDKPIREQAENIIHLFTLTNLGAPAAFKYFDTTIDRKRYTSTKEVLDATLIHQSITGLYETRIDLSQLGGDGGGGSGGSGGSGGTLNIEDEHRLHETSKEPDVSLGSTWLSDFPQAWAETGGMGLAVRQAPLIIPLKATSTPVSIKQYPMSQEARLGIKPHIQRLLDQGILVPCQSPWNTPLLPVKKPGTNDYRPVQDLREVNKRVEDIHPTVPNPYNLLSGLPPSHQWYTVLDLKDAFFCLRLHPTSQPLFAFEWRDPEMGISGQLTWTRLPQGFKNSPTLFDEALHRDLADFRIQHPDLILLQYVDDLLLAATSELDCQQGTRALLQTLGNLGYRASAKKAQICQKQVKYLGYLLKEGQRWLTEARKETVMGQPTPKTPRQLREFLGTAGFCRLWIPGFAEMAAPLYPLTKTGTLFNWGPDQQKAYQEIKQALLTAPALGLPDLTKPFELFVDEKQGYAKGVLTQKLGPWRRPVAYLSKKLDPVAAGWPPCLRMVAAIAVLTKDAGKLTMGQPLVILAPHAVEALVKQPPDRWLSNARMTHYQALLLDTDRVQFGPVVALNPATLLPLPEEGLQHNCLDILAEAHGTRPDLTDQPLPDADHTWYTDGSSLLQEGQRKAGAAVTTETEVIWAKALPAGTSAQRAELIALTQALKMAEGKKLNVYTDSRYAFATAHIHGEIYRRRGLLTSEGKEIKNKDEILALLKALFLPKRLSIIHCPGHQKGHSAEARGNRMADQAARKAAITETPDTSTLLAGKRTADGSEFEKRTADGSEFESPKKKAKVE

SEQ ID NO: 6043 - protein, 2094 aa, synthetic construct; identical to SEQ ID NO: 6041

SEQ ID NO: 6044 - protein, 2092 aa, synthetic construct
MPAAKRVKLDGGDKKYSIGLDIGTNSVGWAVITDEYKVPSKKFKVLGNTDRHSIKKNLIGALLFDSGETAEATRLKRTARRRYTRRKNRICYLQEIFSNEMAKVDDSFFHRLEESFLVEEDKKHERHPIFGNIVDEVAYHEKYPTIYHLRKKLVDSTDKADLRLIYLALAHMIKFRGHFLIEGDLNPDNSDVDKLFIQLVQTYNQLFEENPINASGVDAKAILSARLSKSRRLENLIAQLPGEKKNGLFGNLIALSLGLTPNFKSNFDLAEDAKLQLSKDTYDDDLDNLLAQIGDQYADLFLAAKNLSDAILLSDILRVNTEITKAPLSASMIKRYDEHHQDLTLLKALVRQQLPEKYKEIFFDQSKNGYAGYIDGGASQEEFYKFIKPILEKMDGTEELLVKLNREDLLRKQRTFDNGSIPHQIHLGELHAILRRQEDFYPFLKDNREKIEKILTFRIPYYVGPLARGNSRFAWMTRKSEETITPWNFEEVVDKGASAQSFIERMTNFDKNLPNEKVLPKHSLLYEYFTVYNELTKVKYVTEGMRKPAFLSGEQKKAIVDLLFKTNRKVTVKQLKEDYFKKIECFDSVEISGVEDRFNASLGTYHDLLKIIKDKDFLDNEENEDILEDIVLTLTLFEDREMIEERLKTYAHLFDDKVMKQLKRRRYTGWGRLSRKLINGIRDKQSGKTILDFLKSDGFANRNFMQLIHDDSLTFKEDIQKAQVSGQGDSLHEHIANLAGSPAIKKGILQTVKVVDELVKVMGRHKPENIVIEMARENQTTQKGQKNSRERMKRIEEGIKELGSQILKEHPVENTQLQNEKLYLYYLQNGRDMYVDQELDINRLSDYDVDHIVPQSFLKDDSIDNKVLTRSDKARGKSDNVPSEEVVKKMKNYWRQLLNAKLITQRKFDNLTKAERGGLSELDKAGFIKRQLVETRQITKHVAQILDSRMNTKYDENDKLIREVKVITLKSKLVSDFRKDFQFYKVREINNYHHAHDAYLNAVVGTALIKKYPKLESEFVYGDYKVYDVRKMIAKSEQEIGKATAKYFFYSNIMNFFKTEITLANGEIRKRPLIETNGETGEIVWDKGRDFATVRKVLSMPQVNIVKKTEVQTGGFSKESILPKRNSDKLIARKKDWDPKKYGGFDSPTVAYSVLVVAKVEKGKSKKLKSVKELLGITIMERSSFEKNPIDFLEAKGYKEVKKDLIIKLPKYSLFELENGRKRMLASAGELQKGNELALPSKYVNFLYLASHYEKLKGSPEDNEQKQLFVEQHKHYLDEIIEQISEFSKRVILADANLDKVLSAYNKHRDKPIREQAENIIHLFTLTNLGAPAAFKYFDTTIDRKRYTSTKEVLDATLIHQSITGLYETRIDLSQLGGDGGGGSGGSGGSGGVLNLEEEYRLHEKPVPSSIDPSWLQLFPTVWAERAGMGLANQVPPVVVELRSGASPVAVRQYPMSKEAREGIRPHIQRFLDLGVLVPCQSPWNTPLLPVKKPGTNDYRPVQDLREINKRVQDIHPTVPNPYNLLSSLPPSHTWYSVLDLKDAFFCLKLHPNSQPLFAFEWRDPEKGNTGQLTWTRLPQGFKNSPTLFDEALHRDLAPFRALNPQVVLLQYVDDLLVAAPTYRDCKEGTQKLLQELSKLGYRVSAKKAQLCQKEVTYLGYLLKEGKRWLTPARKATVMKIPPPTTPRQVREFLGTAGFCRLWIPGFASLAAPLYPLTKESIPFIWTEEHQKAFDRIKEALLSAPALALPDLTKPFTLYVDERAGVARGVLTQTLGPWRRPVAYLSKKLDPVASGWPTCLKAVAAVALLLKDADKLTLGQNVTVIASHSLESIVRQPPDRWMTNARMTHYQSLLLNERVSFAPPAVLNPATLLPVESEATPVHRCSEILAEETGTRRDLKDQPLPGVPAWYTDGSSFIAEGKRRAGAAIVDGKRTVWASSLPEGTSAQKAELVALTQALRLAEGKDINIYTDSRYAFATAHIHGAIYKQRGLLTSAGKDIKNKEEILALLEAIHLPKRVAIIHCPGHQKGNDPVATGNRRADEAAKQAALSTRVLAETTKPAGKRTADGSEFEKRTADGSEFESPKKKAKVE

SEQ ID NO: 6045 - protein, 2099 aa, synthetic construct
MPAAKRVKLDGGDKKYSIGLDIGTNSVGWAVITDEYKVPSKKFKVLGNTDRHSIKKNLIGALLFDSGETAEATRLKRTARRRYTRRKNRICYLQEIFSNEMAKVDDSFFHRLEESFLVEEDKKHERHPIFGNIVDEVAYHEKYPTIYHLRKKLVDSTDKADLRLIYLALAHMIKFRGHFLIEGDLNPDNSDVDKLFIQLVQTYNQLFEENPINASGVDAKAILSARLSKSRRLENLIAQLPGEKKNGLFGNLIALSLGLTPNFKSNFDLAEDAKLQLSKDTYDDDLDNLLAQIGDQYADLFLAAKNLSDAILLSDILRVNTEITKAPLSASMIKRYDEHHQDLTLLKALVRQQLPEKYKEIFFDQSKNGYAGYIDGGASQEEFYKFIKPILEKMDGTEELLVKLNREDLLRKQRTFDNGSIPHQIHLGELHAILRRQEDFYPFLKDNREKIEKILTFRIPYYVGPLARGNSRFAWMTRKSEETITPWNFEEVVDKGASAQSFIERMTNFDKNLPNEKVLPKHSLLYEYFTVYNELTKVKYVTEGMRKPAFLSGEQKKAIVDLLFKTNRKVTVKQLKEDYFKKIECFDSVEISGVEDRFNASLGTYHDLLKIIKDKDFLDNEENEDILEDIVLTLTLFEDREMIEERLKTYAHLFDDKVMKQLKRRRYTGWGRLSRKLINGIRDKQSGKTILDFLKSDGFANRNFMQLIHDDSLTFKEDIQKAQVSGQGDSLHEHIANLAGSPAIKKGILQTVKVVDELVKVMGRHKPENIVIEMARENQTTQKGQKNSRERMKRIEEGIKELGSQILKEHPVENTQLQNEKLYLYYLQNGRDMYVDQELDINRLSDYDVDHIVPQSFLKDDSIDNKVLTRSDKARGKSDNVPSEEVVKKMKNYWRQLLNAKLITQRKFDNLTKAERGGLSELDKAGFIKRQLVETRQITKHVAQILDSRMNTKYDENDKLIREVKVITLKSKLVSDFRKDFQFYKVREINNYHHAHDAYLNAVVGTALIKKYPKLESEFVYGDYKVYDVRKMIAKSEQEIGKATAKYFFYSNIMNFFKTEITLANGEIRKRPLIETNGETGEIVWDKGRDFATVRKVLSMPQVNIVKKTEVQTGGFSKESILPKRNSDKLIARKKDWDPKKYGGFDSPTVAYSVLVVAKVEKGKSKKLKSVKELLGITIMERSSFEKNPIDFLEAKGYKEVKKDLIIKLPKYSLFELENGRKRMLASAGELQKGNELALPSKYVNFLYLASHYEKLKGSPEDNEQKQLFVEQHKHYLDEIIEQISEFSKRVILADANLDKVLSAYNKHRDKPIREQAENIIHLFTLTNLGAPAAFKYFDTTIDRKRYTSTKEVLDATLIHQSITGLYETRIDLSQLGGDGGGGSGGSGGSGGSGGTAPLEEEYRLFLEAPIQNVTLLEQWKREIPKVWAEINPPGLASTQAPIHVQLLSTALPVRVRQYPITLEAKRSLRETIRKFRAAGILRPVHSPWNTPLLPVRKSGTSEYRMVQDLREVNKRVETIHPTVPNPYTLLSLLPPDRIWYSVLDLKDAFFCIPLAPESQLIFAFEWADAEEGESGQLTWTRLPQGFKNSPTLFNEALNRDLQGFRLDHPSVSLLQYVDDLLIAADTQAACLSATRDLLMTLAELGYRVSGKKAQLCQEEVTYLGFKIHKGSRSLSNSRTQAILQIPVPKTKRQVREFLGTIGYCRLWIPGFAELAQPLYAATRPGNDPLVWGEKEEEAFQSLKLALTQPPALALPSLDKPFQLFVEETSGAAKGVLTQALGPWKRPVAYLSKRLDPVAAGWPRCLRAIAAAALLTREASKLTFGQDIEITSSHNLESLLRSPPDKWLTNARITQYQVLLLDPPRVRFKQTAALNPATLLPETDDTLPIHHCLDTLDSLTSTRPDLTDQPLAQAEATLFTDGSSYIRDGKRYAGAAVVTLDSVIWAEPLPIGTSAQKAELIALTKALEWSKDKSVNIYTDSRYAFATLHVHGMIYRERGWLTAGGKAIKNAPEILALLTAVWLPKRVAVMHCKGHQKDDAPTSTGNRRADEVAREVAIRPLSTQATISAGKRTADGSEFEKRTADGSEFESPKKKAKVE

SEQ ID NO: 6046 - protein, 2103 aa, synthetic construct
MPAAKRVKLDGGDKKYSIGLDIGTNSVGWAVITDEYKVPSKKFKVLGNTDRHSIKKNLIGALLFDSGETAEATRLKRTARRRYTRRKNRICYLQEIFSNEMAKVDDSFFHRLEESFLVEEDKKHERHPIFGNIVDEVAYHEKYPTIYHLRKKLVDSTDKADLRLIYLALAHMIKFRGHFLIEGDLNPDNSDVDKLFIQLVQTYNQLFEENPINASGVDAKAILSARLSKSRRLENLIAQLPGEKKNGLFGNLIALSLGLTPNFKSNFDLAEDAKLQLSKDTYDDDLDNLLAQIGDQYADLFLAAKNLSDAILLSDILRVNTEITKAPLSASMIKRYDEHHQDLTLLKALVRQQLPEKYKEIFFDQSKNGYAGYIDGGASQEEFYKFIKPILEKMDGTEELLVKLNREDLLRKQRTFDNGSIPHQIHLGELHAILRRQEDFYPFLKDNREKIEKILTFRIPYYVGPLARGNSRFAWMTRKSEETITPWNFEEVVDKGASAQSFIERMTNFDKNLPNEKVLPKHSLLYEYFTVYNELTKVKYVTEGMRKPAFLSGEQKKAIVDLLFKTNRKVTVKQLKEDYFKKIECFDSVEISGVEDRFNASLGTYHDLLKIIKDKDFLDNEENEDILEDIVLTLTLFEDREMIEERLKTYAHLFDDKVMKQLKRRRYTGWGRLSRKLINGIRDKQSGKTILDFLKSDGFANRNFMQLIHDDSLTFKEDIQKAQVSGQGDSLHEHIANLAGSPAIKKGILQTVKVVDELVKVMGRHKPENIVIEMARENQTTQKGQKNSRERMKRIEEGIKELGSQILKEHPVENTQLQNEKLYLYYLQNGRDMYVDQELDINRLSDYDVDHIVPQSFLKDDSIDNKVLTRSDKARGKSDNVPSEEVVKKMKNYWRQLLNAKLITQRKFDNLTKAERGGLSELDKAGFIKRQLVETRQITKHVAQILDSRMNTKYDENDKLIREVKVITLKSKLVSDFRKDFQFYKVREINNYHHAHDAYLNAVVGTALIKKYPKLESEFVYGDYKVYDVRKMIAKSEQEIGKATAKYFFYSNIMNFFKTEITLANGEIRKRPLIETNGETGEIVWDKGRDFATVRKVLSMPQVNIVKKTEVQTGGFSKESILPKRNSDKLIARKKDWDPKKYGGFDSPTVAYSVLVVAKVEKGKSKKLKSVKELLGITIMERSSFEKNPIDFLEAKGYKEVKKDLIIKLPKYSLFELENGRKRMLASAGELQKGNELALPSKYVNFLYLASHYEKLKGSPEDNEQKQLFVEQHKHYLDEIIEQISEFSKRVILADANLDKVLSAYNKHRDKPIREQAENIIHLFTLTNLGAPAAFKYFDTTIDRKRYTSTKEVLDATLIHQSITGLYETRIDLSQLGGDGGGGSGGSGGSGGSGGTVSLQDEHRLFDIPVTTSLPDVWLQDFPQAWAETGGLGRAKCQAPIIIDLKPTAVPVSIKQYPMSLEAHMGIRQHIIKFLELGVLRPCRSPWNTPLLPVKKPGTQDYRPVQDLREINKRTVDIHPTVPNPYNLLSTLKPDYSWYTVLDLKDAFFCLPLAPQSQELFAFEWKDPERGISGQLTWTRLPQGFKNSPTLFNEALHRDLTDFRTQHPEVTLLQYVDDLLLAAPTKKACTQGTRHLLQELGEKGYRASAKKAQICQTKVTYLGYILSEGKRWLTPGRIETVARIPPPRNPREVREFLGTAGFCRLWIPGFAELAAPLYALTKPSTPFTWQTEHQLAFEALKKALLSAPALGLPDTSKPFTLFLDERQGIAKGVLTQKLGPWKRPVAYLSKKLDPVAAGWPPCLRIMAATAMLVKDSAKLTLGQPLTVITPHTLEAIVRQPPDRWITNARLTHYQALLLDTDRVQFGPPVTLNPATLLPVPENQPSPHDCRQVLAETHGTREDLKDQELPDADHTWYTDGSSYLDSGTRRAGAAVVDGHNTIWAQSLPPGTSAQKAELIALTKALELSKGKKANIYTDSRYAFATAHTHGSIYERRGWLTSEGKEIKNKAEIIALLKALFLPQEVAIIHCPGHQKGQDPVAVGNRQADRVARQAAMAEVLTLATEPDNTSHITAGKRTADGSEFEKRTADGSEFESPKKKAKVE

SEQ ID NO: 6047 - protein, 2088 aa, synthetic construct
MPAAKRVKLDGGDKKYSIGLDIGTNSVGWAVITDEYKVPSKKFKVLGNTDRHSIKKNLIGALLFDSGETAEATRLKRTARRRYTRRKNRICYLQEIFSNEMAKVDDSFFHRLEESFLVEEDKKHERHPIFGNIVDEVAYHEKYPTIYHLRKKLVDSTDKADLRLIYLALAHMIKFRGHFLIEGDLNPDNSDVDKLFIQLVQTYNQLFEENPINASGVDAKAILSARLSKSRRLENLIAQLPGEKKNGLFGNLIALSLGLTPNFKSNFDLAEDAKLQLSKDTYDDDLDNLLAQIGDQYADLFLAAKNLSDAILLSDILRVNTEITKAPLSASMIKRYDEHHQDLTLLKALVRQQLPEKYKEIFFDQSKNGYAGYIDGGASQEEFYKFIKPILEKMDGTEELLVKLNREDLLRKQRTFDNGSIPHQIHLGELHAILRRQEDFYPFLKDNREKIEKILTFRIPYYVGPLARGNSRFAWMTRKSEETITPWNFEEVVDKGASAQSFIERMTNFDKNLPNEKVLPKHSLLYEYFTVYNELTKVKYVTEGMRKPAFLSGEQKKAIVDLLFKTNRKVTVKQLKEDYFKKIECFDSVEISGVEDRFNASLGTYHDLLKIIKDKDFLDNEENEDILEDIVLTLTLFEDREMIEERLKTYAHLFDDKVMKQLKRRRYTGWGRLSRKLINGIRDKQSGKTILDFLKSDGFANRNFMQLIHDDSLTFKEDIQKAQVSGQGDSLHEHIANLAGSPAIKKGILQTVKVVDELVKVMGRHKPENIVIEMARENQTTQKGQKNSRERMKRIEEGIKELGSQILKEHPVENTQLQNEKLYLYYLQNGRDMYVDQELDINRLSDYDVDHIVPQSFLKDDSIDNKVLTRSDKARGKSDNVPSEEVVKKMKNYWRQLLNAKLITQRKFDNLTKAERGGLSELDKAGFIKRQLVETRQITKHVAQILDSRMNTKYDENDKLIREVKVITLKSKLVSDFRKDFQFYKVREINNYHHAHDAYLNAVVGTALIKKYPKLESEFVYGDYKVYDVRKMIAKSEQEIGKATAKYFFYSNIMNFFKTEITLANGEIRKRPLIETNGETGEIVWDKGRDFATVRKVLSMPQVNIVKKTEVQTGGFSKESILPKRNSDKLIARKKDWDPKKYGGFDSPTVAYSVLVVAKVEKGKSKKLKSVKELLGITIMERSSFEKNPIDFLEAKGYKEVKKDLIIKLPKYSLFELENGRKRMLASAGELQKGNELALPSKYVNFLYLASHYEKLKGSPEDNEQKQLFVEQHKHYLDEIIEQISEFSKRVILADANLDKVLSAYNKHRDKPIREQAENIIHLFTLTNLGAPAAFKYFDTTIDRKRYTSTKEVLDATLIHQSITGLYETRIDLSQLGGDGGGGSGGSGGSGGSGGVPWLTQQPLQLTILVPLQEYQEKILSKTALPEDQKQQLKTLFVKYDNLWQHWENQVGHRKIRPHNIATGDYPPRPQKQYPINPKAKPSIQIVIDDLLKQGVLTPQNSTMNTPVYPVPKPDGRWRMVLDYREVNKTIPLTAAQNQHSAGILATIVRQKYKTTLDLANGFWAHPITPESYWLTAFTWQGKQYCWTRLPQGFLNSPALFTADVVDLLKEIPNVQVYVDDIYLSHDDPKEHVQQLEKVFQILLQAGYVVSLKKSEIGQKTVEFLGFNITKEGRGLTDTFKTKLLNITPPKDLKQLQSILGLLNFARNFIPNFAELVQPLYNLIASAKGKYIEWSEENTKQLNMVIEALNTASNLEERLPEQRLVIKVNTSPSAGYVRYYNETGKKPIMYLNYVFSKAELKFSMLEKLLTTMHKALIKAMDLAMGQEILVYSPIVSMTKIQKTPLPERKALPIRWITWMTYLEDPRIQFHYDKTLPELKHIPDVYTSSQSPVKHPSQYEGVFYTDGSAIKSPDPTKSNNAGMGIVHATYKPEYQVLNQWSIPLGNHTAQMAEIAAVEFACKKALKIPGPVLVITDSFYVAESANKELPYWKSNGFVNNKKKPLKHISKWKSIAECLSMKPDITIQHEKGISLQIPVFILKGNALADKLATQGSYVVNAGKRTADGSEFEKRTADGSEFESPKKKAKVE

SEQ ID NO: 6048 - protein, 2128 aa, synthetic construct
MPAAKRVKLDGGDKKYSIGLDIGTNSVGWAVITDEYKVPSKKFKVLGNTDRHSIKKNLIGALLFDSGETAEATRLKRTARRRYTRRKNRICYLQEIFSNEMAKVDDSFFHRLEESFLVEEDKKHERHPIFGNIVDEVAYHEKYPTIYHLRKKLVDSTDKADLRLIYLALAHMIKFRGHFLIEGDLNPDNSDVDKLFIQLVQTYNQLFEENPINASGVDAKAILSARLSKSRRLENLIAQLPGEKKNGLFGNLIALSLGLTPNFKSNFDLAEDAKLQLSKDTYDDDLDNLLAQIGDQYADLFLAAKNLSDAILLSDILRVNTEITKAPLSASMIKRYDEHHQDLTLLKALVRQQLPEKYKEIFFDQSKNGYAGYIDGGASQEEFYKFIKPILEKMDGTEELLVKLNREDLLRKQRTFDNGSIPHQIHLGELHAILRRQEDFYPFLKDNREKIEKILTFRIPYYVGPLARGNSRFAWMTRKSEETITPWNFEEVVDKGASAQSFIERMTNFDKNLPNEKVLPKHSLLYEYFTVYNELTKVKYVTEGMRKPAFLSGEQKKAIVDLLFKTNRKVTVKQLKEDYFKKIECFDSVEISGVEDRFNASLGTYHDLLKIIKDKDFLDNEENEDILEDIVLTLTLFEDREMIEERLKTYAHLFDDKVMKQLKRRRYTGWGRLSRKLINGIRDKQSGKTILDFLKSDGFANRNFMQLIHDDSLTFKEDIQKAQVSGQGDSLHEHIANLAGSPAIKKGILQTVKVVDELVKVMGRHKPENIVIEMARENQTTQKGQKNSRERMKRIEEGIKELGSQILKEHPVENTQLQNEKLYLYYLQNGRDMYVDQELDINRLSDYDVDHIVPQSFLKDDSIDNKVLTRSDKARGKSDNVPSEEVVKKMKNYWRQLLNAKLITQRKFDNLTKAERGGLSELDKAGFIKRQLVETRQITKHVAQILDSRMNTKYDENDKLIREVKVITLKSKLVSDFRKDFQFYKVREINNYHHAHDAYLNAVVGTALIKKYPKLESEFVYGDYKVYDVRKMIAKSEQEIGKATAKYFFYSNIMNFFKTEITLANGEIRKRPLIETNGETGEIVWDKGRDFATVRKVLSMPQVNIVKKTEVQTGGFSKESILPKRNSDKLIARKKDWDPKKYGGFDSPTVAYSVLVVAKVEKGKSKKLKSVKELLGITIMERSSFEKNPIDFLEAKGYKEVKKDLIIKLPKYSLFELENGRKRMLASAGELQKGNELALPSKYVNFLYLASHYEKLKGSPEDNEQKQLFVEQHKHYLDEIIEQISEFSKRVILADANLDKVLSAYNKHRDKPIREQAENIIHLFTLTNLGAPAAFKYFDTTIDRKRYTSTKEVLDATLIHQSITGLYETRIDLSQLGGDGGGGSGGSGGSGGSGGLLGRDLLTKLKAQIQFSTEGPQVTWEDRPAMCLVLNLEEEYRLHEKPVPPSIDPSWLQLFPMVWAEKAGMGLANQVPPVVVELKSDASPVAVRQYPMSKEAREGIRPHIQRFLDLGILVPCQSPWNTPLLPVKKPGTNDYRPVQDLREVNKRVQDIHPTVPNPYNLLSSLPPSHTWYSVLDLKDAFFCLKLHPNSQPLFAFEWRDPEKGNTGQLTWTRLPQGFKNSPTLFNEALHRDLASFRALNPQVVMLQYVDDLLVAAPTYRDCKEGTRRLLQELSKLGYRVSAKKAQLCREEVTYLGYLLKGGKRWLTPARKATVMKIPTPTTPRQVREFLGTAGFCRLWIPGFASLAAPLYPLTRPKVPFTWTEAHQEAFGRIKEALLSAPALALPDLTKPFALYVDEKEGVARGVLTQTLGPWRRPVAYLSKKLDPVASGWPTCLKAIAAVALLLKDADKLTLGQNVLVIAPHNLESIVRQPPDRWMTNARMTHYQSLLLNERVSFAPPAILNPATLLPVESDDTPIHICSEILAEETGTRPDLRDQPLPGVPAWYTDGSSFIMDGRRQAGAAIVDNKRTVWASNLPEGTSAQKAELIALTQALRLAEGKSINIYTDSRYAFATAHVHGAIYKQRGWLTSAGKDIKNKEEILALLEAIHLPKRVAIIHCPGHQRGTDPVATGNRKADEAAKQAAQSTRILTETTKNAGKRTADGSEFEKRTADGSEFESPKKKAKVE

SEQ ID NO: 6049 - protein, 2219 aa, synthetic construct
MPAAKRVKLDGGDKKYSIGLDIGTNSVGWAVITDEYKVPSKKFKVLGNTDRHSIKKNLIGALLFDSGETAEATRLKRTARRRYTRRKNRICYLQEIFSNEMAKVDDSFFHRLEESFLVEEDKKHERHPIFGNIVDEVAYHEKYPTIYHLRKKLVDSTDKADLRLIYLALAHMIKFRGHFLIEGDLNPDNSDVDKLFIQLVQTYNQLFEENPINASGVDAKAILSARLSKSRRLENLIAQLPGEKKNGLFGNLIALSLGLTPNFKSNFDLAEDAKLQLSKDTYDDDLDNLLAQIGDQYADLFLAAKNLSDAILLSDILRVNTEITKAPLSASMIKRYDEHHQDLTLLKALVRQQLPEKYKEIFFDQSKNGYAGYIDGGASQEEFYKFIKPILEKMDGTEELLVKLNREDLLRKQRTFDNGSIPHQIHLGELHAILRRQEDFYPFLKDNREKIEKILTFRIPYYVGPLARGNSRFAWMTRKSEETITPWNFEEVVDKGASAQSFIERMTNFDKNLPNEKVLPKHSLLYEYFTVYNELTKVKYVTEGMRKPAFLSGEQKKAIVDLLFKTNRKVTVKQLKEDYFKKIECFDSVEISGVEDRFNASLGTYHDLLKIIKDKDFLDNEENEDILEDIVLTLTLFEDREMIEERLKTYAHLFDDKVMKQLKRRRYTGWGRLSRKLINGIRDKQSGKTILDFLKSDGFANRNFMQLIHDDSLTFKEDIQKAQVSGQGDSLHEHIANLAGSPAIKKGILQTVKVVDELVKVMGRHKPENIVIEMARENQTTQKGQKNSRERMKRIEEGIKELGSQILKEHPVENTQLQNEKLYLYYLQNGRDMYVDQELDINRLSDYDVDHIVPQSFLKDDSIDNKVLTRSDKARGKSDNVPSEEVVKKMKNYWRQLLNAKLITQRKFDNLTKAERGGLSELDKAGFIKRQLVETRQITKHVAQILDSRMNTKYDENDKLIREVKVITLKSKLVSDFRKDFQFYKVREINNYHHAHDAYLNAVVGTALIKKYPKLESEFVYGDYKVYDVRKMIAKSEQEIGKATAKYFFYSNIMNFFKTEITLANGEIRKRPLIETNGETGEIVWDKGRDFATVRKVLSMPQVNIVKKTEVQTGGFSKESILPKRNSDKLIARKKDWDPKKYGGFDSPTVAYSVLVVAKVEKGKSKKLKSVKELLGITIMERSSFEKNPIDFLEAKGYKEVKKDLIIKLPKYSLFELENGRKRMLASAGELQKGNELALPSKYVNFLYLASHYEKLKGSPEDNEQKQLFVEQHKHYLDEIIEQISEFSKRVILADANLDKVLSAYNKHRDKPIREQAENIIHLFTLTNLGAPAAFKYFDTTIDRKRYTSTKEVLDATLIHQSITGLYETRIDLSQLGGDGGGGSGGSGGSGGSGGTLGDQGSRGSDPLPEPRVTLTVEGIPTEFLVNTGAEHSVLTKPMGKMGSKRTVVAGATGSKVYPWTTKRLLKIGQKQVTHSFLVIPECPAPLLGRDLLTKLKAQIQFSTEGPQVTWEDRPAMCLVLNLEEEYRLHEKPVPPSIDPSWLQLFPMVWAEKAGMGLANQVPPVVVELKSDASPVAVRQYPMSKEAREGIRPHIQRFLDLGILVPCQSPWNTPLLPVKKPGTNDYRPVQDLREVNKRVQDIHPTVPNPYNLLSSLPPSHTWYSVLDLKDAFFCLKLHPNSQPLFAFEWRDPEKGNTGQLTWTRLPQGFKNSPTLFNEALHRDLASFRALNPQVVMLQYVDDLLVAAPTYRDCKEGTRRLLQELSKLGYRVSAKKAQLCREEVTYLGYLLKGGKRWLTPARKATVMKIPTPTTPRQVREFLGKAGFCRLFIPGFASLAAPLYPLTRPKVPFTWTEAHQEAFGRIKEALLSAPALALPDLTKPFALYVDEKEGVARGVLTQTLGPWRRPVAYLSKKLDPVASGWPTCLKAIAAVALLLKDADKLTLGQNVLVIAPHNLESIVRQPPDRWMTNARMTHYQSLLLNERVSFAPPAILNPATLLPVESDDTPIHICSEILAEETGTRPDLRDQPLPGVPAWYTDGSSFIMDGRRQAGAAIVDNKRTVWASNLPEGTSAQKAELIALTQALRLAEGKSINIYTDSRYAFATAHVHGAIYKQRGWLTSAGKDIKNKEEILALLEAIHLPKRVAIIHCPGHQRGTDPVATGNRKADEAAKQAAQSTRILTETTKNAGKRTADGSEFEKRTADGSEFESPKKKAKVE

SEQ ID NO: 6050 - protein, 2097 aa, synthetic construct
MPAAKRVKLDGGDKKYSIGLDIGTNSVGWAVITDEYKVPSKKFKVLGNTDRHSIKKNLIGALLFDSGETAEATRLKRTARRRYTRRKNRICYLQEIFSNEMAKVDDSFFHRLEESFLVEEDKKHERHPIFGNIVDEVAYHEKYPTIYHLRKKLVDSTDKADLRLIYLALAHMIKFRGHFLIEGDLNPDNSDVDKLFIQLVQTYNQLFEENPINASGVDAKAILSARLSKSRRLENLIAQLPGEKKNGLFGNLIALSLGLTPNFKSNFDLAEDAKLQLSKDTYDDDLDNLLAQIGDQYADLFLAAKNLSDAILLSDILRVNTEITKAPLSASMIKRYDEHHQDLTLLKALVRQQLPEKYKEIFFDQSKNGYAGYIDGGASQEEFYKFIKPILEKMDGTEELLVKLNREDLLRKQRTFDNGSIPHQIHLGELHAILRRQEDFYPFLKDNREKIEKILTFRIPYYVGPLARGNSRFAWMTRKSEETITPWNFEEVVDKGASAQSFIERMTNFDKNLPNEKVLPKHSLLYEYFTVYNELTKVKYVTEGMRKPAFLSGEQKKAIVDLLFKTNRKVTVKQLKEDYFKKIECFDSVEISGVEDRFNASLGTYHDLLKIIKDKDFLDNEENEDILEDIVLTLTLFEDREMIEERLKTYAHLFDDKVMKQLKRRRYTGWGRLSRKLINGIRDKQSGKTILDFLKSDGFANRNFMQLIHDDSLTFKEDIQKAQVSGQGDSLHEHIANLAGSPAIKKGILQTVKVVDELVKVMGRHKPENIVIEMARENQTTQKGQKNSRERMKRIEEGIKELGSQILKEHPVENTQLQNEKLYLYYLQNGRDMYVDQELDINRLSDYDVDHIVPQSFLKDDSIDNKVLTRSDKARGKSDNVPSEEVVKKMKNYWRQLLNAKLITQRKFDNLTKAERGGLSELDKAGFIKRQLVETRQITKHVAQILDSRMNTKYDENDKLIREVKVITLKSKLVSDFRKDFQFYKVREINNYHHAHDAYLNAVVGTALIKKYPKLESEFVYGDYKVYDVRKMIAKSEQEIGKATAKYFFYSNIMNFFKTEITLANGEIRKRPLIETNGETGEIVWDKGRDFATVRKVLSMPQVNIVKKTEVQTGGFSKESILPKRNSDKLIARKKDWDPKKYGGFDSPTVAYSVLVVAKVEKGKSKKLKSVKELLGITIMERSSFEKNPIDFLEAKGYKEVKKDLIIKLPKYSLFELENGRKRMLASAGELQKGNELALPSKYVNFLYLASHYEKLKGSPEDNEQKQLFVEQHKHYLDEIIEQISEFSKRVILADANLDKVLSAYNKHRDKPIREQAENIIHLFTLTNLGAPAAFKYFDTTIDRKRYTSTKEVLDATLIHQSITGLYETRIDLSQLGGDGGGGSGGSGGSGGSGGTLNIEDEYRLHETSKGPDVPLGSTWLSDFPQAWAETGGMGLAVRQAPLIIPLKATSTPVSIKQYPMSQEARLGIKPHIQRLLDQGILVPCQSPWNTPLLPVKKPGTNDYRPVQDLREVNKRVEDIHPTVPNPYNLLSGLPPSHQWYTVLDLKDAFFCLRLHPTSQSLFAFEWRDPEMGISGQLTWTRLPQGFKNSPTLFNEALHRDLADFRIQHPDLILLQYVDDLLLAATSELDCQQGTRALLQTLGDLGYRASAKKAQICQKQVKYLGYLLKEGQRWLTEARKETVMGQPTPKTPRQLREFLGTAGFCRLWIPGFAEMAAPLYPLTKPGTLFEWGPDQQKAYQEIKQALLTAPALGLPDLTKPFELFVDEKQGYAKGVLTQKLGPWRRPVAYLSKKLDPVAAGWPPCLRMVAAIAVLTKDAGKLTMGQPLVILAPHAVEALVKQPPDRWLSNARMTHYQALLLDTDRVQFGPIVALNPATLLPLPEEGLQHDCLDILAEAHGTRPDLTDQPLPDADHTWYTDGSSFLQEGQRKAGAAVTTETEVVWAKALPAGTSAQRAELIALTQALKMAEGKKLNVYTDSRYAFATAHIHGEIYRRRGWLTSEGKEIKNKDEILALLKALFLPKRLSIIHCPGHQKGNRAEARGNRMADQAAREVATRETPETSTLLAGKRTADGSEFEKRTADGSEFESPKKKAKVE

SEQ ID NO: 6051 - protein, 2088 aa, synthetic construct
MPAAKRVKLDGGDKKYSIGLDIGTNSVGWAVITDEYKVPSKKFKVLGNTDRHSIKKNLIGALLFDSGETAEATRLKRTARRRYTRRKNRICYLQEIFSNEMAKVDDSFFHRLEESFLVEEDKKHERHPIFGNIVDEVAYHEKYPTIYHLRKKLVDSTDKADLRLIYLALAHMIKFRGHFLIEGDLNPDNSDVDKLFIQLVQTYNQLFEENPINASGVDAKAILSARLSKSRRLENLIAQLPGEKKNGLFGNLIALSLGLTPNFKSNFDLAEDAKLQLSKDTYDDDLDNLLAQIGDQYADLFLAAKNLSDAILLSDILRVNTEITKAPLSASMIKRYDEHHQDLTLLKALVRQQLPEKYKEIFFDQSKNGYAGYIDGGASQEEFYKFIKPILEKMDGTEELLVKLNREDLLRKQRTFDNGSIPHQIHLGELHAILRRQEDFYPFLKDNREKIEKILTFRIPYYVGPLARGNSRFAWMTRKSEETITPWNFEEVVDKGASAQSFIERMTNFDKNLPNEKVLPKHSLLYEYFTVYNELTKVKYVTEGMRKPAFLSGEQKKAIVDLLFKTNRKVTVKQLKEDYFKKIECFDSVEISGVEDRFNASLGTYHDLLKIIKDKDFLDNEENEDILEDIVLTLTLFEDREMIEERLKTYAHLFDDKVMKQLKRRRYTGWGRLSRKLINGIRDKQSGKTILDFLKSDGFANRNFMQLIHDDSLTFKEDIQKAQVSGQGDSLHEHIANLAGSPAIKKGILQTVKVVDELVKVMGRHKPENIVIEMARENQTTQKGQKNSRERMKRIEEGIKELGSQILKEHPVENTQLQNEKLYLYYLQNGRDMYVDQELDINRLSDYDVDHIVPQSFLKDDSIDNKVLTRSDKARGKSDNVPSEEVVKKMKNYWRQLLNAKLITQRKFDNLTKAERGGLSELDKAGFIKRQLVETRQITKHVAQILDSRMNTKYDENDKLIREVKVITLKSKLVSDFRKDFQFYKVREINNYHHAHDAYLNAVVGTALIKKYPKLESEFVYGDYKVYDVRKMIAKSEQEIGKATAKYFFYSNIMNFFKTEITLANGEIRKRPLIETNGETGEIVWDKGRDFATVRKVLSMPQVNIVKKTEVQTGGFSKESILPKRNSDKLIARKKDWDPKKYGGFDSPTVAYSVLVVAKVEKGKSKKLKSVKELLGITIMERSSFEKNPIDFLEAKGYKEVKKDLIIKLPKYSLFELENGRKRMLASAGELQKGNELALPSKYVNFLYLASHYEKLKGSPEDNEQKQLFVEQHKHYLDEIIEQISEFSKRVILADANLDKVLSAYNKHRDKPIREQAENIIHLFTLTNLGAPAAFKYFDTTIDRKRYTSTKEVLDATLIHQSITGLYETRIDLSQLGGDGGGGSGGSGGSGGSGGIPWLMKKPLQLTTLVPLQEYEERLLKQTMLTGSYKEKLQSLFLKYDALWQHWENQVGHRRIKPHHIATGTVNPRPQKQYPINPKAKASIQTVINDLLKQGVLIQQNSIMNTPVYPVPKPDGKWRMVLDYREVNKTIPLIAAQNQHSAGILSSIFRGKYKTTLDLSNGFWAHSITPESYWLTAFTWLGQQYCWTRLPQGFLNSPALFNADVVDLLKEVPNVQVYVDDIYISHDDPREHLEQLEKVFSLLLNAGYVVSLKKSEIAQHEVEFLGFNITKEGRGLTETFKQKLLNITPPRDLKQLQSILGKLNFARNFIPNFSELVKPLYNIIATAPGKYITWTTDNSQQLQNIISMLNSAENLEERNPEVRLIMKVNTSPSAGYIRFYNEFAKRPIMYLNYVYTKAEVKFTNTEKLLTTIHKGLIKALDLGMGQEILVYSPIVSMTKIQKTPLPERKALPIRWITWMSYLEDPRIQFHYDKTLPELQQVPTVTDDIIAKIKHPSEFSMVFYTDGSAIKHPNVNKSHNAGMGIAQVQFKPEFTVINTWSIPLGDHTAQLAEVAAVEFACKKALKIDGPVLIVTDSFYVAESVNKELPYWQSNGFFNNKKKPLKHVSKWKSIADCIQLKPDIIIIHEKGHQPTASTFHTEGNNLADKLATQGSYVVNAGKRTADGSEFEKRTADGSEFESPKKKAKVE

SEQ ID NO: 6052 - protein, 2177 aa, synthetic construct
MPAAKRVKLDGGDKKYSIGLDIGTNSVGWAVITDEYKVPSKKFKVLGNTDRHSIKKNLIGALLFDSGETAEATRLKRTARRRYTRRKNRICYLQEIFSNEMAKVDDSFFHRLEESFLVEEDKKHERHPIFGNIVDEVAYHEKYPTIYHLRKKLVDSTDKADLRLIYLALAHMIKFRGHFLIEGDLNPDNSDVDKLFIQLVQTYNQLFEENPINASGVDAKAILSARLSKSRRLENLIAQLPGEKKNGLFGNLIALSLGLTPNFKSNFDLAEDAKLQLSKDTYDDDLDNLLAQIGDQYADLFLAAKNLSDAILLSDILRVNTEITKAPLSASMIKRYDEHHQDLTLLKALVRQQLPEKYKEIFFDQSKNGYAGYIDGGASQEEFYKFIKPILEKMDGTEELLVKLNREDLLRKQRTFDNGSIPHQIHLGELHAILRRQEDFYPFLKDNREKIEKILTFRIPYYVGPLARGNSRFAWMTRKSEETITPWNFEEVVDKGASAQSFIERMTNFDKNLPNEKVLPKHSLLYEYFTVYNELTKVKYVTEGMRKPAFLSGEQKKAIVDLLFKTNRKVTVKQLKEDYFKKIECFDSVEISGVEDRFNASLGTYHDLLKIIKDKDFLDNEENEDILEDIVLTLTLFEDREMIEERLKTYAHLFDDKVMKQLKRRRYTGWGRLSRKLINGIRDKQSGKTILDFLKSDGFANRNFMQLIHDDSLTFKEDIQKAQVSGQGDSLHEHIANLAGSPAIKKGILQTVKVVDELVKVMGRHKPENIVIEMARENQTTQKGQKNSRERMKRIEEGIKELGSQILKEHPVENTQLQNEKLYLYYLQNGRDMYVDQELDINRLSDYDVDHIVPQSFLKDDSIDNKVLTRSDKARGKSDNVPSEEVVKKMKNYWRQLLNAKLITQRKFDNLTKAERGGLSELDKAGFIKRQLVETRQITKHVAQILDSRMNTKYDENDKLIREVKVITLKSKLVSDFRKDFQFYKVREINNYHHAHDAYLNAVVGTALIKKYPKLESEFVYGDYKVYDVRKMIAKSEQEIGKATAKYFFYSNIMNFFKTEITLANGEIRKRPLIETNGETGEIVWDKGRDFATVRKVLSMPQVNIVKKTEVQTGGFSKESILPKRNSDKLIARKKDWDPKKYGGFDSPTVAYSVLVVAKVEKGKSKKLKSVKELLGITIMERSSFEKNPIDFLEAKGYKEVKKDLIIKLPKYSLFELENGRKRMLASAGELQKGNELALPSKYVNFLYLASHYEKLKGSPEDNEQKQLFVEQHKHYLDEIIEQISEFSKRVILADANLDKVLSAYNKHRDKPIREQAENIIHLFTLTNLGAPAAFKYFDTTIDRKRYTSTKEVLDATLIHQSITGLYETRIDLSQLGGDGGGGSGGSGGSGGSGGMDPLQLLQPLEAEIKGTKLKAHWNSGATITCVPQAFLEEEVPIKNIWIKTIHGEKEQPVYYLTFKIQGRKVEAEVISSPYDYILVSPSDIPWLMKKPLQLTTLVPLQEYEERLLKQTMLTGSYKEKLQSLFLKYDALWQHWENQVGHRRIKPHHIATGTVNPRPQKQYPINPKAKASIQTVINDLLKQGVLIQQNSIMNTPVYPVPKPDGKWRMVLDYREVNKTIPLIAAQNQHSAGILSSIFRGKYKTTLDLSNGFWAHSITPESYWLTAFTWLGQQYCWTRLPQGFLNSPALFNADVVDLLKEVPNVQVYVDDIYISHDDPREHLEQLEKVFSLLLNAGYVVSLKKSEIAQHEVEFLGFNITKEGRGLTETFKQKLLNITPPRDLKQLQSILGKLNFARNFIPNFSELVKPLYNIIATAPGKYITWTTDNSQQLQNIISMLNSAENLEERNPEVRLIMKVNTSPSAGYIRFYNEFAKRPIMYLNYVYTKAEVKFTNTEKLLTTIHKGLIKALDLGMGQEILVYSPIVSMTKIQKTPLPERKALPIRWITWMSYLEDPRIQFHYDKTLPELQQVPTVTDDIIAKIKHPSEFSMVFYTDGSAIKHPNVNKSHNAGMGIAQVQFKPEFTVINTWSIPLGDHTAQLAEVAAVEFACKKALKIDGPVLIVTDSFYVAESVNKELPYWQSNGFFNNKKKPLKHVSKWKSIADCIQLKPDIIIIHEKGHQPTASTFHTEGNNLADKLATQGSYVVNAGKRTADGSEFEKRTADGSEFESPKKKAKVE

SEQ ID NO: 6053 - protein, 2095 aa, synthetic construct
MPAAKRVKLDGGDKKYSIGLDIGTNSVGWAVITDEYKVPSKKFKVLGNTDRHSIKKNLIGALLFDSGETAEATRLKRTARRRYTRRKNRICYLQEIFSNEMAKVDDSFFHRLEESFLVEEDKKHERHPIFGNIVDEVAYHEKYPTIYHLRKKLVDSTDKADLRLIYLALAHMIKFRGHFLIEGDLNPDNSDVDKLFIQLVQTYNQLFEENPINASGVDAKAILSARLSKSRRLENLIAQLPGEKKNGLFGNLIALSLGLTPNFKSNFDLAEDAKLQLSKDTYDDDLDNLLAQIGDQYADLFLAAKNLSDAILLSDILRVNTEITKAPLSASMIKRYDEHHQDLTLLKALVRQQLPEKYKEIFFDQSKNGYAGYIDGGASQEEFYKFIKPILEKMDGTEELLVKLNREDLLRKQRTFDNGSIPHQIHLGELHAILRRQEDFYPFLKDNREKIEKILTFRIPYYVGPLARGNSRFAWMTRKSEETITPWNFEEVVDKGASAQSFIERMTNFDKNLPNEKVLPKHSLLYEYFTVYNELTKVKYVTEGMRKPAFLSGEQKKAIVDLLFKTNRKVTVKQLKEDYFKKIECFDSVEISGVEDRFNASLGTYHDLLKIIKDKDFLDNEENEDILEDIVLTLTLFEDREMIEERLKTYAHLFDDKVMKQLKRRRYTGWGRLSRKLINGIRDKQSGKTILDFLKSDGFANRNFMQLIHDDSLTFKEDIQKAQVSGQGDSLHEHIANLAGSPAIKKGILQTVKVVDELVKVMGRHKPENIVIEMARENQTTQKGQKNSRERMKRIEEGIKELGSQILKEHPVENTQLQNEKLYLYYLQNGRDMYVDQELDINRLSDYDVDHIVPQSFLKDDSIDNKVLTRSDKARGKSDNVPSEEVVKKMKNYWRQLLNAKLITQRKFDNLTKAERGGLSELDKAGFIKRQLVETRQITKHVAQILDSRMNTKYDENDKLIREVKVITLKSKLVSDFRKDFQFYKVREINNYHHAHDAYLNAVVGTALIKKYPKLESEFVYGDYKVYDVRKMIAKSEQEIGKATAKYFFYSNIMNFFKTEITLANGEIRKRPLIETNGETGEIVWDKGRDFATVRKVLSMPQVNIVKKTEVQTGGFSKESILPKRNSDKLIARKKDWDPKKYGGFDSPTVAYSVLVVAKVEKGKSKKLKSVKELLGITIMERSSFEKNPIDFLEAKGYKEVKKDLIIKLPKYSLFELENGRKRMLASAGELQKGNELALPSKYVNFLYLASHYEKLKGSPEDNEQKQLFVEQHKHYLDEIIEQISEFSKRVILADANLDKVLSAYNKHRDKPIREQAENIIHLFTLTNLGAPAAFKYFDTTIDRKRYTSTKEVLDATLIHQSITGLYETRIDLSQLGGDGGGGSGGSGGSGGSGGVLNLEEEYRLHEKPVPSSIDPSWLQLFPTVWAERAGMGLANQVPPVVVELRSGASPVAVRQYPMSKEAREGIRPHIQRFLDLGVLVPCQSPWNTPLLPVKKPGTNDYRPVQDLREINKRVQDIHPTVPNPYNLLSSLPPSHTWYSVLDLKDAFFCLKLHPNSQPLFAFEWRDPEKGNTGQLTWTRLPQGFKNSPTLFDEALHRDLAPFRALNPQVVLLQYVDDLLVAAPTYRDCKEGTQKLLQELSKLGYRVSAKKAQLCQKEVTYLGYLLKEGKRWLTPARKATVMKIPPPTTPRQVREFLGTAGFCRLWIPGFASLAAPLYPLTKESIPFIWTEEHQKAFDRIKEALLSAPALALPDLTKPFTLYVDERAGVARGVLTQTLGPWRRPVAYLSKKLDPVASGWPTCLKAVAAVALLLKDADKLTLGQNVTVIASHSLESIVRQPPDRWMTNARMTHYQSLLLNERVSFAPPAVLNPATLLPVESEATPVHRCSEILAEETGTRRDLKDQPLPGVPAWYTDGSSFIAEGKRRAGAAIVDGKRTVWASSLPEGTSAQKAELVALTQALRLAEGKDINIYTDSRYAFATAHIHGAIYKQRGLLTSAGKDIKNKEEILALLEAIHLPKRVAIIHCPGHQKGNDPVATGNRRADEAAKQAALSTRVLAETTKPAGKRTADGSEFEKRTADGSEFESPKKKAKVE

SEQ ID NO: 6054 - protein, 2097 aa, synthetic construct
MPAAKRVKLDGGDKKYSIGLDIGTNSVGWAVITDEYKVPSKKFKVLGNTDRHSIKKNLIGALLFDSGETAEATRLKRTARRRYTRRKNRICYLQEIFSNEMAKVDDSFFHRLEESFLVEEDKKHERHPIFGNIVDEVAYHEKYPTIYHLRKKLVDSTDKADLRLIYLALAHMIKFRGHFLIEGDLNPDNSDVDKLFIQLVQTYNQLFEENPINASGVDAKAILSARLSKSRRLENLIAQLPGEKKNGLFGNLIALSLGLTPNFKSNFDLAEDAKLQLSKDTYDDDLDNLLAQIGDQYADLFLAAKNLSDAILLSDILRVNTEITKAPLSASMIKRYDEHHQDLTLLKALVRQQLPEKYKEIFFDQSKNGYAGYIDGGASQEEFYKFIKPILEKMDGTEELLVKLNREDLLRKQRTFDNGSIPHQIHLGELHAILRRQEDFYPFLKDNREKIEKILTFRIPYYVGPLARGNSRFAWMTRKSEETITPWNFEEVVDKGASAQSFIERMTNFDKNLPNEKVLPKHSLLYEYFTVYNELTKVKYVTEGMRKPAFLSGEQKKAIVDLLFKTNRKVTVKQLKEDYFKKIECFDSVEISGVEDRFNASLGTYHDLLKIIKDKDFLDNEENEDILEDIVLTLTLFEDREMIEERLKTYAHLFDDKVMKQLKRRRYTGWGRLSRKLINGIRDKQSGKTILDFLKSDGFANRNFMQLIHDDSLTFKEDIQKAQVSGQGDSLHEHIANLAGSPAIKKGILQTVKVVDELVKVMGRHKPENIVIEMARENQTTQKGQKNSRERMKRIEEGIKELGSQILKEHPVENTQLQNEKLYLYYLQNGRDMYVDQELDINRLSDYDVDHIVPQSFLKDDSIDNKVLTRSDKARGKSDNVPSEEVVKKMKNYWRQLLNAKLITQRKFDNLTKAERGGLSELDKAGFIKRQLVETRQITKHVAQILDSRMNTKYDENDKLIREVKVITLKSKLVSDFRKDFQFYKVREINNYHHAHDAYLNAVVGTALIKKYPKLESEFVYGDYKVYDVRKMIAKSEQEIGKATAKYFFYSNIMNFFKTEITLANGEIRKRPLIETNGETGEIVWDKGRDFATVRKVLSMPQVNIVKKTEVQTGGFSKESILPKRNSDKLIARKKDWDPKKYGGFDSPTVAYSVLVVAKVEKGKSKKLKSVKELLGITIMERSSFEKNPIDFLEAKGYKEVKKDLIIKLPKYSLFELENGRKRMLASAGELQKGNELALPSKYVNFLYLASHYEKLKGSPEDNEQKQLFVEQHKHYLDEIIEQISEFSKRVILADANLDKVLSAYNKHRDKPIREQAENIIHLFTLTNLGAPAAFKYFDTTIDRKRYTSTKEVLDATLIHQSITGLYETRIDLSQLGGDGGGGSGGSGGSGGSGGTLNIEDEYRLHETSKEPDVPLGSTWLSDFPQAWAETGGMGLAVRQAPLIIPLKATSTPVSIKQYPMSQEARLGIKPHIQRLLDQGILVPCQSPWNTPLLPVKKPGTNDYRPVQDLREVNKRVEDIHPTVPNPYNLLSGLPPSHQWYTVLDLKDAFFCLRLHPTSQPLFAFEWRDPEMGISGQLTWTRLPQGFKNSPTLFNEALHRDLADFRIQHPDLILLQYVDDLLLAATSEQDCQRGTRALLQTLGNLGYRASAKKAQICQKQVKYLGYLLKEGQRWLTEARKETVMGQPTPKTPRQLREFLGTAGFCRLWIPGFAEMAAPLYPLTKPGTLFNWGPDQQKAYQEIKQALLTAPALGLPDLTKPFELFVDEKQGYAKGVLTQKLGPWRRPVAYLSKKLDPVAAGWPPCLRMVAAIAVLTKDAGKLTMGQPLVILAPHAVEALVKQPPDRWLSNARMTHYQAMLLDTDRVQFGPVVALNPATLLPLPEKEAPHDCLEILAETHGTRPDLTDQPIPDADYTWYTDGSSFLQEGQRRAGAAVTTETEVIWARALPAGTSAQRAELIALTQALKMAEGKKLNVYTDSRYAFATAHVHGEIYRRRGWLTSEGREIKNKNEILALLKALFLPKRLSIIHCPGHQKGNSAEARGNRMADQAAREAAMKAVLETSTLLAGKRTADGSEFEKRTADGSEFESPKKKAKVE

SEQ ID NO: 6055 - protein, 2005 aa, synthetic construct
MPAAKRVKLDGGDKKYSIGLDIGTNSVGWAVITDEYKVPSKKFKVLGNTDRHSIKKNLIGALLFDSGETAEATRLKRTARRRYTRRKNRICYLQEIFSNEMAKVDDSFFHRLEESFLVEEDKKHERHPIFGNIVDEVAYHEKYPTIYHLRKKLVDSTDKADLRLIYLALAHMIKFRGHFLIEGDLNPDNSDVDKLFIQLVQTYNQLFEENPINASGVDAKAILSARLSKSRRLENLIAQLPGEKKNGLFGNLIALSLGLTPNFKSNFDLAEDAKLQLSKDTYDDDLDNLLAQIGDQYADLFLAAKNLSDAILLSDILRVNTEITKAPLSASMIKRYDEHHQDLTLLKALVRQQLPEKYKEIFFDQSKNGYAGYIDGGASQEEFYKFIKPILEKMDGTEELLVKLNREDLLRKQRTFDNGSIPHQIHLGELHAILRRQEDFYPFLKDNREKIEKILTFRIPYYVGPLARGNSRFAWMTRKSEETITPWNFEEVVDKGASAQSFIERMTNFDKNLPNEKVLPKHSLLYEYFTVYNELTKVKYVTEGMRKPAFLSGEQKKAIVDLLFKTNRKVTVKQLKEDYFKKIECFDSVEISGVEDRFNASLGTYHDLLKIIKDKDFLDNEENEDILEDIVLTLTLFEDREMIEERLKTYAHLFDDKVMKQLKRRRYTGWGRLSRKLINGIRDKQSGKTILDFLKSDGFANRNFMQLIHDDSLTFKEDIQKAQVSGQGDSLHEHIANLAGSPAIKKGILQTVKVVDELVKVMGRHKPENIVIEMARENQTTQKGQKNSRERMKRIEEGIKELGSQILKEHPVENTQLQNEKLYLYYLQNGRDMYVDQELDINRLSDYDVDHIVPQSFLKDDSIDNKVLTRSDKARGKSDNVPSEEVVKKMKNYWRQLLNAKLITQRKFDNLTKAERGGLSELDKAGFIKRQLVETRQITKHVAQILDSRMNTKYDENDKLIREVKVITLKSKLVSDFRKDFQFYKVREINNYHHAHDAYLNAVVGTALIKKYPKLESEFVYGDYKVYDVRKMIAKSEQEIGKATAKYFFYSNIMNFFKTEITLANGEIRKRPLIETNGETGEIVWDKGRDFATVRKVLSMPQVNIVKKTEVQTGGFSKESILPKRNSDKLIARKKDWDPKKYGGFDSPTVAYSVLVVAKVEKGKSKKLKSVKELLGITIMERSSFEKNPIDFLEAKGYKEVKKDLIIKLPKYSLFELENGRKRMLASAGELQKGNELALPSKYVNFLYLASHYEKLKGSPEDNEQKQLFVEQHKHYLDEIIEQISEFSKRVILADANLDKVLSAYNKHRDKPIREQAENIIHLFTLTNLGAPAAFKYFDTTIDRKRYTSTKEVLDATLIHQSITGLYETRIDLSQLGGDGGGGSGGSGGSGGSGGSGGGVLDTPPSHIGLEHLPPPPEVPQFPLNLERLQALQDLVHRSLEAGYISPWDGPGNNPVFPVRKPNGAWRFVHDLRATNALTKPIPALSPGPPDLTAPPTHPPHIICLDLKDAFFQIPVEDRFRFYLSFTLPSPGGLQPHRRFAWRVLPQGFINSPALFQRALQEPLRQVSAAFSQSLLVSYMDDILYASPTEEQRSQCYQALAARLRDLGFQVASEKTSQTPSPVPFLGQMVHEQIVTYQSLPTLQISSPISLHQLQAVLGDLQWVSRGTPTTRRPLQLLYSSLKRHHDPRAIIQLSPEQLQGIAELRQALSHNARSRYNEQEPLLAYVHLTRAGSTLVLFQKGAQFPLAYFQTPLTDNQASPWGLLLLLGCQYLQTQALSSYAKPILKYYHNLPKTSLDNWIQSSEDPRVQELLQLWPQISSQGIQPPGPWKTLITRAEVFLTPQFSPDPIPAALCLFSDGATGRGAYCLWKDHLLDFQAVPAPESAQKGELAGLLAGLAAAPPEPVNIWVDSKYLYSLLRTWVLGAWLQPDPVPSYALLYKSLLRHPAIVVGHVRSHSSASHPIASLNNYVDQLAGKRTADGSEFEKRTADGSEFESPKKKAKVE

SEQ ID NO: 6056 - protein, 2177 aa, synthetic construct
MPAAKRVKLDGGDKKYSIGLDIGTNSVGWAVITDEYKVPSKKFKVLGNTDRHSIKKNLIGALLFDSGETAEATRLKRTARRRYTRRKNRICYLQEIFSNEMAKVDDSFFHRLEESFLVEEDKKHERHPIFGNIVDEVAYHEKYPTIYHLRKKLVDSTDKADLRLIYLALAHMIKFRGHFLIEGDLNPDNSDVDKLFIQLVQTYNQLFEENPINASGVDAKAILSARLSKSRRLENLIAQLPGEKKNGLFGNLIALSLGLTPNFKSNFDLAEDAKLQLSKDTYDDDLDNLLAQIGDQYADLFLAAKNLSDAILLSDILRVNTEITKAPLSASMIKRYDEHHQDLTLLKALVRQQLPEKYKEIFFDQSKNGYAGYIDGGASQEEFYKFIKPILEKMDGTEELLVKLNREDLLRKQRTFDNGSIPHQIHLGELHAILRRQEDFYPFLKDNREKIEKILTFRIPYYVGPLARGNSRFAWMTRKSEETITPWNFEEVVDKGASAQSFIERMTNFDKNLPNEKVLPKHSLLYEYFTVYNELTKVKYVTEGMRKPAFLSGEQKKAIVDLLFKTNRKVTVKQLKEDYFKKIECFDSVEISGVEDRFNASLGTYHDLLKIIKDKDFLDNEENEDILEDIVLTLTLFEDREMIEERLKTYAHLFDDKVMKQLKRRRYTGWGRLSRKLINGIRDKQSGKTILDFLKSDGFANRNFMQLIHDDSLTFKEDIQKAQVSGQGDSLHEHIANLAGSPAIKKGILQTVKVVDELVKVMGRHKPENIVIEMARENQTTQKGQKNSRERMKRIEEGIKELGSQILKEHPVENTQLQNEKLYLYYLQNGRDMYVDQELDINRLSDYDVDHIVPQSFLKDDSIDNKVLTRSDKARGKSDNVPSEEVVKKMKNYWRQLLNAKLITQRKFDNLTKAERGGLSELDKAGFIKRQLVETRQITKHVAQILDSRMNTKYDENDKLIREVKVITLKSKLVSDFRKDFQFYKVREINNYHHAHDAYLNAVVGTALIKKYPKLESEFVYGDYKVYDVRKMIAKSEQEIGKATAKYFFYSNIMNFFKTEITLANGEIRKRPLIETNGETGEIVWDKGRDFATVRKVLSMPQVNIVKKTEVQTGGFSKESILPKRNSDKLIARKKDWDPKKYGGFDSPTVAYSVLVVAKVEKGKSKKLKSVKELLGITIMERSSFEKNPIDFLEAKGYKEVKKDLIIKLPKYSLFELENGRKRMLASAGELQKGNELALPSKYVNFLYLASHYEKLKGSPEDNEQKQLFVEQHKHYLDEIIEQISEFSKRVILADANLDKVLSAYNKHRDKPIREQAENIIHLFTLTNLGAPAAFKYFDTTIDRKRYTSTKEVLDATLIHQSITGLYETRIDLSQLGGDGGGGSGGSGGSGGSGGSGGMDLLKPLTVERKGVKIKGYWNSQADITCVPKDLLQGEEPVRQQNVTTIHGTQEGDVYYVNLKIDGRRINTEVIGTTLDYAIITPGDVPWILKKPLELTIKLDLEEQQGTLLNNSILSKKGKEELKQLFEKYSALWQSWENQVGHRRIRPHKIATGTVKPTPQKQYHINPKAKPDIQIVINDLLKQGVLIQKESTMNTPVYPVPKPNGRWRMVLDYRAVNKVTPLIAVQNQHSYGILGSLFKGRYKTTIDLSNGFWAHPIVPEDYWITAFTWQGKQYCWTVLPQGFLNSPGLFTGDVVDLLQGIPNVEVYVDDVYISHDSEKEHLEYLDILFNRLKEAGYIISLKKSNIANSIVDFLGFQITNEGRGLTDTFKEKLENITAPTTLKQLQSILGLLNFARNFIPDFTELIAPLYALIPKSTKNYVPWQIEHSTTLETLITKLNGAEYLQGRKGDKTLIMKVNASYTTGYIRYYNEGEKKPISYVSIVFSKTELKFTELEKLLTTVHKGLLKALDLSMGQNIHVYSPIVSMQNIQKTPQTAKKALASRWLSWLSYLEDPRIRFFYDPQMPALKDLPAVDTGKDNKKHPSNFQHIFYTDGSAITSPTKEGHLNAGMGIVYFINKDGNLQKQQEWSISLGNHTAQFAEIAAFEFALKKCLPLGGNILVVTDSNYVAKAYNEELDVWASNGFVNNRKKPLKHISKWKSVADLKRLRPDVVVTHEPGHQKLDSSPHAYGNNLADQLATQASFKVHAGKRTADGSEFEKRTADGSEFESPKKKAKVE

SEQ ID NO: 6057 - protein, 2177 aa, synthetic construct
MPAAKRVKLDGGDKKYSIGLDIGTNSVGWAVITDEYKVPSKKFKVLGNTDRHSIKKNLIGALLFDSGETAEATRLKRTARRRYTRRKNRICYLQEIFSNEMAKVDDSFFHRLEESFLVEEDKKHERHPIFGNIVDEVAYHEKYPTIYHLRKKLVDSTDKADLRLIYLALAHMIKFRGHFLIEGDLNPDNSDVDKLFIQLVQTYNQLFEENPINASGVDAKAILSARLSKSRRLENLIAQLPGEKKNGLFGNLIALSLGLTPNFKSNFDLAEDAKLQLSKDTYDDDLDNLLAQIGDQYADLFLAAKNLSDAILLSDILRVNTEITKAPLSASMIKRYDEHHQDLTLLKALVRQQLPEKYKEIFFDQSKNGYAGYIDGGASQEEFYKFIKPILEKMDGTEELLVKLNREDLLRKQRTFDNGSIPHQIHLGELHAILRRQEDFYPFLKDNREKIEKILTFRIPYYVGPLARGNSRFAWMTRKSEETITPWNFEEVVDKGASAQSFIERMTNFDKNLPNEKVLPKHSLLYEYFTVYNELTKVKYVTEGMRKPAFLSGEQKKAIVDLLFKTNRKVTVKQLKEDYFKKIECFDSVEISGVEDRFNASLGTYHDLLKIIKDKDFLDNEENEDILEDIVLTLTLFEDREMIEERLKTYAHLFDDKVMKQLKRRRYTGWGRLSRKLINGIRDKQSGKTILDFLKSDGFANRNFMQLIHDDSLTFKEDIQKAQVSGQGDSLHEHIANLAGSPAIKKGILQTVKVVDELVKVMGRHKPENIVIEMARENQTTQKGQKNSRERMKRIEEGIKELGSQILKEHPVENTQLQNEKLYLYYLQNGRDMYVDQELDINRLSDYDVDHIVPQSFLKDDSIDNKVLTRSDKARGKSDNVPSEEVVKKMKNYWRQLLNAKLITQRKFDNLTKAERGGLSELDKAGFIKRQLVETRQITKHVAQILDSRMNTKYDENDKLIREVKVITLKSKLVSDFRKDFQFYKVREINNYHHAHDAYLNAVVGTALIKKYPKLESEFVYGDYKVYDVRKMIAKSEQEIGKATAKYFFYSNIMNFFKTEITLANGEIRKRPLIETNGETGEIVWDKGRDFATVRKVLSMPQVNIVKKTEVQTGGFSKESILPKRNSDKLIARKKDWDPKKYGGFDSPTVAYSVLVVAKVEKGKSKKLKSVKELLGITIMERSSFEKNPIDFLEAKGYKEVKKDLIIKLPKYSLFELENGRKRMLASAGELQKGNELALPSKYVNFLYLASHYEKLKGSPEDNEQKQLFVEQHKHYLDEIIEQISEFSKRVILADANLDKVLSAYNKHRDKPIREQAENIIHLFTLTNLGAPAAFKYFDTTIDRKRYTSTKEVLDATLIHQSITGLYETRIDLSQLGGDGGGGSGGSGGSGGSGGSGGMDLLKPLTVERKGVKIKGYWNSQADITCVPKDLLQGEEPVRQQNVTTIHGTQEGDVYYVNLKIDGRRINTEVIGTTLDYAIITPGDVPWILKKPLELTIKLDLEEQQGTLLNNSILSKKGKEELKQLFEKYSALWQSWENQVGHRRIRPHKIATGTVKPTPQKQYHINPKAKPDIQIVINDLLKQGVLIQKESTMNTPVYPVPKPNGRWRMVLDYRAVNKVTPLIAVQNQHSYGILGSLFKGRYKTTIDLSNGFWAHPIVPEDYWITAFTWQGKQYCWTVLPQGFLNSPGLFNGDVVDLLQGIPNVEVYVDDVYISHDSEKEHLEYLDILFNRLKEAGYIISLKKSNIANSIVDFLGFQITNEGRGLTDTFKEKLENITAPTTLKQLQSILGLLNFARNFIPDFTELIAPLYALIPKSPKNYVPWQIEHSTTLETLITKLNGAEYLQGRKGDKTLIMKVNASYTTGYIRYYNEGEKKPISYVSIVFSKTELKFTELEKLLTTVHKGLLKALDLSMGQNIHVYSPIVSMQNIQKTPQTAKKALASRWLSWLSYLEDPRIRFFYDPQMPALKDLPAVDTGKDNKKHPSNFQHIFYTDGSAITSPTKEGHLNAGMGIVYFINKDGNLQKQQEWSISLGNHTAQFAEIAAFEFALKKCLPLGGNILVVTDSNYVAKAYNEELDVWASNGFVNNRKKPLKHISKWKSVADLKRLRPDVVVTHEPGHQKLDSSPHAYGNNLADQLATQASFKVHAGKRTADGSEFEKRTADGSEFESPKKKAKVE

SEQ ID NO: 6058 - protein, 2099 aa, synthetic construct
MPAAKRVKLDGGDKKYSIGLDIGTNSVGWAVITDEYKVPSKKFKVLGNTDRHSIKKNLIGALLFDSGETAEATRLKRTARRRYTRRKNRICYLQEIFSNEMAKVDDSFFHRLEESFLVEEDKKHERHPIFGNIVDEVAYHEKYPTIYHLRKKLVDSTDKADLRLIYLALAHMIKFRGHFLIEGDLNPDNSDVDKLFIQLVQTYNQLFEENPINASGVDAKAILSARLSKSRRLENLIAQLPGEKKNGLFGNLIALSLGLTPNFKSNFDLAEDAKLQLSKDTYDDDLDNLLAQIGDQYADLFLAAKNLSDAILLSDILRVNTEITKAPLSASMIKRYDEHHQDLTLLKALVRQQLPEKYKEIFFDQSKNGYAGYIDGGASQEEFYKFIKPILEKMDGTEELLVKLNREDLLRKQRTFDNGSIPHQIHLGELHAILRRQEDFYPFLKDNREKIEKILTFRIPYYVGPLARGNSRFAWMTRKSEETITPWNFEEVVDKGASAQSFIERMTNFDKNLPNEKVLPKHSLLYEYFTVYNELTKVKYVTEGMRKPAFLSGEQKKAIVDLLFKTNRKVTVKQLKEDYFKKIECFDSVEISGVEDRFNASLGTYHDLLKIIKDKDFLDNEENEDILEDIVLTLTLFEDREMIEERLKTYAHLFDDKVMKQLKRRRYTGWGRLSRKLINGIRDKQSGKTILDFLKSDGFANRNFMQLIHDDSLTFKEDIQKAQVSGQGDSLHEHIANLAGSPAIKKGILQTVKVVDELVKVMGRHKPENIVIEMARENQTTQKGQKNSRERMKRIEEGIKELGSQILKEHPVENTQLQNEKLYLYYLQNGRDMYVDQELDINRLSDYDVDHIVPQSFLKDDSIDNKVLTRSDKARGKSDNVPSEEVVKKMKNYWRQLLNAKLITQRKFDNLTKAERGGLSELDKAGFIKRQLVETRQITKHVAQILDSRMNTKYDENDKLIREVKVITLKSKLVSDFRKDFQFYKVREINNYHHAHDAYLNAVVGTALIKKYPKLESEFVYGDYKVYDVRKMIAKSEQEIGKATAKYFFYSNIMNFFKTEITLANGEIRKRPLIETNGETGEIVWDKGRDFATVRKVLSMPQVNIVKKTEVQTGGFSKESILPKRNSDKLIARKKDWDPKKYGGFDSPTVAYSVLVVAKVEKGKSKKLKSVKELLGITIMERSSFEKNPIDFLEAKGYKEVKKDLIIKLPKYSLFELENGRKRMLASAGELQKGNELALPSKYVNFLYLASHYEKLKGSPEDNEQKQLFVEQHKHYLDEIIEQISEFSKRVILADANLDKVLSAYNKHRDKPIREQAENIIHLFTLTNLGAPAAFKYFDTTIDRKRYTSTKEVLDATLIHQSITGLYETRIDLSQLGGDGGGGSGGSGGSGGSGGSGGTLQLEEEYRLFEPESTQKQEMDIWLKNFPQAWAETGGMGTAHCQAPVLIQLKATATPISIRQYPMPHEAYQGIKPHIRRMLDQGILKPCQSPWNTPLLPVKKPGTEDYRPVQDLREVNKRVEDIHPTVPNPYNLLSTLPPSHPWYTVLDLKDAFFCLRLHSESQLLFAFEWRDPEIGLSGQLTWTRLPQGFKNSPTLFNEALHSDLADFRVRYPALVLLQYVDDLLLAAATRTECLEGTKALLETLGNKGYRASAKKAQICLQEVTYLGYSLKDGQRWLTKARKEAILSIPVPKNSRQVREFLGTAGYCRLWIPGFAELAAPLYPLTRPGTLFQWGTEQQLAFEDIKKALLSSPALGLPDITKPFELFIDENSGFAKGVLVQKLGPWKRPVAYLSKKLDTVASGWPPCLRMVAAIAILVKDAGKLTLGQPLTILTSHPVEALVRQPPNKWLSNARMTHYQAMLLDAERVHFGPTVSLNPATLLPLPSGGNHHDCLQILAETHGTRPDLTDQPLPDADLTWYTDGSSFIRNGEREAGAAVTTESEVIWAAPLPPGTSAQRAELIALTQALKMAEGKKLTVYTDSRYAFATTHVHGEIYRRRGWLTSEGKEIKNKNEILALLEALFLPKRLSIIHCPGHQKGDSPQAKGNRLADDTAKKAATETHSSLTVLPAGKRTADGSEFEKRTADGSEFESPKKKAKVE

SEQ ID NO: 6059 - protein, 2099 aa, synthetic construct
MPAAKRVKLDGGDKKYSIGLDIGTNSVGWAVITDEYKVPSKKFKVLGNTDRHSIKKNLIGALLFDSGETAEATRLKRTARRRYTRRKNRICYLQEIFSNEMAKVDDSFFHRLEESFLVEEDKKHERHPIFGNIVDEVAYHEKYPTIYHLRKKLVDSTDKADLRLIYLALAHMIKFRGHFLIEGDLNPDNSDVDKLFIQLVQTYNQLFEENPINASGVDAKAILSARLSKSRRLENLIAQLPGEKKNGLFGNLIALSLGLTPNFKSNFDLAEDAKLQLSKDTYDDDLDNLLAQIGDQYADLFLAAKNLSDAILLSDILRVNTEITKAPLSASMIKRYDEHHQDLTLLKALVRQQLPEKYKEIFFDQSKNGYAGYIDGGASQEEFYKFIKPILEKMDGTEELLVKLNREDLLRKQRTFDNGSIPHQIHLGELHAILRRQEDFYPFLKDNREKIEKILTFRIPYYVGPLARGNSRFAWMTRKSEETITPWNFEEVVDKGASAQSFIERMTNFDKNLPNEKVLPKHSLLYEYFTVYNELTKVKYVTEGMRKPAFLSGEQKKAIVDLLFKTNRKVTVKQLKEDYFKKIECFDSVEISGVEDRFNASLGTYHDLLKIIKDKDFLDNEENEDILEDIVLTLTLFEDREMIEERLKTYAHLFDDKVMKQLKRRRYTGWGRLSRKLINGIRDKQSGKTILDFLKSDGFANRNFMQLIHDDSLTFKEDIQKAQVSGQGDSLHEHIANLAGSPAIKKGILQTVKVVDELVKVMGRHKPENIVIEMARENQTTQKGQKNSRERMKRIEEGIKELGSQILKEHPVENTQLQNEKLYLYYLQNGRDMYVDQELDINRLSDYDVDHIVPQSFLKDDSIDNKVLTRSDKARGKSDNVPSEEVVKKMKNYWRQLLNAKLITQRKFDNLTKAERGGLSELDKAGFIKRQLVETRQITKHVAQILDSRMNTKYDENDKLIREVKVITLKSKLVSDFRKDFQFYKVREINNYHHAHDAYLNAVVGTALIKKYPKLESEFVYGDYKVYDVRKMIAKSEQEIGKATAKYFFYSNIMNFFKTEITLANGEIRKRPLIETNGETGEIVWDKGRDFATVRKVLSMPQVNIVKKTEVQTGGFSKESILPKRNSDKLIARKKDWDPKKYGGFDSPTVAYSVLVVAKVEKGKSKKLKSVKELLGITIMERSSFEKNPIDFLEAKGYKEVKKDLIIKLPKYSLFELENGRKRMLASAGELQKGNELALPSKYVNFLYLASHYEKLKGSPEDNEQKQLFVEQHKHYLDEIIEQISEFSKRVILADANLDKVLSAYNKHRDKPIREQAENIIHLFTLTNLGAPAAFKYFDTTIDRKRYTSTKEVLDATLIHQSITGLYETRIDLSQLGGDGGGGSGGSGGSGGSGGSGGTLQLEEEYRLFEPESTQKQEMDIWLKNFPQAWAETGGMGTAHCQAPVLIQLKATATPISIRQYPMPHEAYQGIKPHIRRMLDQGILKPCQSPWNTPLLPVKKPGTEDYRPVQDLREVNKRVEDIHPTVPNPYNLLSTLPPSHPWYTVLDLKDAFFCLRLHSESQLLFAFEWRDPEIGLSGQLTWTRLPQGFKNSPTLFNEALHSDLADFRVRYPALVLLQYVDDLLLAAATRTECLEGTKALLETLGNKGYRASAKKAQICLQEVTYLGYSLKDGQRWLTKARKEAILSIPVPKNSRQVREFLGKAGYCRLFIPGFAELAAPLYPLTRPGTLFQWGTEQQLAFEDIKKALLSSPALGLPDITKPFELFIDENSGFAKGVLVQKLGPWKRPVAYLSKKLDTVASGWPPCLRMVAAIAILVKDAGKLTLGQPLTILTSHPVEALVRQPPNKWLSNARMTHYQAMLLDAERVHFGPTVSLNPATLLPLPSGGNHHDCLQILAETHGTRPDLTDQPLPDADLTWYTDGSSFIRNGEREAGAAVTTESEVIWAAPLPPGTSAQRAELIALTQALKMAEGKKLTVYTDSRYAFATTHVHGEIYRRRGWLTSEGKEIKNKNEILALLEALFLPKRLSIIHCPGHQKGDSPQAKGNRLADDTAKKAATETHSSLTVLPAGKRTADGSEFEKRTADGSEFESPKKKAKVE

SEQ ID NO: 6060 - protein, 2180 aa, synthetic construct
MPAAKRVKLDGGDKKYSIGLDIGTNSVGWAVITDEYKVPSKKFKVLGNTDRHSIKKNLIGALLFDSGETAEATRLKRTARRRYTRRKNRICYLQEIFSNEMAKVDDSFFHRLEESFLVEEDKKHERHPIFGNIVDEVAYHEKYPTIYHLRKKLVDSTDKADLRLIYLALAHMIKFRGHFLIEGDLNPDNSDVDKLFIQLVQTYNQLFEENPINASGVDAKAILSARLSKSRRLENLIAQLPGEKKNGLFGNLIALSLGLTPNFKSNFDLAEDAKLQLSKDTYDDDLDNLLAQIGDQYADLFLAAKNLSDAILLSDILRVNTEITKAPLSASMIKRYDEHHQDLTLLKALVRQQLPEKYKEIFFDQSKNGYAGYIDGGASQEEFYKFIKPILEKMDGTEELLVKLNREDLLRKQRTFDNGSIPHQIHLGELHAILRRQEDFYPFLKDNREKIEKILTFRIPYYVGPLARGNSRFAWMTRKSEETITPWNFEEVVDKGASAQSFIERMTNFDKNLPNEKVLPKHSLLYEYFTVYNELTKVKYVTEGMRKPAFLSGEQKKAIVDLLFKTNRKVTVKQLKEDYFKKIECFDSVEISGVEDRFNASLGTYHDLLKIIKDKDFLDNEENEDILEDIVLTLTLFEDREMIEERLKTYAHLFDDKVMKQLKRRRYTGWGRLSRKLINGIRDKQSGKTILDFLKSDGFANRNFMQLIHDDSLTFKEDIQKAQVSGQGDSLHEHIANLAGSPAIKKGILQTVKVVDELVKVMGRHKPENIVIEMARENQTTQKGQKNSRERMKRIEEGIKELGSQILKEHPVENTQLQNEKLYLYYLQNGRDMYVDQELDINRLSDYDVDHIVPQSFLKDDSIDNKVLTRSDKARGKSDNVPSEEVVKKMKNYWRQLLNAKLITQRKFDNLTKAERGGLSELDKAGFIKRQLVETRQITKHVAQILDSRMNTKYDENDKLIREVKVITLKSKLVSDFRKDFQFYKVREINNYHHAHDAYLNAVVGTALIKKYPKLESEFVYGDYKVYDVRKMIAKSEQEIGKATAKYFFYSNIMNFFKTEITLANGEIRKRPLIETNGETGEIVWDKGRDFATVRKVLSMPQVNIVKKTEVQTGGFSKESILPKRNSDKLIARKKDWDPKKYGGFDSPTVAYSVLVVAKVEKGKSKKLKSVKELLGITIMERSSFEKNPIDFLEAKGYKEVKKDLIIKLPKYSLFELENGRKRMLASAGELQKGNELALPSKYVNFLYLASHYEKLKGSPEDNEQKQLFVEQHKHYLDEIIEQISEFSKRVILADANLDKVLSAYNKHRDKPIREQAENIIHLFTLTNLGAPAAFKYFDTTIDRKRYTSTKEVLDATLIHQSITGLYETRIDLSQLGGDGGGGSGGSGGSGGSGGSGGMNPLQLLQPLPAEIKGTKLLAHWNSGATITCIPESFLEDEQPIKKTLIKTIHGEKQQNVYYVTFKVKGRKVEAEVIASPYEYILLSPTDVPWLTQQPLQLTILVPLQEYQEKILSKTALPEDQKQQLKTLFVKYDNLWQHWENQVGHRKIRPHNIATGDYPPRPQKQYPINPKAKPSIQIVIDDLLKQGVLTPQNSTMNTPVYPVPKPDGRWRMVLDYREVNKTIPLTAAQNQHSAGILATIVRQKYKTTLDLANGFWAHPITPESYWLTAFTWQGKQYCWTRLPQGFLNSPALFNADVVDLLKEIPNVQVYVDDIYLSHDDPKEHVQQLEKVFQILLQAGYVVSLKKSEIGQKTVEFLGFNITKEGRGLTDTFKTKLLNITPPKDLKQLQSILGKLNFARNFIPNFAELVQPLYNLIAPAKGKYIEWSEENTKQLNMVIEALNTASNLEERLPEQRLVIKVNTSPSAGYVRYYNETGKKPIMYLNYVFSKAELKFSMLEKLLTTMHKALIKAMDLAMGQEILVYSPIVSMTKIQKTPLPERKALPIRWITWMTYLEDPRIQFHYDKTLPELKHIPDVYTSSQSPVKHPSQYEGVFYTDGSAIKSPDPTKSNNAGMGIVHATYKPEYQVLNQWSIPLGNHTAQMAEIAAVEFACKKALKIPGPVLVITDSFYVAESANKELPYWKSNGFVNNKKKPLKHISKWKSIAECLSMKPDITIQHEKGISLQIPVFILKGNALADKLATQGSYVVNAGKRTADGSEFEKRTADGSEFESPKKKAKVE

SEQ ID NO: 6061 - protein, 2098 aa, synthetic construct
MPAAKRVKLDGGDKKYSIGLDIGTNSVGWAVITDEYKVPSKKFKVLGNTDRHSIKKNLIGALLFDSGETAEATRLKRTARRRYTRRKNRICYLQEIFSNEMAKVDDSFFHRLEESFLVEEDKKHERHPIFGNIVDEVAYHEKYPTIYHLRKKLVDSTDKADLRLIYLALAHMIKFRGHFLIEGDLNPDNSDVDKLFIQLVQTYNQLFEENPINASGVDAKAILSARLSKSRRLENLIAQLPGEKKNGLFGNLIALSLGLTPNFKSNFDLAEDAKLQLSKDTYDDDLDNLLAQIGDQYADLFLAAKNLSDAILLSDILRVNTEITKAPLSASMIKRYDEHHQDLTLLKALVRQQLPEKYKEIFFDQSKNGYAGYIDGGASQEEFYKFIKPILEKMDGTEELLVKLNREDLLRKQRTFDNGSIPHQIHLGELHAILRRQEDFYPFLKDNREKIEKILTFRIPYYVGPLARGNSRFAWMTRKSEETITPWNFEEVVDKGASAQSFIERMTNFDKNLPNEKVLPKHSLLYEYFTVYNELTKVKYVTEGMRKPAFLSGEQKKAIVDLLFKTNRKVTVKQLKEDYFKKIECFDSVEISGVEDRFNASLGTYHDLLKIIKDKDFLDNEENEDILEDIVLTLTLFEDREMIEERLKTYAHLFDDKVMKQLKRRRYTGWGRLSRKLINGIRDKQSGKTILDFLKSDGFANRNFMQLIHDDSLTFKEDIQKAQVSGQGDSLHEHIANLAGSPAIKKGILQTVKVVDELVKVMGRHKPENIVIEMARENQTTQKGQKNSRERMKRIEEGIKELGSQILKEHPVENTQLQNEKLYLYYLQNGRDMYVDQELDINRLSDYDVDHIVPQSFLKDDSIDNKVLTRSDKARGKSDNVPSEEVVKKMKNYWRQLLNAKLITQRKFDNLTKAERGGLSELDKAGFIKRQLVETRQITKHVAQILDSRMNTKYDENDKLIREVKVITLKSKLVSDFRKDFQFYKVREINNYHHAHDAYLNAVVGTALIKKYPKLESEFVYGDYKVYDVRKMIAKSEQEIGKATAKYFFYSNIMNFFKTEITLANGEIRKRPLIETNGETGEIVWDKGRDFATVRKVLSMPQVNIVKKTEVQTGGFSKESILPKRNSDKLIARKKDWDPKKYGGFDSPTVAYSVLVVAKVEKGKSKKLKSVKELLGITIMERSSFEKNPIDFLEAKGYKEVKKDLIIKLPKYSLFELENGRKRMLASAGELQKGNELALPSKYVNFLYLASHYEKLKGSPEDNEQKQLFVEQHKHYLDEIIEQISEFSKRVILADANLDKVLSAYNKHRDKPIREQAENIIHLFTLTNLGAPAAFKYFDTTIDRKRYTSTKEVLDATLIHQSITGLYETRIDLSQLGGDGGGGSGGSGGSGGSGGSGGVLNLEEEYRLHEKPVPSSIDPSWLQLFPTVWAERAGMGLANQVPPVVVELRSGASPVAVRQYPMSKEAREGIRPHIQKFLDLGVLVPCRSPWNTPLLPVKKPGTNDYRPVQDLREINKRVQDIHPTVPNPYNLLSSLPPSYTWYSVLDLKDAFFCLRLHPNSQPLFAFEWKDPEKGNTGQLTWTRLPQGFKNSPTLFNEALHRDLAPFRALNPQVVLLQYVDDLLVAAPTYEDCKKGTQKLLQELSKLGYRVSAKKAQLCQREVTYLGYLLKEGKRWLTPARKATVMKIPVPTTPRQVREFLGKAGFCRLFIPGFASLAAPLYPLTKPSIPFIWTEEHQQAFDHIKKALLSAPALALPDLTKPFTLYIDERAGVARGVLTQTLGPWRRPVAYLSKKLDPVASGWPTCLKAVAAVALLLKDADKLTLGQNVTVIASHSLESIVRQPPDRWMTNARMTHYQSLLLNERVSFAPPAVLNPATLLPVESEATPVHRCSEILAEETGTRRDLEDQPLPGVPTWYTDGSSFITEGKRRAGAPIVDGKRTVWASSLPEGTSAQKAELVALTQALRLAEGKNINIYTDSRYAFATAHIHGAIYKQRGWLTSAGKDIKNKEEILALLEAIHLPRRVAIIHCPGHQRGSNPVATGNRRADEAAKQAALSTRVLAGTTKPAGKRTADGSEFEKRTADGSEFESPKKKAKVE

SEQ ID NO: 6062 - protein, 2010 aa, synthetic construct
MPAAKRVKLDGGDKKYSIGLDIGTNSVGWAVITDEYKVPSKKFKVLGNTDRHSIKKNLIGALLFDSGETAEATRLKRTARRRYTRRKNRICYLQEIFSNEMAKVDDSFFHRLEESFLVEEDKKHERHPIFGNIVDEVAYHEKYPTIYHLRKKLVDSTDKADLRLIYLALAHMIKFRGHFLIEGDLNPDNSDVDKLFIQLVQTYNQLFEENPINASGVDAKAILSARLSKSRRLENLIAQLPGEKKNGLFGNLIALSLGLTPNFKSNFDLAEDAKLQLSKDTYDDDLDNLLAQIGDQYADLFLAAKNLSDAILLSDILRVNTEITKAPLSASMIKRYDEHHQDLTLLKALVRQQLPEKYKEIFFDQSKNGYAGYIDGGASQEEFYKFIKPILEKMDGTEELLVKLNREDLLRKQRTFDNGSIPHQIHLGELHAILRRQEDFYPFLKDNREKIEKILTFRIPYYVGPLARGNSRFAWMTRKSEETITPWNFEEVVDKGASAQSFIERMTNFDKNLPNEKVLPKHSLLYEYFTVYNELTKVKYVTEGMRKPAFLSGEQKKAIVDLLFKTNRKVTVKQLKEDYFKKIECFDSVEISGVEDRFNASLGTYHDLLKIIKDKDFLDNEENEDILEDIVLTLTLFEDREMIEERLKTYAHLFDDKVMKQLKRRRYTGWGRLSRKLINGIRDKQSGKTILDFLKSDGFANRNFMQLIHDDSLTFKEDIQKAQVSGQGDSLHEHIANLAGSPAIKKGILQTVKVVDELVKVMGRHKPENIVIEMARENQTTQKGQKNSRERMKRIEEGIKELGSQILKEHPVENTQLQNEKLYLYYLQNGRDMYVDQELDINRLSDYDVDHIVPQSFLKDDSIDNKVLTRSDKARGKSDNVPSEEVVKKMKNYWRQLLNAKLITQRKFDNLTKAERGGLSELDKAGFIKRQLVETRQITKHVAQILDSRMNTKYDENDKLIREVKVITLKSKLVSDFRKDFQFYKVREINNYHHAHDAYLNAVVGTALIKKYPKLESEFVYGDYKVYDVRKMIAKSEQEIGKATAKYFFYSNIMNFFKTEITLANGEIRKRPLIETNGETGEIVWDKGRDFATVRKVLSMPQVNIVKKTEVQTGGFSKESILPKRNSDKLIARKKDWDPKKYGGFDSPTVAYSVLVVAKVEKGKSKKLKSVKELLGITIMERSSFEKNPIDFLEAKGYKEVKKDLIIKLPKYSLFELENGRKRMLASAGELQKGNELALPSKYVNFLYLASHYEKLKGSPEDNEQKQLFVEQHKHYLDEIIEQISEFSKRVILADANLDKVLSAYNKHRDKPIREQAENIIHLFTLTNLGAPAAFKYFDTTIDRKRYTSTKEVLDATLIHQSITGLYETRIDLSQLGGDGGGGSGGSGGSGGSGGSGGPLGTSDSPVTHADPIDWKSEEPVWVDQWPLTQEKLSAAQQLVQEQLRLGHIEPSTSAWNSPIFVIKKKSGKWRLLQDLRKVNETMMHMGALQPGLPTPSAIPDKSYIIVIDLKDCFYTIPLAPQDCKRFAFSLPSVNFKEPMQRYQWRVLPQGMTNSPTLCQKFVATAIAPVRQRFPQLYLVHYMDDILLAHTDEHLLYQAFSILKQHLSLNGLVIADEKIQTHFPYNYLGFSLYPRVYNTQLVKLQTDHLKTLNDFQKLLGDINWIRPYLKLPTYTLQPLFDILKGDSDPASPRTLSLEGRTALQSIEEAIRQQQITYCDYQRSWGLYILPTPRAPTGVLYQDKPLRWIYLSATPTKHLLPYYELVAKIIAKGRHEAIQYFGMEPPFICVPYALEQQDWLFQFSDNWSIAFANYPGQITHHYPSDKLLQFASSHAFIFPKIVRRQPIPEATLIFTDGSSNGTAALIINHQTYYAQTSFSSAQVVELFAVHQALLTVPTSFNLFTDSSYVVGALQMIETVPIIGTTSPEVLNLFTLIQQVLHCRQHPCFFGHIRAHSTLPGALVQGNHTADVLTKQVFFQSAGKRTADGSEFEKRTADGSEFESPKKKAKVE

SEQ ID NO: 6063 - protein, 2131 aa, synthetic construct
MPAAKRVKLDGGDKKYSIGLDIGTNSVGWAVITDEYKVPSKKFKVLGNTDRHSIKKNLIGALLFDSGETAEATRLKRTARRRYTRRKNRICYLQEIFSNEMAKVDDSFFHRLEESFLVEEDKKHERHPIFGNIVDEVAYHEKYPTIYHLRKKLVDSTDKADLRLIYLALAHMIKFRGHFLIEGDLNPDNSDVDKLFIQLVQTYNQLFEENPINASGVDAKAILSARLSKSRRLENLIAQLPGEKKNGLFGNLIALSLGLTPNFKSNFDLAEDAKLQLSKDTYDDDLDNLLAQIGDQYADLFLAAKNLSDAILLSDILRVNTEITKAPLSASMIKRYDEHHQDLTLLKALVRQQLPEKYKEIFFDQSKNGYAGYIDGGASQEEFYKFIKPILEKMDGTEELLVKLNREDLLRKQRTFDNGSIPHQIHLGELHAILRRQEDFYPFLKDNREKIEKILTFRIPYYVGPLARGNSRFAWMTRKSEETITPWNFEEVVDKGASAQSFIERMTNFDKNLPNEKVLPKHSLLYEYFTVYNELTKVKYVTEGMRKPAFLSGEQKKAIVDLLFKTNRKVTVKQLKEDYFKKIECFDSVEISGVEDRFNASLGTYHDLLKIIKDKDFLDNEENEDILEDIVLTLTLFEDREMIEERLKTYAHLFDDKVMKQLKRRRYTGWGRLSRKLINGIRDKQSGKTILDFLKSDGFANRNFMQLIHDDSLTFKEDIQKAQVSGQGDSLHEHIANLAGSPAIKKGILQTVKVVDELVKVMGRHKPENIVIEMARENQTTQKGQKNSRERMKRIEEGIKELGSQILKEHPVENTQLQNEKLYLYYLQNGRDMYVDQELDINRLSDYDVDHIVPQSFLKDDSIDNKVLTRSDKARGKSDNVPSEEVVKKMKNYWRQLLNAKLITQRKFDNLTKAERGGLSELDKAGFIKRQLVETRQITKHVAQILDSRMNTKYDENDKLIREVKVITLKSKLVSDFRKDFQFYKVREINNYHHAHDAYLNAVVGTALIKKYPKLESEFVYGDYKVYDVRKMIAKSEQEIGKATAKYFFYSNIMNFFKTEITLANGEIRKRPLIETNGETGEIVWDKGRDFATVRKVLSMPQVNIVKKTEVQTGGFSKESILPKRNSDKLIARKKDWDPKKYGGFDSPTVAYSVLVVAKVEKGKSKKLKSVKELLGITIMERSSFEKNPIDFLEAKGYKEVKKDLIIKLPKYSLFELENGRKRMLASAGELQKGNELALPSKYVNFLYLASHYEKLKGSPEDNEQKQLFVEQHKHYLDEIIEQISEFSKRVILADANLDKVLSAYNKHRDKPIREQAENIIHLFTLTNLGAPAAFKYFDTTIDRKRYTSTKEVLDATLIHQSITGLYETRIDLSQLGGDGGGGSGGSGGSGGSGGSGGLLGRDLLTKLKAQIQFSTEGPQVTWEDRPAMCLVLNLEEEYRLHEKPVPPSIDPSWLQLFPMVWAEKAGMGLANQVPPVVVELKSDASPVAVRQYPMSKEAREGIRPHIQRFLDLGILVPCQSPWNTPLLPVKKPGTNDYRPVQDLREVNKRVQDIHPTVPNPYNLLSSLPPSHTWYSVLDLKDAFFCLKLHPNSQPLFAFEWRDPEKGNTGQLTWTRLPQGFKNSPTLFNEALHRDLASFRALNPQVVMLQYVDDLLVAAPTYRDCKEGTRRLLQELSKLGYRVSAKKAQLCREEVTYLGYLLKGGKRWLTPARKATVMKIPTPTTPRQVREFLGTAGFCRLWIPGFASLAAPLYPLTRPKVPFTWTEAHQEAFGRIKEALLSAPALALPDLTKPFALYVDEKEGVARGVLTQTLGPWRRPVAYLSKKLDPVASGWPTCLKAIAAVALLLKDADKLTLGQNVLVIAPHNLESIVRQPPDRWMTNARMTHYQSLLLNERVSFAPPAILNPATLLPVESDDTPIHICSEILAEETGTRPDLRDQPLPGVPAWYTDGSSFIMDGRRQAGAAIVDNKRTVWASNLPEGTSAQKAELIALTQALRLAEGKSINIYTDSRYAFATAHVHGAIYKQRGWLTSAGKDIKNKEEILALLEAIHLPKRVAIIHCPGHQRGTDPVATGNRKADEAAKQAAQSTRILTETTKNAGKRTADGSEFEKRTADGSEFESPKKKAKVE

SEQ ID NO: 6064 - protein, 2222 aa, synthetic construct
MPAAKRVKLDGGDKKYSIGLDIGTNSVGWAVITDEYKVPSKKFKVLGNTDRHSIKKNLIGALLFDSGETAEATRLKRTARRRYTRRKNRICYLQEIFSNEMAKVDDSFFHRLEESFLVEEDKKHERHPIFGNIVDEVAYHEKYPTIYHLRKKLVDSTDKADLRLIYLALAHMIKFRGHFLIEGDLNPDNSDVDKLFIQLVQTYNQLFEENPINASGVDAKAILSARLSKSRRLENLIAQLPGEKKNGLFGNLIALSLGLTPNFKSNFDLAEDAKLQLSKDTYDDDLDNLLAQIGDQYADLFLAAKNLSDAILLSDILRVNTEITKAPLSASMIKRYDEHHQDLTLLKALVRQQLPEKYKEIFFDQSKNGYAGYIDGGASQEEFYKFIKPILEKMDGTEELLVKLNREDLLRKQRTFDNGSIPHQIHLGELHAILRRQEDFYPFLKDNREKIEKILTFRIPYYVGPLARGNSRFAWMTRKSEETITPWNFEEVVDKGASAQSFIERMTNFDKNLPNEKVLPKHSLLYEYFTVYNELTKVKYVTEGMRKPAFLSGEQKKAIVDLLFKTNRKVTVKQLKEDYFKKIECFDSVEISGVEDRFNASLGTYHDLLKIIKDKDFLDNEENEDILEDIVLTLTLFEDREMIEERLKTYAHLFDDKVMKQLKRRRYTGWGRLSRKLINGIRDKQSGKTILDFLKSDGFANRNFMQLIHDDSLTFKEDIQKAQVSGQGDSLHEHIANLAGSPAIKKGILQTVKVVDELVKVMGRHKPENIVIEMARENQTTQKGQKNSRERMKRIEEGIKELGSQILKEHPVENTQLQNEKLYLYYLQNGRDMYVDQELDINRLSDYDVDHIVPQSFLKDDSIDNKVLTRSDKARGKSDNVPSEEVVKKMKNYWRQLLNAKLITQRKFDNLTKAERGGLSELDKAGFIKRQLVETRQITKHVAQILDSRMNTKYDENDKLIREVKVITLKSKLVSDFRKDFQFYKVREINNYHHAHDAYLNAVVGTALIKKYPKLESEFVYGDYKVYDVRKMIAKSEQEIGKATAKYFFYSNIMNFFKTEITLANGEIRKRPLIETNGETGEIVWDKGRDFATVRKVLSMPQVNIVKKTEVQTGGFSKESILPKRNSDKLIARKKDWDPKKYGGFDSPTVAYSVLVVAKVEKGKSKKLKSVKELLGITIMERSSFEKNPIDFLEAKGYKEVKKDLIIKLPKYSLFELENGRKRMLASAGELQKGNELALPSKYVNFLYLASHYEKLKGSPEDNEQKQLFVEQHKHYLDEIIEQISEFSKRVILADANLDKVLSAYNKHRDKPIREQAENIIHLFTLTNLGAPAAFKYFDTTIDRKRYTSTKEVLDATLIHQSITGLYETRIDLSQLGGDGGGGSGGSGGSGGSGGSGGTLGDQGSRGSDPLPEPRVTLTVEGIPTEFLVNTGAEHSVLTKPMGKMGSKRTVVAGATGSKVYPWTTKRLLKIGQKQVTHSFLVIPECPAPLLGRDLLTKLKAQIQFSTEGPQVTWEDRPAMCLVLNLEEEYRLHEKPVPPSIDPSWLQLFPMVWAEKAGMGLANQVPPVVVELKSDASPVAVRQYPMSKEAREGIRPHIQRFLDLGILVPCQSPWNTPLLPVKKPGTNDYRPVQDLREVNKRVQDIHPTVPNPYNLLSSLPPSHTWYSVLDLKDAFFCLKLHPNSQPLFAFEWRDPEKGNTGQLTWTRLPQGFKNSPTLFNEALHRDLASFRALNPQVVMLQYVDDLLVAAPTYRDCKEGTRRLLQELSKLGYRVSAKKAQLCREEVTYLGYLLKGGKRWLTPARKATVMKIPTPTTPRQVREFLGTAGFCRLWIPGFASLAAPLYPLTRPKVPFTWTEAHQEAFGRIKEALLSAPALALPDLTKPFALYVDEKEGVARGVLTQTLGPWRRPVAYLSKKLDPVASGWPTCLKAIAAVALLLKDADKLTLGQNVLVIAPHNLESIVRQPPDRWMTNARMTHYQSLLLNERVSFAPPAILNPATLLPVESDDTPIHICSEILAEETGTRPDLRDQPLPGVPAWYTDGSSFIMDGRRQAGAAIVDNKRTVWASNLPEGTSAQKAELIALTQALRLAEGKSINIYTDSRYAFATAHVHGAIYKQRGWLTSAGKDIKNKEEILALLEAIHLPKRVAIIHCPGHQRGTDPVATGNRKADEAAKQAAQSTRILTETTKNAGKRTADGSEFEKRTADGSEFESPKKKAKVE

SEQ ID NO: 6065 - protein, 2222 aa, synthetic construct
MPAAKRVKLDGGDKKYSIGLDIGTNSVGWAVITDEYKVPSKKFKVLGNTDRHSIKKNLIGALLFDSGETAEATRLKRTARRRYTRRKNRICYLQEIFSNEMAKVDDSFFHRLEESFLVEEDKKHERHPIFGNIVDEVAYHEKYPTIYHLRKKLVDSTDKADLRLIYLALAHMIKFRGHFLIEGDLNPDNSDVDKLFIQLVQTYNQLFEENPINASGVDAKAILSARLSKSRRLENLIAQLPGEKKNGLFGNLIALSLGLTPNFKSNFDLAEDAKLQLSKDTYDDDLDNLLAQIGDQYADLFLAAKNLSDAILLSDILRVNTEITKAPLSASMIKRYDEHHQDLTLLKALVRQQLPEKYKEIFFDQSKNGYAGYIDGGASQEEFYKFIKPILEKMDGTEELLVKLNREDLLRKQRTFDNGSIPHQIHLGELHAILRRQEDFYPFLKDNREKIEKILTFRIPYYVGPLARGNSRFAWMTRKSEETITPWNFEEVVDKGASAQSFIERMTNFDKNLPNEKVLPKHSLLYEYFTVYNELTKVKYVTEGMRKPAFLSGEQKKAIVDLLFKTNRKVTVKQLKEDYFKKIECFDSVEISGVEDRFNASLGTYHDLLKIIKDKDFLDNEENEDILEDIVLTLTLFEDREMIEERLKTYAHLFDDKVMKQLKRRRYTGWGRLSRKLINGIRDKQSGKTILDFLKSDGFANRNFMQLIHDDSLTFKEDIQKAQVSGQGDSLHEHIANLAGSPAIKKGILQTVKVVDELVKVMGRHKPENIVIEMARENQTTQKGQKNSRERMKRIEEGIKELGSQILKEHPVENTQLQNEKLYLYYLQNGRDMYVDQELDINRLSDYDVDHIVPQSFLKDDSIDNKVLTRSDKARGKSDNVPSEEVVKKMKNYWRQLLNAKLITQRKFDNLTKAERGGLSELDKAGFIKRQLVETRQITKHVAQILDSRMNTKYDENDKLIREVKVITLKSKLVSDFRKDFQFYKVREINNYHHAHDAYLNAVVGTALIKKYPKLESEFVYGDYKVYDVRKMIAKSEQEIGKATAKYFFYSNIMNFFKTEITLANGEIRKRPLIETNGETGEIVWDKGRDFATVRKVLSMPQVNIVKKTEVQTGGFSKESILPKRNSDKLIARKKDWDPKKYGGFDSPTVAYSVLVVAKVEKGKSKKLKSVKELLGITIMERSSFEKNPIDFLEAKGYKEVKKDLIIKLPKYSLFELENGRKRMLASAGELQKGNELALPSKYVNFLYLASHYEKLKGSPEDNEQKQLFVEQHKHYLDEIIEQISEFSKRVILADANLDKVLSAYNKHRDKPIREQAENIIHLFTLTNLGAPAAFKYFDTTIDRKRYTSTKEVLDATLIHQSITGLYETRIDLSQLGGDGGGGSGGSGGSGGSGGSGGTLGDQGSRGSDPLPEPRVTLTVEGIPTEFLVNTGAEHSVLTKPMGKMGSKRTVVAGATGSKVYPWTTKRLLKIGQKQVTHSFLVIPECPAPLLGRDLLTKLKAQIQFSTEGPQVTWEDRPAMCLVLNLEEEYRLHEKPVPPSIDPSWLQLFPMVWAEKAGMGLANQVPPVVVELKSDASPVAVRQYPMSKEAREGIRPHIQRFLDLGILVPCQSPWNTPLLPVKKPGTNDYRPVQDLREVNKRVQDIHPTVPNPYNLLSSLPPSHTWYSVLDLKDAFFCLKLHPNSQPLFAFEWRDPEKGNTGQLTWTRLPQGFKNSPTLFNEALHRDLASFRALNPQVVMLQYVDDLLVAAPTYRDCKEGTRRLLQELSKLGYRVSAKKAQLCREEVTYLGYLLKGGKRWLTPARKATVMKIPTPTTPRQVREFLGKAGFCRLFIPGFASLAAPLYPLTRPKVPFTWTEAHQEAFGRIKEALLSAPALALPDLTKPFALYVDEKEGVARGVLTQTLGPWRRPVAYLSKKLDPVASGWPTCLKAIAAVALLLKDADKLTLGQNVLVIAPHNLESIVRQPPDRWMTNARMTHYQSLLLNERVSFAPPAILNPATLLPVESDDTPIHICSEILAEETGTRPDLRDQPLPGVPAWYTDGSSFIMDGRRQAGAAIVDNKRTVWASNLPEGTSAQKAELIALTQALRLAEGKSINIYTDSRYAFATAHVHGAIYKQRGWLTSAGKDIKNKEEILALLEAIHLPKRVAIIHCPGHQRGTDPVATGNRKADEAAKQAAQSTRILTETTKNAGKRTADGSEFEKRTADGSEFESPKKKAKVE

SEQ ID NO: 6066 - protein, 2100 aa, synthetic construct
MPAAKRVKLDGGDKKYSIGLDIGTNSVGWAVITDEYKVPSKKFKVLGNTDRHSIKKNLIGALLFDSGETAEATRLKRTARRRYTRRKNRICYLQEIFSNEMAKVDDSFFHRLEESFLVEEDKKHERHPIFGNIVDEVAYHEKYPTIYHLRKKLVDSTDKADLRLIYLALAHMIKFRGHFLIEGDLNPDNSDVDKLFIQLVQTYNQLFEENPINASGVDAKAILSARLSKSRRLENLIAQLPGEKKNGLFGNLIALSLGLTPNFKSNFDLAEDAKLQLSKDTYDDDLDNLLAQIGDQYADLFLAAKNLSDAILLSDILRVNTEITKAPLSASMIKRYDEHHQDLTLLKALVRQQLPEKYKEIFFDQSKNGYAGYIDGGASQEEFYKFIKPILEKMDGTEELLVKLNREDLLRKQRTFDNGSIPHQIHLGELHAILRRQEDFYPFLKDNREKIEKILTFRIPYYVGPLARGNSRFAWMTRKSEETITPWNFEEVVDKGASAQSFIERMTNFDKNLPNEKVLPKHSLLYEYFTVYNELTKVKYVTEGMRKPAFLSGEQKKAIVDLLFKTNRKVTVKQLKEDYFKKIECFDSVEISGVEDRFNASLGTYHDLLKIIKDKDFLDNEENEDILEDIVLTLTLFEDREMIEERLKTYAHLFDDKVMKQLKRRRYTGWGRLSRKLINGIRDKQSGKTILDFLKSDGFANRNFMQLIHDDSLTFKEDIQKAQVSGQGDSLHEHIANLAGSPAIKKGILQTVKVVDELVKVMGRHKPENIVIEMARENQTTQKGQKNSRERMKRIEEGIKELGSQILKEHPVENTQLQNEKLYLYYLQNGRDMYVDQELDINRLSDYDVDHIVPQSFLKDDSIDNKVLTRSDKARGKSDNVPSEEVVKKMKNYWRQLLNAKLITQRKFDNLTKAERGGLSELDKAGFIKRQLVETRQITKHVAQILDSRMNTKYDENDKLIREVKVITLKSKLVSDFRKDFQFYKVREINNYHHAHDAYLNAVVGTALIKKYPKLESEFVYGDYKVYDVRKMIAKSEQEIGKATAKYFFYSNIMNFFKTEITLANGEIRKRPLIETNGETGEIVWDKGRDFATVRKVLSMPQVNIVKKTEVQTGGFSKESILPKRNSDKLIARKKDWDPKKYGGFDSPTVAYSVLVVAKVEKGKSKKLKSVKELLGITIMERSSFEKNPIDFLEAKGYKEVKKDLIIKLPKYSLFELENGRKRMLASAGELQKGNELALPSKYVNFLYLASHYEKLKGSPEDNEQKQLFVEQHKHYLDEIIEQISEFSKRVILADANLDKVLSAYNKHRDKPIREQAENIIHLFTLTNLGAPAAFKYFDTTIDRKRYTSTKEVLDATLIHQSITGLYETRIDLSQLGGDGGGGSGGSGGSGGSGGSGGTLGIEDEYRLHETSTEPDVSLGSTWLSDFPQAWAETGGMGLAVRQAPLIIPLKATSTPVSIQQYPMSHEARLGIKPHIQRLLDQGILVPCQSPWNTPLLPVKKPGTNDYRPVQDLREVNKRVEDIHPTVPNPYNLLSGLPPSHQWYTVLDLKDAFFCLRLHPTSQPLFAFEWRDPGMGISGQLTWTRLPQGFKNSPTLFNEALHRDLADFRIQHPDLILLQYVDDILLAATSELDCQQGTRALLQTLGDLGYRASAKKAQICQKQVKYLGYLLREGQRWLTEARKETVMGQPVPKTPRQLREFLGTAGFCRLWIPGFAEMAAPLYPLTKPGTLFSWGPDQQKAYQEIKQALLTAPALGLPDLTKPFELFVDEKQGYAKGVLTQKLGPWRRPVAYLSKKLDPVAAGWPPCLRMVAAIAVLTKDAGKLTMGQPLVILAPHAVEALVKQPPDRWLSNARMTHYQAMLLDTDRVQFGPVVALNPATLLPLPEEGAPHDCLEILAETHGTRPDLTDQPIPDADHTWYTDGSSFLQEGQRKAGAAVTTETEVIWAGALPAGTSAQRAELIALTQALKMAEGKRLNVYTDSRYAFATAHIHGEIYRRRGWLTSEGREIKNKSEILALLKALFLPKRLSIIHCLGHQKGDSAEARGNRLADQAAREAAIKTPPDTSTLLAGKRTADGSEFEKRTADGSEFESPKKKAKVE

SEQ ID NO: 6067 - protein, 2100 aa, synthetic construct
MPAAKRVKLDGGDKKYSIGLDIGTNSVGWAVITDEYKVPSKKFKVLGNTDRHSIKKNLIGALLFDSGETAEATRLKRTARRRYTRRKNRICYLQEIFSNEMAKVDDSFFHRLEESFLVEEDKKHERHPIFGNIVDEVAYHEKYPTIYHLRKKLVDSTDKADLRLIYLALAHMIKFRGHFLIEGDLNPDNSDVDKLFIQLVQTYNQLFEENPINASGVDAKAILSARLSKSRRLENLIAQLPGEKKNGLFGNLIALSLGLTPNFKSNFDLAEDAKLQLSKDTYDDDLDNLLAQIGDQYADLFLAAKNLSDAILLSDILRVNTEITKAPLSASMIKRYDEHHQDLTLLKALVRQQLPEKYKEIFFDQSKNGYAGYIDGGASQEEFYKFIKPILEKMDGTEELLVKLNREDLLRKQRTFDNGSIPHQIHLGELHAILRRQEDFYPFLKDNREKIEKILTFRIPYYVGPLARGNSRFAWMTRKSEETITPWNFEEVVDKGASAQSFIERMTNFDKNLPNEKVLPKHSLLYEYFTVYNELTKVKYVTEGMRKPAFLSGEQKKAIVDLLFKTNRKVTVKQLKEDYFKKIECFDSVEISGVEDRFNASLGTYHDLLKIIKDKDFLDNEENEDILEDIVLTLTLFEDREMIEERLKTYAHLFDDKVMKQLKRRRYTGWGRLSRKLINGIRDKQSGKTILDFLKSDGFANRNFMQLIHDDSLTFKEDIQKAQVSGQGDSLHEHIANLAGSPAIKKGILQTVKVVDELVKVMGRHKPENIVIEMARENQTTQKGQKNSRERMKRIEEGIKELGSQILKEHPVENTQLQNEKLYLYYLQNGRDMYVDQELDINRLSDYDVDHIVPQSFLKDDSIDNKVLTRSDKARGKSDNVPSEEVVKKMKNYWRQLLNAKLITQRKFDNLTKAERGGLSELDKAGFIKRQLVETRQITKHVAQILDSRMNTKYDENDKLIREVKVITLKSKLVSDFRKDFQFYKVREINNYHHAHDAYLNAVVGTALIKKYPKLESEFVYGDYKVYDVRKMIAKSEQEIGKATAKYFFYSNIMNFFKTEITLANGEIRKRPLIETNGETGEIVWDKGRDFATVRKVLSMPQVNIVKKTEVQTGGFSKESILPKRNSDKLIARKKDWDPKKYGGFDSPTVAYSVLVVAKVEKGKSKKLKSVKELLGITIMERSSFEKNPIDFLEAKGYKEVKKDLIIKLPKYSLFELENGRKRMLASAGELQKGNELALPSKYVNFLYLASHYEKLKGSPEDNEQKQLFVEQHKHYLDEIIEQISEFSKRVILADANLDKVLSAYNKHRDKPIREQAENIIHLFTLTNLGAPAAFKYFDTTIDRKRYTSTKEVLDATLIHQSITGLYETRIDLSQLGGDGGGGSGGSGGSGGSGGSGGTLNIEDEYRLHETSKEPDVSLGSTWLSDFPQAWAETGGMGLAVRQAPLIIPLKATSTPVSIKQYPMSQEARLGIKPHIQRLLDQGILVPCQSPWNTPLLPVKKPGTNDYRPVQDLREVNKRVEDIHPTVPNPYNLLSGLPPSHQWYTVLDLKDAFFCLRLHPTSQPLFAFEWRDPEMGISGQLTWTRLPQGFKNSPTLFNEALHRDLAGFRIQHPDLILLQYVDDLLLAATSELDCQQGTRALLQTLGDLGYRASAKKAQICQKQVKYLGYLLKEGQRWLTEARKETVMGQPIPKTPRQLREFLGTAGFCRLWIPGFAEMAAPLYPLTKPGTLFNWGPDQQKAFQEIKQALLTAPALGLPDLTKPFELFVDEKQGYAKGVLTQKLGPWRRPVAYLSKKLDPVAAGWPPCLRMVAAIAVLTKDAGKLTMGQPLVILAPHAVEALVKQPPDRWLSNARMTHYQALLLDTDRVQFGPVVALNPATLLPLPEEGLQHDCLDILAEAHGTRSDLMDQPLPDADHTWYTDGSSFLQEGQRKAGAAVTTETEVIWARALPAGTSAQRAELIALTQALKMAEGKKLNVYTDSRYAFATAHIHGEIYRRRGWLTSEGKEIKNKDEILALLKALFLPKRLSIIHCPGHQKGNSAEARGNRMADQAAREVATRETPETSTLLAGKRTADGSEFEKRTADGSEFESPKKKAKVE

SEQ ID NO: 6068 - protein, 2100 aa, synthetic construct
MPAAKRVKLDGGDKKYSIGLDIGTNSVGWAVITDEYKVPSKKFKVLGNTDRHSIKKNLIGALLFDSGETAEATRLKRTARRRYTRRKNRICYLQEIFSNEMAKVDDSFFHRLEESFLVEEDKKHERHPIFGNIVDEVAYHEKYPTIYHLRKKLVDSTDKADLRLIYLALAHMIKFRGHFLIEGDLNPDNSDVDKLFIQLVQTYNQLFEENPINASGVDAKAILSARLSKSRRLENLIAQLPGEKKNGLFGNLIALSLGLTPNFKSNFDLAEDAKLQLSKDTYDDDLDNLLAQIGDQYADLFLAAKNLSDAILLSDILRVNTEITKAPLSASMIKRYDEHHQDLTLLKALVRQQLPEKYKEIFFDQSKNGYAGYIDGGASQEEFYKFIKPILEKMDGTEELLVKLNREDLLRKQRTFDNGSIPHQIHLGELHAILRRQEDFYPFLKDNREKIEKILTFRIPYYVGPLARGNSRFAWMTRKSEETITPWNFEEVVDKGASAQSFIERMTNFDKNLPNEKVLPKHSLLYEYFTVYNELTKVKYVTEGMRKPAFLSGEQKKAIVDLLFKTNRKVTVKQLKEDYFKKIECFDSVEISGVEDRFNASLGTYHDLLKIIKDKDFLDNEENEDILEDIVLTLTLFEDREMIEERLKTYAHLFDDKVMKQLKRRRYTGWGRLSRKLINGIRDKQSGKTILDFLKSDGFANRNFMQLIHDDSLTFKEDIQKAQVSGQGDSLHEHIANLAGSPAIKKGILQTVKVVDELVKVMGRHKPENIVIEMARENQTTQKGQKNSRERMKRIEEGIKELGSQILKEHPVENTQLQNEKLYLYYLQNGRDMYVDQELDINRLSDYDVDHIVPQSFLKDDSIDNKVLTRSDKARGKSDNVPSEEVVKKMKNYWRQLLNAKLITQRKFDNLTKAERGGLSELDKAGFIKRQLVETRQITKHVAQILDSRMNTKYDENDKLIREVKVITLKSKLVSDFRKDFQFYKVREINNYHHAHDAYLNAVVGTALIKKYPKLESEFVYGDYKVYDVRKMIAKSEQEIGKATAKYFFYSNIMNFFKTEITLANGEIRKRPLIETNGETGEIVWDKGRDFATVRKVLSMPQVNIVKKTEVQTGGFSKESILPKRNSDKLIARKKDWDPKKYGGFDSPTVAYSVLVVAKVEKGKSKKLKSVKELLGITIMERSSFEKNPIDFLEAKGYKEVKKDLIIKLPKYSLFELENGRKRMLASAGELQKGNELALPSKYVNFLYLASHYEKLKGSPEDNEQKQLFVEQHKHYLDEIIEQISEFSKRVILADANLDKVLSAYNKHRDKPIREQAENIIHLFTLTNLGAPAAFKYFDTTIDRKRYTSTKEVLDATLIHQSITGLYETRIDLSQLGGDGGGGSGGSGGSGGSGGSGGTLNIEDEHRLHETSKEPDVSLGSTWLSDFPQAWAETGGMGLAVRQAPLIIPLKATSTPVSIKQYPMSQEARLGIKPHIQRLLDQGILVPCQSPWNTPLLPVKKPGTNDYRPVQDLREVNKRVEDIHPTVPNPYNLLSGLPPSHQWYTVLDLKDAFFCLRLHPTSQPLFAFEWRDPEMGISGQLTWTRLPQGFKNSPTLFDEALHRDLADFRIQHPDLILLQYVDDLLLAATSELDCQQGTRALLQTLGNLGYRASAKKAQICQKQVKYLGYLLKEGQRWLTEARKETVMGQPTPKTPRQLREFLGTAGFCRLWIPGFAEMAAPLYPLTKTGTLFNWGPDQQKAYQEIKQALLTAPALGLPDLTKPFELFVDEKQGYAKGVLTQKLGPWRRPVAYLSKKLDPVAAGWPPCLRMVAAIAVLTKDAGKLTMGQPLVILAPHAVEALVKQPPDRWLSNARMTHYQALLLDTDRVQFGPVVALNPATLLPLPEEGLQHNCLDILAEAHGTRPDLTDQPLPDADHTWYTDGSSLLQEGQRKAGAAVTTETEVIWAKALPAGTSAQRAELIALTQALKMAEGKKLNVYTDSRYAFATAHIHGEIYRRRGLLTSEGKEIKNKDEILALLKALFLPKRLSIIHCPGHQKGHSAEARGNRMADQAARKAAITETPDTSTLLAGKRTADGSEFEKRTADGSEFESPKKKAKVE

SEQ ID NO: 6069 - protein, 2094 aa, synthetic construct
MPAAKRVKLDGGDKKYSIGLDIGTNSVGWAVITDEYKVPSKKFKVLGNTDRHSIKKNLIGALLFDSGETAEATRLKRTARRRYTRRKNRICYLQEIFSNEMAKVDDSFFHRLEESFLVEEDKKHERHPIFGNIVDEVAYHEKYPTIYHLRKKLVDSTDKADLRLIYLALAHMIKFRGHFLIEGDLNPDNSDVDKLFIQLVQTYNQLFEENPINASGVDAKAILSARLSKSRRLENLIAQLPGEKKNGLFGNLIALSLGLTPNFKSNFDLAEDAKLQLSKDTYDDDLDNLLAQIGDQYADLFLAAKNLSDAILLSDILRVNTEITKAPLSASMIKRYDEHHQDLTLLKALVRQQLPEKYKEIFFDQSKNGYAGYIDGGASQEEFYKFIKPILEKMDGTEELLVKLNREDLLRKQRTFDNGSIPHQIHLGELHAILRRQEDFYPFLKDNREKIEKILTFRIPYYVGPLARGNSRFAWMTRKSEETITPWNFEEVVDKGASAQSFIERMTNFDKNLPNEKVLPKHSLLYEYFTVYNELTKVKYVTEGMRKPAFLSGEQKKAIVDLLFKTNRKVTVKQLKEDYFKKIECFDSVEISGVEDRFNASLGTYHDLLKIIKDKDFLDNEENEDILEDIVLTLTLFEDREMIEERLKTYAHLFDDKVMKQLKRRRYTGWGRLSRKLINGIRDKQSGKTILDFLKSDGFANRNFMQLIHDDSLTFKEDIQKAQVSGQGDSLHEHIANLAGSPAIKKGILQTVKVVDELVKVMGRHKPENIVIEMARENQTTQKGQKNSRERMKRIEEGIKELGSQILKEHPVENTQLQNEKLYLYYLQNGRDMYVDQELDINRLSDYDVDHIVPQSFLKDDSIDNKVLTRSDKARGKSDNVPSEEVVKKMKNYWRQLLNAKLITQRKFDNLTKAERGGLSELDKAGFIKRQLVETRQITKHVAQILDSRMNTKYDENDKLIREVKVITLKSKLVSDFRKDFQFYKVREINNYHHAHDAYLNAVVGTALIKKYPKLESEFVYGDYKVYDVRKMIAKSEQEIGKATAKYFFYSNIMNFFKTEITLANGEIRKRPLIETNGETGEIVWDKGRDFATVRKVLSMPQVNIVKKTEVQTGGFSKESILPKRNSDKLIARKKDWDPKKYGGFDSPTVAYSVLVVAKVEKGKSKKLKSVKELLGITIMERSSFEKNPIDFLEAKGYKEVKKDLIIKLPKYSLFELENGRKRMLASAGELQKGNELALPSKYVNFLYLASHYEKLKGSPEDNEQKQLFVEQHKHYLDEIIEQISEFSKRVILADANLDKVLSAYNKHRDKPIREQAENIIHLFTLTNLGAPAAFKYFDTTIDRKRYTSTKEVLDATLIHQSITGLYETRIDLSQLGGDGGGGSGGSGGSGGSGGSGGTLQLDDEYRLYSPLVKPDQNIQFWLEQFPQAWAETAGMGLAKQVPPQVIQLKASATPVSVRQYPLSKEAQEGIRPHVQRLIQQGILVPVQSPWNTPLLPVRKPGTNDYRPVQDLREVNKRVQDIHPTVPNPYNLLCALPPQRSWYTVLDLKDAFFCLRLHPTSQPLFAFEWRDPGTGRTGQLTWTRLPQGFKNSPTIFDEALHRDLANFRIQHPQVTLLQYVDDLLLAGATKQDCLEGTKALLLELSDLGYRASAKKAQICRREVTYLGYSLRDGQRWLTEARKKTVVQIPAPTTAKQVREFLGTAGFCRLWIPGFATLAAPLYPLTKEKGEFSWAPEHQKAFDAIKKALLSAPALALPDVTKPFTLYVDERKGVARGVLTQTLGPWRRPVAYLSKKLDPVASGWPVCLKAIAAVAILVKDADKLTLGQNITVIAPHALENIVRQPPDRWMTNARMTHYQSLLLTERVTFAPPAALNPATLLPEETDEPVTHDCHQLLIEETGVRKDLTDIPLTGEVLTWFTDGSSYVVEGKRMAGAAVVDGTRTIWASSLPEGTSAQKAELMALTQALRLAEGKSINIYTDSRYAFATAHVHGAIYKQRGLLTSAGREIKNKEEILSLLEALHLPKRLAIIHCPGHQKAKDPISRGNQMADRVAKQAAQGVNLLAGKRTADGSEFEKRTADGSEFESPKKKAKVE

SEQ ID NO: 6070 - protein, 2094 aa, synthetic construct; identical to SEQ ID NO: 6069

SEQ ID NO: 6071 - protein, 2180 aa, synthetic construct
MPAAKRVKLDGGDKKYSIGLDIGTNSVGWAVITDEYKVPSKKFKVLGNTDRHSIKKNLIGALLFDSGETAEATRLKRTARRRYTRRKNRICYLQEIFSNEMAKVDDSFFHRLEESFLVEEDKKHERHPIFGNIVDEVAYHEKYPTIYHLRKKLVDSTDKADLRLIYLALAHMIKFRGHFLIEGDLNPDNSDVDKLFIQLVQTYNQLFEENPINASGVDAKAILSARLSKSRRLENLIAQLPGEKKNGLFGNLIALSLGLTPNFKSNFDLAEDAKLQLSKDTYDDDLDNLLAQIGDQYADLFLAAKNLSDAILLSDILRVNTEITKAPLSASMIKRYDEHHQDLTLLKALVRQQLPEKYKEIFFDQSKNGYAGYIDGGASQEEFYKFIKPILEKMDGTEELLVKLNREDLLRKQRTFDNGSIPHQIHLGELHAILRRQEDFYPFLKDNREKIEKILTFRIPYYVGPLARGNSRFAWMTRKSEETITPWNFEEVVDKGASAQSFIERMTNFDKNLPNEKVLPKHSLLYEYFTVYNELTKVKYVTEGMRKPAFLSGEQKKAIVDLLFKTNRKVTVKQLKEDYFKKIECFDSVEISGVEDRFNASLGTYHDLLKIIKDKDFLDNEENEDILEDIVLTLTLFEDREMIEERLKTYAHLFDDKVMKQLKRRRYTGWGRLSRKLINGIRDKQSGKTILDFLKSDGFANRNFMQLIHDDSLTFKEDIQKAQVSGQGDSLHEHIANLAGSPAIKKGILQTVKVVDELVKVMGRHKPENIVIEMARENQTTQKGQKNSRERMKRIEEGIKELGSQILKEHPVENTQLQNEKLYLYYLQNGRDMYVDQELDINRLSDYDVDHIVPQSFLKDDSIDNKVLTRSDKARGKSDNVPSEEVVKKMKNYWRQLLNAKLITQRKFDNLTKAERGGLSELDKAGFIKRQLVETRQITKHVAQILDSRMNTKYDENDKLIREVKVITLKSKLVSDFRKDFQFYKVREINNYHHAHDAYLNAVVGTALIKKYPKLESEFVYGDYKVYDVRKMIAKSEQEIGKATAKYFFYSNIMNFFKTEITLANGEIRKRPLIETNGETGEIVWDKGRDFATVRKVLSMPQVNIVKKTEVQTGGFSKESILPKRNSDKLIARKKDWDPKKYGGFDSPTVAYSVLVVAKVEKGKSKKLKSVKELLGITIMERSSFEKNPIDFLEAKGYKEVKKDLIIKLPKYSLFELENGRKRMLASAGELQKGNELALPSKYVNFLYLASHYEKLKGSPEDNEQKQLFVEQHKHYLDEIIEQISEFSKRVILADANLDKVLSAYNKHRDKPIREQAENIIHLFTLTNLGAPAAFKYFDTTIDRKRYTSTKEVLDATLIHQSITGLYETRIDLSQLGGDGGGGSGGSGGSGGSGGSGGMDPLQLLQPLEAEIKGTKLKAHWNSGATITCVPQAFLEEEVPIKNIWIKTIHGEKEQPVYYLTFKIQGRKVEAEVISSPYDYILVSPSDIPWLMKKPLQLTTLVPLQEYEERLLKQTMLTGSYKEKLQSLFLKYDALWQHWENQVGHRRIKPHHIATGTVNPRPQKQYPINPKAKASIQTVINDLLKQGVLIQQNSIMNTPVYPVPKPDGKWRMVLDYREVNKTIPLIAAQNQHSAGILSSIFRGKYKTTLDLSNGFWAHSITPESYWLTAFTWLGQQYCWTRLPQGFLNSPALFNADVVDLLKEVPNVQVYVDDIYISHDDPREHLEQLEKVFSLLLNAGYVVSLKKSEIAQHEVEFLGFNITKEGRGLTETFKQKLLNITPPRDLKQLQSILGLLNFARNFIPNFSELVKPLYNIIATAPGKYITWTTDNSQQLQNIISMLNSAENLEERNPEVRLIMKVNTSPSAGYIRFYNEFAKRPIMYLNYVYTKAEVKFTNTEKLLTTIHKGLIKALDLGMGQEILVYSPIVSMTKIQKTPLPERKALPIRWITWMSYLEDPRIQFHYDKTLPELQQVPTVTDDIIAKIKHPSEFSMVFYTDGSAIKHPNVNKSHNAGMGIAQVQFKPEFTVINTWSIPLGDHTAQLAEVAAVEFACKKALKIDGPVLIVTDSFYVAESVNKELPYWQSNGFFNNKKKPLKHVSKWKSIADCIQLKPDIIIIHEKGHQPTASTFHTEGNNLADKLATQGSYVVNAGKRTADGSEFEKRTADGSEFESPKKKAKVE

SEQ ID NO: 6072 - protein, 2180 aa, synthetic construct
MPAAKRVKLDGGDKKYSIGLDIGTNSVGWAVITDEYKVPSKKFKVLGNTDRHSIKKNLIGALLFDSGETAEATRLKRTARRRYTRRKNRICYLQEIFSNEMAKVDDSFFHRLEESFLVEEDKKHERHPIFGNIVDEVAYHEKYPTIYHLRKKLVDSTDKADLRLIYLALAHMIKFRGHFLIEGDLNPDNSDVDKLFIQLVQTYNQLFEENPINASGVDAKAILSARLSKSRRLENLIAQLPGEKKNGLFGNLIALSLGLTPNFKSNFDLAEDAKLQLSKDTYDDDLDNLLAQIGDQYADLFLAAKNLSDAILLSDILRVNTEITKAPLSASMIKRYDEHHQDLTLLKALVRQQLPEKYKEIFFDQSKNGYAGYIDGGASQEEFYKFIKPILEKMDGTEELLVKLNREDLLRKQRTFDNGSIPHQIHLGELHAILRRQEDFYPFLKDNREKIEKILTFRIPYYVGPLARGNSRFAWMTRKSEETITPWNFEEVVDKGASAQSFIERMTNFDKNLPNEKVLPKHSLLYEYFTVYNELTKVKYVTEGMRKPAFLSGEQKKAIVDLLFKTNRKVTVKQLKEDYFKKIECFDSVEISGVEDRFNASLGTYHDLLKIIKDKDFLDNEENEDILEDIVLTLTLFEDREMIEERLKTYAHLFDDKVMKQLKRRRYTGWGRLSRKLINGIRDKQSGKTILDFLKSDGFANRNFMQLIHDDSLTFKEDIQKAQVSGQGDSLHEHIANLAGSPAIKKGILQTVKVVDELVKVMGRHKPENIVIEMARENQTTQKGQKNSRERMKRIEEGIKELGSQILKEHPVENTQLQNEKLYLYYLQNGRDMYVDQELDINRLSDYDVDHIVPQSFLKDDSIDNKVLTRSDKARGKSDNVPSEEVVKKMKNYWRQLLNAKLITQRKFDNLTKAERGGLSELDKAGFIKRQLVETRQITKHVAQILDSRMNTKYDENDKLIREVKVITLKSKLVSDFRKDFQFYKVREINNYHHAHDAYLNAVVGTALIKKYPKLESEFVYGDYKVYDVRKMIAKSEQEIGKATAKYFFYSNIMNFFKTEITLANGEIRKRPLIETNGETGEIVWDKGRDFATVRKVLSMPQVNIVKKTEVQTGGFSKESILPKRNSDKLIARKKDWDPKKYGGFDSPTVAYSVLVVAKVEKGKSKKLKSVKELLGITIMERSSFEKNPIDFLEAKGYKEVKKDLIIKLPKYSLFELENGRKRMLASAGELQKGNELALPSKYVNFLYLASHYEKLKGSPEDNEQKQLFVEQHKHYLDEIIEQISEFSKRVILADANLDKVLSAYNKHRDKPIREQAENIIHLFTLTNLGAPAAFKYFDTTIDRKRYTSTKEVLDATLIHQSITGLYETRIDLSQLGGDGGGGSGGSGGSGGSGGSGGMDPLQLLQPLEAEIKGTKLKAHWNSGATITCVPQAFLEEEVPIKNIWIKTIHGEKEQPVYYLTFKIQGRKVEAEVISSPYDYILVSPSDIPWLMKKPLQLTTLVPLQEYEERLLKQTMLTGSYKEKLQSLFLKYDALWQHWENQVGHRRIKPHHIATGTVNPRPQKQYPINPKAKASIQTVINDLLKQGVLIQQNSIMNTPVYPVPKPDGKWRMVLDYREVNKTIPLIAAQNQHSAGILSSIFRGKYKTTLDLSNGFWAHSITPESYWLTAFTWLGQQYCWTRLPQGFLNSPALFNADVVDLLKEVPNVQVYVDDIYISHDDPREHLEQLEKVFSLLLNAGYVVSLKKSEIAQHEVEFLGFNITKEGRGLTETFKQKLLNITPPRDLKQLQSILGKLNFARNFIPNFSELVKPLYNIIATAPGKYITWTTDNSQQLQNIISMLNSAENLEERNPEVRLIMKVNTSPSAGYIRFYNEFAKRPIMYLNYVYTKAEVKFTNTEKLLTTIHKGLIKALDLGMGQEILVYSPIVSMTKIQKTPLPERKALPIRWITWMSYLEDPRIQFHYDKTLPELQQVPTVTDDIIAKIKHPSEFSMVFYTDGSAIKHPNVNKSHNAGMGIAQVQFKPEFTVINTWSIPLGDHTAQLAEVAAVEFACKKALKIDGPVLIVTDSFYVAESVNKELPYWQSNGFFNNKKKPLKHVSKWKSIADCIQLKPDIIIIHEKGHQPTASTFHTEGNNLADKLATQGSYVVNAGKRTADGSEFEKRTADGSEFESPKKKAKVE

SEQ ID NO: 6073 - protein, 2098 aa, synthetic construct; identical to SEQ ID NO: 4502

SEQ ID NO: 6074 - protein, 2098 aa, synthetic construct
MPAAKRVKLDGGDKKYSIGLDIGTNSVGWAVITDEYKVPSKKFKVLGNTDRHSIKKNLIGALLFDSGETAEATRLKRTARRRYTRRKNRICYLQEIFSNEMAKVDDSFFHRLEESFLVEEDKKHERHPIFGNIVDEVAYHEKYPTIYHLRKKLVDSTDKADLRLIYLALAHMIKFRGHFLIEGDLNPDNSDVDKLFIQLVQTYNQLFEENPINASGVDAKAILSARLSKSRRLENLIAQLPGEKKNGLFGNLIALSLGLTPNFKSNFDLAEDAKLQLSKDTYDDDLDNLLAQIGDQYADLFLAAKNLSDAILLSDILRVNTEITKAPLSASMIKRYDEHHQDLTLLKALVRQQLPEKYKEIFFDQSKNGYAGYIDGGASQEEFYKFIKPILEKMDGTEELLVKLNREDLLRKQRTFDNGSIPHQIHLGELHAILRRQEDFYPFLKDNREKIEKILTFRIPYYVGPLARGNSRFAWMTRKSEETITPWNFEEVVDKGASAQSFIERMTNFDKNLPNEKVLPKHSLLYEYFTVYNELTKVKYVTEGMRKPAFLSGEQKKAIVDLLFKTNRKVTVKQLKEDYFKKIECFDSVEISGVEDRFNASLGTYHDLLKIIKDKDFLDNEENEDILEDIVLTLTLFEDREMIEERLKTYAHLFDDKVMKQLKRRRYTGWGRLSRKLINGIRDKQSGKTILDFLKSDGFANRNFMQLIHDDSLTFKEDIQKAQVSGQGDSLHEHIANLAGSPAIKKGILQTVKVVDELVKVMGRHKPENIVIEMARENQTTQKGQKNSRERMKRIEEGIKELGSQILKEHPVENTQLQNEKLYLYYLQNGRDMYVDQELDINRLSDYDVDHIVPQSFLKDDSIDNKVLTRSDKARGKSDNVPSEEVVKKMKNYWRQLLNAKLITQRKFDNLTKAERGGLSELDKAGFIKRQLVETRQITKHVAQILDSRMNTKYDENDKLIREVKVITLKSKLVSDFRKDFQFYKVREINNYHHAHDAYLNAVVGTALIKKYPKLESEFVYGDYKVYDVRKMIAKSEQEIGKATAKYFFYSNIMNFFKTEITLANGEIRKRPLIETNGETGEIVWDKGRDFATVRKVLSMPQVNIVKKTEVQTGGFSKESILPKRNSDKLIARKKDWDPKKYGGFDSPTVAYSVLVVAKVEKGKSKKLKSVKELLGITIMERSSFEKNPIDFLEAKGYKEVKKDLIIKLPKYSLFELENGRKRMLASAGELQKGNELALPSKYVNFLYLASHYEKLKGSPEDNEQKQLFVEQHKHYLDEIIEQISEFSKRVILADANLDKVLSAYNKHRDKPIREQAENIIHLFTLTNLGAPAAFKYFDTTIDRKRYTSTKEVLDATLIHQSITGLYETRIDLSQLGGDGGGGSGGSGGSGGSGGSGGVLNLEEEYRLHEKPVPSSIDPSWLQLFPTVWAERAGMGLANQVPPVVVELRSGASPVAVRQYPMSKEAREGIRPHIQRFLDLGVLVPCQSPWNTPLLPVKKPGTNDYRPVQDLREINKRVQDIHPTVPNPYNLLSSLPPSHTWYSVLDLKDAFFCLKLHPNSQPLFAFEWRDPEKGNTGQLTWTRLPQGFKNSPTLFNEALHRDLAPFRALNPQVVLLQYVDDLLVAAPTYRDCKEGTQKLLQELSKLGYRVSAKKAQLCQKEVTYLGYLLKEGKRWLTPARKATVMKIPPPTTPRQVREFLGKAGFCRLFIPGFASLAAPLYPLTKPSIPFIWTEEHQKAFDRIKEALLSAPALALPDLTKPFTLYVDERAGVARGVLTQTLGPWRRPVAYLSKKLDPVASGWPTCLKAVAAVALLLKDADKLTLGQNVTVIASHSLESIVRQPPDRWMTNARMTHYQSLLLNERVSFAPPAVLNPATLLPVESEATPVHRCSEILAEETGTRRDLKDQPLPGVPAWYTDGSSFIAEGKRRAGAAIVDGKRTVWASSLPEGTSAQKAELVALTQALRLAEGKDINIYTDSRYAFATAHIHGAIYKQRGWLTSAGKDIKNKEEILALLEAIHLPKRVAIIHCPGHQKGNDPVATGNRRADEAAKQAALSTRVLAETTKPAGKRTADGSEFEKRTADGSEFESPKKKAKVE

SEQ ID NO: 6075 - protein, 2100 aa, synthetic construct
MPAAKRVKLDGGDKKYSIGLDIGTNSVGWAVITDEYKVPSKKFKVLGNTDRHSIKKNLIGALLFDSGETAEATRLKRTARRRYTRRKNRICYLQEIFSNEMAKVDDSFFHRLEESFLVEEDKKHERHPIFGNIVDEVAYHEKYPTIYHLRKKLVDSTDKADLRLIYLALAHMIKFRGHFLIEGDLNPDNSDVDKLFIQLVQTYNQLFEENPINASGVDAKAILSARLSKSRRLENLIAQLPGEKKNGLFGNLIALSLGLTPNFKSNFDLAEDAKLQLSKDTYDDDLDNLLAQIGDQYADLFLAAKNLSDAILLSDILRVNTEITKAPLSASMIKRYDEHHQDLTLLKALVRQQLPEKYKEIFFDQSKNGYAGYIDGGASQEEFYKFIKPILEKMDGTEELLVKLNREDLLRKQRTFDNGSIPHQIHLGELHAILRRQEDFYPFLKDNREKIEKILTFRIPYYVGPLARGNSRFAWMTRKSEETITPWNFEEVVDKGASAQSFIERMTNFDKNLPNEKVLPKHSLLYEYFTVYNELTKVKYVTEGMRKPAFLSGEQKKAIVDLLFKTNRKVTVKQLKEDYFKKIECFDSVEISGVEDRFNASLGTYHDLLKIIKDKDFLDNEENEDILEDIVLTLTLFEDREMIEERLKTYAHLFDDKVMKQLKRRRYTGWGRLSRKLINGIRDKQSGKTILDFLKSDGFANRNFMQLIHDDSLTFKEDIQKAQVSGQGDSLHEHIANLAGSPAIKKGILQTVKVVDELVKVMGRHKPENIVIEMARENQTTQKGQKNSRERMKRIEEGIKELGSQILKEHPVENTQLQNEKLYLYYLQNGRDMYVDQELDINRLSDYDVDHIVPQSFLKDDSIDNKVLTRSDKARGKSDNVPSEEVVKKMKNYWRQLLNAKLITQRKFDNLTKAERGGLSELDKAGFIKRQLVETRQITKHVAQILDSRMNTKYDENDKLIREVKVITLKSKLVSDFRKDFQFYKVREINNYHHAHDAYLNAVVGTALIKKYPKLESEFVYGDYKVYDVRKMIAKSEQEIGKATAKYFFYSNIMNFFKTEITLANGEIRKRPLIETNGETGEIVWDKGRDFATVRKVLSMPQVNIVKKTEVQTGGFSKESILPKRNSDKLIARKKDWDPKKYGGFDSPTVAYSVLVVAKVEKGKSKKLKSVKELLGITIMERSSFEKNPIDFLEAKGYKEVKKDLIIKLPKYSLFELENGRKRMLASAGELQKGNELALPSKYVNFLYLASHYEKLKGSPEDNEQKQLFVEQHKHYLDEIIEQISEFSKRVILADANLDKVLSAYNKHRDKPIREQAENIIHLFTLTNLGAPAAFKYFDTTIDRKRYTSTKEVLDATLIHQSITGLYETRIDLSQLGGDGGGGSGGSGGSGGSGGSGGTLNIEDEYRLHETSKEPDVPLGSTWLSDFPQAWAETGGMGLAVRQAPLIIPLKATSTPVSIKQYPMSQEARLGIKPHIQRLLDQGILVPCQSPWNTPLLPVKKPGTNDYRPVQDLREVNKRVEDIHPTVPNPYNLLSGLPPSHQWYTVLDLKDAFFCLRLHPTSQPLFAFEWRDPEMGISGQLTWTRLPQGFKNSPTLFNEALHRDLADFRIQHPDLILLQYVDDLLLAATSEQDCQRGTRALLQTLGNLGYRASAKKAQICQKQVKYLGYLLKEGQRWLTEARKETVMGQPTPKTPRQLREFLGKAGFCRLFIPGFAEMAAPLYPLTKPGTLFNWGPDQQKAYQEIKQALLTAPALGLPDLTKPFELFVDEKQGYAKGVLTQKLGPWRRPVAYLSKKLDPVAAGWPPCLRMVAAIAVLTKDAGKLTMGQPLVILAPHAVEALVKQPPDRWLSNARMTHYQAMLLDTDRVQFGPVVALNPATLLPLPEKEAPHDCLEILAETHGTRPDLTDQPIPDADYTWYTDGSSFLQEGQRRAGAAVTTETEVIWARALPAGTSAQRAELIALTQALKMAEGKKLNVYTDSRYAFATAHVHGEIYRRRGWLTSEGREIKNKNEILALLKALFLPKRLSIIHCPGHQKGNSAEARGNRMADQAAREAAMKAVLETSTLLAGKRTADGSEFEKRTADGSEFESPKKKAKVE

SEQ ID NO: 6076 - protein, 2105 aa, synthetic construct
MPAAKRVKLDGGDKKYSIGLDIGTNSVGWAVITDEYKVPSKKFKVLGNTDRHSIKKNLIGALLFDSGETAEATRLKRTARRRYTRRKNRICYLQEIFSNEMAKVDDSFFHRLEESFLVEEDKKHERHPIFGNIVDEVAYHEKYPTIYHLRKKLVDSTDKADLRLIYLALAHMIKFRGHFLIEGDLNPDNSDVDKLFIQLVQTYNQLFEENPINASGVDAKAILSARLSKSRRLENLIAQLPGEKKNGLFGNLIALSLGLTPNFKSNFDLAEDAKLQLSKDTYDDDLDNLLAQIGDQYADLFLAAKNLSDAILLSDILRVNTEITKAPLSASMIKRYDEHHQDLTLLKALVRQQLPEKYKEIFFDQSKNGYAGYIDGGASQEEFYKFIKPILEKMDGTEELLVKLNREDLLRKQRTFDNGSIPHQIHLGELHAILRRQEDFYPFLKDNREKIEKILTFRIPYYVGPLARGNSRFAWMTRKSEETITPWNFEEVVDKGASAQSFIERMTNFDKNLPNEKVLPKHSLLYEYFTVYNELTKVKYVTEGMRKPAFLSGEQKKAIVDLLFKTNRKVTVKQLKEDYFKKIECFDSVEISGVEDRFNASLGTYHDLLKIIKDKDFLDNEENEDILEDIVLTLTLFEDREMIEERLKTYAHLFDDKVMKQLKRRRYTGWGRLSRKLINGIRDKQSGKTILDFLKSDGFANRNFMQLIHDDSLTFKEDIQKAQVSGQGDSLHEHIANLAGSPAIKKGILQTVKVVDELVKVMGRHKPENIVIEMARENQTTQKGQKNSRERMKRIEEGIKELGSQILKEHPVENTQLQNEKLYLYYLQNGRDMYVDQELDINRLSDYDVDHIVPQSFLKDDSIDNKVLTRSDKARGKSDNVPSEEVVKKMKNYWRQLLNAKLITQRKFDNLTKAERGGLSELDKAGFIKRQLVETRQITKHVAQILDSRMNTKYDENDKLIREVKVITLKSKLVSDFRKDFQFYKVREINNYHHAHDAYLNAVVGTALIKKYPKLESEFVYGDYKVYDVRKMIAKSEQEIGKATAKYFFYSNIMNFFKTEITLANGEIRKRPLIETNGETGEIVWDKGRDFATVRKVLSMPQVNIVKKTEVQTGGFSKESILPKRNSDKLIARKKDWDPKKYGGFDSPTVAYSVLVVAKVEKGKSKKLKSVKELLGITIMERSSFEKNPIDFLEAKGYKEVKKDLIIKLPKYSLFELENGRKRMLASAGELQKGNELALPSKYVNFLYLASHYEKLKGSPEDNEQKQLFVEQHKHYLDEIIEQISEFSKRVILADANLDKVLSAYNKHRDKPIREQAENIIHLFTLTNLGAPAAFKYFDTTIDRKRYTSTKEVLDATLIHQSITGLYETRIDLSQLGGDGGGGSGGSGGSGGSGGSGGSGGTAPLEEEYRLFLEAPIQNVTLLEQWKREIPKVWAEINPPGLASTQAPIHVQLLSTALPVRVRQYPITLEAKRSLRETIRKFRAAGILRPVHSPWNTPLLPVRKSGTSEYRMVQDLREVNKRVETIHPTVPNPYTLLSLLPPDRIWYSVLDLKDAFFCIPLAPESQLIFAFEWADAEEGESGQLTWTRLPQGFKNSPTLFDEALNRDLQGFRLDHPSVSLLQYVDDLLIAADTQAACLSATRDLLMTLAELGYRVSGKKAQLCQEEVTYLGFKIHKGSRSLSNSRTQAILQIPVPKTKRQVREFLGTIGYCRLWIPGFAELAQPLYAATRGGNDPLVWGEKEEEAFQSLKLALTQPPALALPSLDKPFQLFVEETSGAAKGVLTQALGPWKRPVAYLSKRLDPVAAGWPRCLRAIAAAALLTREASKLTFGQDIEITSSHNLESLLRSPPDKWLTNARITQYQVLLLDPPRVRFKQTAALNPATLLPETDDTLPIHHCLDTLDSLTSTRPDLTDQPLAQAEATLFTDGSSYIRDGKRYAGAAVVTLDSVIWAEPLPIGTSAQKAELIALTKALEWSKDKSVNIYTDSRYAFATLHVHGMIYRERGLLTAGGKAIKNAPEILALLTAVWLPKRVAVMHCKGHQKDDAPTSTGNRRADEVAREVAIRPLSTQATISAGKRTADGSEFEKRTADGSEFESPKKKAKVE

SEQ ID NO: 6077 - protein, 2105 aa, synthetic construct
MPAAKRVKLDGGDKKYSIGLDIGTNSVGWAVITDEYKVPSKKFKVLGNTDRHSIKKNLIGALLFDSGETAEATRLKRTARRRYTRRKNRICYLQEIFSNEMAKVDDSFFHRLEESFLVEEDKKHERHPIFGNIVDEVAYHEKYPTIYHLRKKLVDSTDKADLRLIYLALAHMIKFRGHFLIEGDLNPDNSDVDKLFIQLVQTYNQLFEENPINASGVDAKAILSARLSKSRRLENLIAQLPGEKKNGLFGNLIALSLGLTPNFKSNFDLAEDAKLQLSKDTYDDDLDNLLAQIGDQYADLFLAAKNLSDAILLSDILRVNTEITKAPLSASMIKRYDEHHQDLTLLKALVRQQLPEKYKEIFFDQSKNGYAGYIDGGASQEEFYKFIKPILEKMDGTEELLVKLNREDLLRKQRTFDNGSIPHQIHLGELHAILRRQEDFYPFLKDNREKIEKILTFRIPYYVGPLARGNSRFAWMTRKSEETITPWNFEEVVDKGASAQSFIERMTNFDKNLPNEKVLPKHSLLYEYFTVYNELTKVKYVTEGMRKPAFLSGEQKKAIVDLLFKTNRKVTVKQLKEDYFKKIECFDSVEISGVEDRFNASLGTYHDLLKIIKDKDFLDNEENEDILEDIVLTLTLFEDREMIEERLKTYAHLFDDKVMKQLKRRRYTGWGRLSRKLINGIRDKQSGKTILDFLKSDGFANRNFMQLIHDDSLTFKEDIQKAQVSGQGDSLHEHIANLAGSPAIKKGILQTVKVVDELVKVMGRHKPENIVIEMARENQTTQKGQKNSRERMKRIEEGIKELGSQILKEHPVENTQLQNEKLYLYYLQNGRDMYVDQELDINRLSDYDVDHIVPQSFLKDDSIDNKVLTRSDKARGKSDNVPSEEVVKKMKNYWRQLLNAKLITQRKFDNLTKAERGGLSELDKAGFIKRQLVETRQITKHVAQILDSRMNTKYDENDKLIREVKVITLKSKLVSDFRKDFQFYKVREINNYHHAHDAYLNAVVGTALIKKYPKLESEFVYGDYKVYDVRKMIAKSEQEIGKATAKYFFYSNIMNFFKTEITLANGEIRKRPLIETNGETGEIVWDKGRDFATVRKVLSMPQVNIVKKTEVQTGGFSKESILPKRNSDKLIARKKDWDPKKYGGFDSPTVAYSVLVVAKVEKGKSKKLKSVKELLGITIMERSSFEKNPIDFLEAKGYKEVKKDLIIKLPKYSLFELENGRKRMLASAGELQKGNELALPSKYVNFLYLASHYEKLKGSPEDNEQKQLFVEQHKHYLDEIIEQISEFSKRVILADANLDKVLSAYNKHRDKPIREQAENIIHLFTLTNLGAPAAFKYFDTTIDRKRYTSTKEVLDATLIHQSITGLYETRIDLSQLGGDGGGGSGGSGGSGGSGGSGGSGGTAPLEEEYRLFLEAPIQNVTLLEQWKREIPKVWAEINPPGLASTQAPIHVQLLSTALPVRVRQYPITLEAKRSLRETIRKFRAAGILRPVHSPWNTPLLPVRKSGTSEYRMVQDLREVNKRVETIHPTVPNPYTLLSLLPPDRIWYSVLDLKDAFFCIPLAPESQLIFAFEWADAEEGESGQLTWTRLPQGFKNSPTLFNEALNRDLQGFRLDHPSVSLLQYVDDLLIAADTQAACLSATRDLLMTLAELGYRVSGKKAQLCQEEVTYLGFKIHKGSRSLSNSRTQAILQIPVPKTKRQVREFLGTIGYCRLWIPGFAELAQPLYAATRPGNDPLVWGEKEEEAFQSLKLALTQPPALALPSLDKPFQLFVEETSGAAKGVLTQALGPWKRPVAYLSKRLDPVAAGWPRCLRAIAAAALLTREASKLTFGQDIEITSSHNLESLLRSPPDKWLTNARITQYQVLLLDPPRVRFKQTAALNPATLLPETDDTLPIHHCLDTLDSLTSTRPDLTDQPLAQAEATLFTDGSSYIRDGKRYAGAAVVTLDSVIWAEPLPIGTSAQKAELIALTKALEWSKDKSVNIYTDSRYAFATLHVHGMIYRERGWLTAGGKAIKNAPEILALLTAVWLPKRVAVMHCKGHQKDDAPTSTGNRRADEVAREVAIRPLSTQATISAGKRTADGSEFEKRTADGSEFESPKKKAKVE

SEQ ID NO: 6078 - protein, 2105 aa, synthetic construct
MPAAKRVKLDGGDKKYSIGLDIGTNSVGWAVITDEYKVPSKKFKVLGNTDRHSIKKNLIGALLFDSGETAEATRLKRTARRRYTRRKNRICYLQEIFSNEMAKVDDSFFHRLEESFLVEEDKKHERHPIFGNIVDEVAYHEKYPTIYHLRKKLVDSTDKADLRLIYLALAHMIKFRGHFLIEGDLNPDNSDVDKLFIQLVQTYNQLFEENPINASGVDAKAILSARLSKSRRLENLIAQLPGEKKNGLFGNLIALSLGLTPNFKSNFDLAEDAKLQLSKDTYDDDLDNLLAQIGDQYADLFLAAKNLSDAILLSDILRVNTEITKAPLSASMIKRYDEHHQDLTLLKALVRQQLPEKYKEIFFDQSKNGYAGYIDGGASQEEFYKFIKPILEKMDGTEELLVKLNREDLLRKQRTFDNGSIPHQIHLGELHAILRRQEDFYPFLKDNREKIEKILTFRIPYYVGPLARGNSRFAWMTRKSEETITPWNFEEVVDKGASAQSFIERMTNFDKNLPNEKVLPKHSLLYEYFTVYNELTKVKYVTEGMRKPAFLSGEQKKAIVDLLFKTNRKVTVKQLKEDYFKKIECFDSVEISGVEDRFNASLGTYHDLLKIIKDKDFLDNEENEDILEDIVLTLTLFEDREMIEERLKTYAHLFDDKVMKQLKRRRYTGWGRLSRKLINGIRDKQSGKTILDFLKSDGFANRNFMQLIHDDSLTFKEDIQKAQVSGQGDSLHEHIANLAGSPAIKKGILQTVKVVDELVKVMGRHKPENIVIEMARENQTTQKGQKNSRERMKRIEEGIKELGSQILKEHPVENTQLQNEKLYLYYLQNGRDMYVDQELDINRLSDYDVDHIVPQSFLKDDSIDNKVLTRSDKARGKSDNVPSEEVVKKMKNYWRQLLNAKLITQRKFDNLTKAERGGLSELDKAGFIKRQLVETRQITKHVAQILDSRMNTKYDENDKLIREVKVITLKSKLVSDFRKDFQFYKVREINNYHHAHDAYLNAVVGTALIKKYPKLESEFVYGDYKVYDVRKMIAKSEQEIGKATAKYFFYSNIMNFFKTEITLANGEIRKRPLIETNGETGEIVWDKGRDFATVRKVLSMPQVNIVKKTEVQTGGFSKESILPKRNSDKLIARKKDWDPKKYGGFDSPTVAYSVLVVAKVEKGKSKKLKSVKELLGITIMERSSFEKNPIDFLEAKGYKEVKKDLIIKLPKYSLFELENGRKRMLASAGELQKGNELALPSKYVNFLYLASHYEKLKGSPEDNEQKQLFVEQHKHYLDEIIEQISEFSKRVILADANLDKVLSAYNKHRDKPIREQAENIIHLFTLTNLGAPAAFKYFDTTIDRKRYTSTKEVLDATLIHQSITGLYETRIDLSQLGGDGGGGSGGSGGSGGSGGSGGSGGTAPLEEEYRLFLEAPIQNVTLLEQWKREIPKVWAEINPPGLASTQAPIHVQLLSTALPVRVRQYPITLEAKRSLRETIRKFRAAGILRPVHSPWNTPLLPVRKSGTSEYRMVQDLREVNKRVETIHPTVPNPYTLLSLLPPDRIWYSVLDLKDAFFCIPLAPESQLIFAFEWADAEEGESGQLTWTRLPQGFKNSPTLFNEALNRDLQGFRLDHPSVSLLQYVDDLLIAADTQAACLSATRDLLMTLAELGYRVSGKKAQLCQEEVTYLGFKIHKGSRSLSNSRTQAILQIPVPKTKRQVREFLGKIGYCRLFIPGFAELAQPLYAATRPGNDPLVWGEKEEEAFQSLKLALTQPPALALPSLDKPFQLFVEETSGAAKGVLTQALGPWKRPVAYLSKRLDPVAAGWPRCLRAIAAAALLTREASKLTFGQDIEITSSHNLESLLRSPPDKWLTNARITQYQVLLLDPPRVRFKQTAALNPATLLPETDDTLPIHHCLDTLDSLTSTRPDLTDQPLAQAEATLFTDGSSYIRDGKRYAGAAVVTLDSVIWAEPLPIGTSAQKAELIALTKALEWSKDKSVNIYTDSRYAFATLHVHGMIYRERGWLTAGGKAIKNAPEILALLTAVWLPKRVAVMHCKGHQKDDAPTSTGNRRADEVAREVAIRPLSTQATISAGKRTADGSEFEKRTADGSEFESPKKKAKVE

SEQ ID NO: 6079 - protein, 2109 aa, synthetic construct
MPAAKRVKLDGGDKKYSIGLDIGTNSVGWAVITDEYKVPSKKFKVLGNTDRHSIKKNLIGALLFDSGETAEATRLKRTARRRYTRRKNRICYLQEIFSNEMAKVDDSFFHRLEESFLVEEDKKHERHPIFGNIVDEVAYHEKYPTIYHLRKKLVDSTDKADLRLIYLALAHMIKFRGHFLIEGDLNPDNSDVDKLFIQLVQTYNQLFEENPINASGVDAKAILSARLSKSRRLENLIAQLPGEKKNGLFGNLIALSLGLTPNFKSNFDLAEDAKLQLSKDTYDDDLDNLLAQIGDQYADLFLAAKNLSDAILLSDILRVNTEITKAPLSASMIKRYDEHHQDLTLLKALVRQQLPEKYKEIFFDQSKNGYAGYIDGGASQEEFYKFIKPILEKMDGTEELLVKLNREDLLRKQRTFDNGSIPHQIHLGELHAILRRQEDFYPFLKDNREKIEKILTFRIPYYVGPLARGNSRFAWMTRKSEETITPWNFEEVVDKGASAQSFIERMTNFDKNLPNEKVLPKHSLLYEYFTVYNELTKVKYVTEGMRKPAFLSGEQKKAIVDLLFKTNRKVTVKQLKEDYFKKIECFDSVEISGVEDRFNASLGTYHDLLKIIKDKDFLDNEENEDILEDIVLTLTLFEDREMIEERLKTYAHLFDDKVMKQLKRRRYTGWGRLSRKLINGIRDKQSGKTILDFLKSDGFANRNFMQLIHDDSLTFKEDIQKAQVSGQGDSLHEHIANLAGSPAIKKGILQTVKVVDELVKVMGRHKPENIVIEMARENQTTQKGQKNSRERMKRIEEGIKELGSQILKEHPVENTQLQNEKLYLYYLQNGRDMYVDQELDINRLSDYDVDHIVPQSFLKDDSIDNKVLTRSDKARGKSDNVPSEEVVKKMKNYWRQLLNAKLITQRKFDNLTKAERGGLSELDKAGFIKRQLVETRQITKHVAQILDSRMNTKYDENDKLIREVKVITLKSKLVSDFRKDFQFYKVREINNYHHAHDAYLNAVVGTALIKKYPKLESEFVYGDYKVYDVRKMIAKSEQEIGKATAKYFFYSNIMNFFKTEITLANGEIRKRPLIETNGETGEIVWDKGRDFATVRKVLSMPQVNIVKKTEVQTGGFSKESILPKRNSDKLIARKKDWDPKKYGGFDSPTVAYSVLVVAKVEKGKSKKLKSVKELLGITIMERSSFEKNPIDFLEAKGYKEVKKDLIIKLPKYSLFELENGRKRMLASAGELQKGNELALPSKYVNFLYLASHYEKLKGSPEDNEQKQLFVEQHKHYLDEIIEQISEFSKRVILADANLDKVLSAYNKHRDKPIREQAENIIHLFTLTNLGAPAAFKYFDTTIDRKRYTSTKEVLDATLIHQSITGLYETRIDLSQLGGDGGGGSGGSGGSGGSGGSGGSGGTVSLQDEHRLFDIPVTTSLPDVWLQDFPQAWAETGGLGRAKCQAPIIIDLKPTAVPVSIKQYPMSLEAHMGIRQHIIKFLELGVLRPCRSPWNTPLLPVKKPGTQDYRPVQDLREINKRTVDIHPTVPNPYNLLSTLKPDYSWYTVLDLKDAFFCLPLAPQSQELFAFEWKDPERGISGQLTWTRLPQGFKNSPTLFNEALHRDLTDFRTQHPEVTLLQYVDDLLLAAPTKKACTQGTRHLLQELGEKGYRASAKKAQICQTKVTYLGYILSEGKRWLTPGRIETVARIPPPRNPREVREFLGTAGFCRLWIPGFAELAAPLYALTKPSTPFTWQTEHQLAFEALKKALLSAPALGLPDTSKPFTLFLDERQGIAKGVLTQKLGPWKRPVAYLSKKLDPVAAGWPPCLRIMAATAMLVKDSAKLTLGQPLTVITPHTLEAIVRQPPDRWITNARLTHYQALLLDTDRVQFGPPVTLNPATLLPVPENQPSPHDCRQVLAETHGTREDLKDQELPDADHTWYTDGSSYLDSGTRRAGAAVVDGHNTIWAQSLPPGTSAQKAELIALTKALELSKGKKANIYTDSRYAFATAHTHGSIYERRGWLTSEGKEIKNKAEIIALLKALFLPQEVAIIHCPGHQKGQDPVAVGNRQADRVARQAAMAEVLTLATEPDNTSHITAGKRTADGSEFEKRTADGSEFESPKKKAKVE

SEQ ID NO: 6080 - protein, 2094 aa, synthetic construct
MPAAKRVKLDGGDKKYSIGLDIGTNSVGWAVITDEYKVPSKKFKVLGNTDRHSIKKNLIGALLFDSGETAEATRLKRTARRRYTRRKNRICYLQEIFSNEMAKVDDSFFHRLEESFLVEEDKKHERHPIFGNIVDEVAYHEKYPTIYHLRKKLVDSTDKADLRLIYLALAHMIKFRGHFLIEGDLNPDNSDVDKLFIQLVQTYNQLFEENPINASGVDAKAILSARLSKSRRLENLIAQLPGEKKNGLFGNLIALSLGLTPNFKSNFDLAEDAKLQLSKDTYDDDLDNLLAQIGDQYADLFLAAKNLSDAILLSDILRVNTEITKAPLSASMIKRYDEHHQDLTLLKALVRQQLPEKYKEIFFDQSKNGYAGYIDGGASQEEFYKFIKPILEKMDGTEELLVKLNREDLLRKQRTFDNGSIPHQIHLGELHAILRRQEDFYPFLKDNREKIEKILTFRIPYYVGPLARGNSRFAWMTRKSEETITPWNFEEVVDKGASAQSFIERMTNFDKNLPNEKVLPKHSLLYEYFTVYNELTKVKYVTEGMRKPAFLSGEQKKAIVDLLFKTNRKVTVKQLKEDYFKKIECFDSVEISGVEDRFNASLGTYHDLLKIIKDKDFLDNEENEDILEDIVLTLTLFEDREMIEERLKTYAHLFDDKVMKQLKRRRYTGWGRLSRKLINGIRDKQSGKTILDFLKSDGFANRNFMQLIHDDSLTFKEDIQKAQVSGQGDSLHEHIANLAGSPAIKKGILQTVKVVDELVKVMGRHKPENIVIEMARENQTTQKGQKNSRERMKRIEEGIKELGSQILKEHPVENTQLQNEKLYLYYLQNGRDMYVDQELDINRLSDYDVDHIVPQSFLKDDSIDNKVLTRSDKARGKSDNVPSEEVVKKMKNYWRQLLNAKLITQRKFDNLTKAERGGLSELDKAGFIKRQLVETRQITKHVAQILDSRMNTKYDENDKLIREVKVITLKSKLVSDFRKDFQFYKVREINNYHHAHDAYLNAVVGTALIKKYPKLESEFVYGDYKVYDVRKMIAKSEQEIGKATAKYFFYSNIMNFFKTEITLANGEIRKRPLIETNGETGEIVWDKGRDFATVRKVLSMPQVNIVKKTEVQTGGFSKESILPKRNSDKLIARKKDWDPKKYGGFDSPTVAYSVLVVAKVEKGKSKKLKSVKELLGITIMERSSFEKNPIDFLEAKGYKEVKKDLIIKLPKYSLFELENGRKRMLASAGELQKGNELALPSKYVNFLYLASHYEKLKGSPEDNEQKQLFVEQHKHYLDEIIEQISEFSKRVILADANLDKVLSAYNKHRDKPIREQAENIIHLFTLTNLGAPAAFKYFDTTIDRKRYTSTKEVLDATLIHQSITGLYETRIDLSQLGGDGGGGSGGSGGSGGSGGSGGSGGVPWILKKPLELTIKLDLEEQQGTLLNNSILSKKGKEELKQLFEKYSALWQSWENQVGHRRIRPHKIATGTVKPTPQKQYHINPKAKPDIQIVINDLLKQGVLIQKESTMNTPVYPVPKPNGRWRMVLDYRAVNKVTPLIAVQNQHSYGILGSLFKGRYKTTIDLSNGFWAHPIVPEDYWITAFTWQGKQYCWTVLPQGFLNSPGLFTGDVVDLLQGIPNVEVYVDDVYISHDSEKEHLEYLDILFNRLKEAGYIISLKKSNIANSIVDFLGFQITNEGRGLTDTFKEKLENITAPTTLKQLQSILGLLNFARNFIPDFTELIAPLYALIPKSTKNYVPWQIEHSTTLETLITKLNGAEYLQGRKGDKTLIMKVNASYTTGYIRYYNEGEKKPISYVSIVFSKTELKFTELEKLLTTVHKGLLKALDLSMGQNIHVYSPIVSMQNIQKTPQTAKKALASRWLSWLSYLEDPRIRFFYDPQMPALKDLPAVDTGKDNKKHPSNFQHIFYTDGSAITSPTKEGHLNAGMGIVYFINKDGNLQKQQEWSISLGNHTAQFAEIAAFEFALKKCLPLGGNILVVTDSNYVAKAYNEELDVWASNGFVNNRKKPLKHISKWKSVADLKRLRPDVVVTHEPGHQKLDSSPHAYGNNLADQLATQASFKVHAGKRTADGSEFEKRTADGSEFESPKKKAKVE

SEQ ID NO: 6081 - protein, 2180 aa, synthetic construct
MPAAKRVKLDGGDKKYSIGLDIGTNSVGWAVITDEYKVPSKKFKVLGNTDRHSIKKNLIGALLFDSGETAEATRLKRTARRRYTRRKNRICYLQEIFSNEMAKVDDSFFHRLEESFLVEEDKKHERHPIFGNIVDEVAYHEKYPTIYHLRKKLVDSTDKADLRLIYLALAHMIKFRGHFLIEGDLNPDNSDVDKLFIQLVQTYNQLFEENPINASGVDAKAILSARLSKSRRLENLIAQLPGEKKNGLFGNLIALSLGLTPNFKSNFDLAEDAKLQLSKDTYDDDLDNLLAQIGDQYADLFLAAKNLSDAILLSDILRVNTEITKAPLSASMIKRYDEHHQDLTLLKALVRQQLPEKYKEIFFDQSKNGYAGYIDGGASQEEFYKFIKPILEKMDGTEELLVKLNREDLLRKQRTFDNGSIPHQIHLGELHAILRRQEDFYPFLKDNREKIEKILTFRIPYYVGPLARGNSRFAWMTRKSEETITPWNFEEVVDKGASAQSFIERMTNFDKNLPNEKVLPKHSLLYEYFTVYNELTKVKYVTEGMRKPAFLSGEQKKAIVDLLFKTNRKVTVKQLKEDYFKKIECFDSVEISGVEDRFNASLGTYHDLLKIIKDKDFLDNEENEDILEDIVLTLTLFEDREMIEERLKTYAHLFDDKVMKQLKRRRYTGWGRLSRKLINGIRDKQSGKTILDFLKSDGFANRNFMQLIHDDSLTFKEDIQKAQVSGQGDSLHEHIANLAGSPAIKKGILQTVKVVDELVKVMGRHKPENIVIEMARENQTTQKGQKNSRERMKRIEEGIKELGSQILKEHPVENTQLQNEKLYLYYLQNGRDMYVDQELDINRLSDYDVDHIVPQSFLKDDSIDNKVLTRSDKARGKSDNVPSEEVVKKMKNYWRQLLNAKLITQRKFDNLTKAERGGLSELDKAGFIKRQLVETRQITKHVAQILDSRMNTKYDENDKLIREVKVITLKSKLVSDFRKDFQFYKVREINNYHHAHDAYLNAVVGTALIKKYPKLESEFVYGDYKVYDVRKMIAKSEQEIGKATAKYFFYSNIMNFFKTEITLANGEIRKRPLIETNGETGEIVWDKGRDFATVRKVLSMPQVNIVKKTEVQTGGFSKESILPKRNSDKLIARKKDWDPKKYGGFDSPTVAYSVLVVAKVEKGKSKKLKSVKELLGITIMERSSFEKNPIDFLEAKGYKEVKKDLIIKLPKYSLFELENGRKRMLASAGELQKGNELALPSKYVNFLYLASHYEKLKGSPEDNEQKQLFVEQHKHYLDEIIEQISEFSKRVILADANLDKVLSAYNKHRDKPIREQAENIIHLFTLTNLGAPAAFKYFDTTIDRKRYTSTKEVLDATLIHQSITGLYETRIDLSQLGGDGGGGSGGSGGSGGSGGSGGSGGMDLLKPLTVERKGVKIKGYWNSQADITCVPKDLLQGEEPVRQQNVTTIHGTQEGDVYYVNLKIDGRRINTEVIGTTLDYAIITPGDVPWILKKPLELTIKLDLEEQQGTLLNNSILSKKGKEELKQLFEKYSALWQSWENQVGHRRIRPHKIATGTVKPTPQKQYHINPKAKPDIQIVINDLLKQGVLIQKESTMNTPVYPVPKPNGRWRMVLDYRAVNKVTPLIAVQNQHSYGILGSLFKGRYKTTIDLSNGFWAHPIVPEDYWITAFTWQGKQYCWTVLPQGFLNSPGLFNGDVVDLLQGIPNVEVYVDDVYISHDSEKEHLEYLDILFNRLKEAGYIISLKKSNIANSIVDFLGFQITNEGRGLTDTFKEKLENITAPTTLKQLQSILGLLNFARNFIPDFTELIAPLYALIPKSPKNYVPWQIEHSTTLETLITKLNGAEYLQGRKGDKTLIMKVNASYTTGYIRYYNEGEKKPISYVSIVFSKTELKFTELEKLLTTVHKGLLKALDLSMGQNIHVYSPIVSMQNIQKTPQTAKKALASRWLSWLSYLEDPRIRFFYDPQMPALKDLPAVDTGKDNKKHPSNFQHIFYTDGSAITSPTKEGHLNAGMGIVYFINKDGNLQKQQEWSISLGNHTAQFAEIAAFEFALKKCLPLGGNILVVTDSNYVAKAYNEELDVWASNGFVNNRKKPLKHISKWKSVADLKRLRPDVVVTHEPGHQKLDSSPHAYGNNLADQLATQASFKVHAGKRTADGSEFEKRTADGSEFESPKKKAKVE

SEQ ID NO: 6082 - protein, 2102 aa, synthetic construct
MPAAKRVKLDGGDKKYSIGLDIGTNSVGWAVITDEYKVPSKKFKVLGNTDRHSIKKNLIGALLFDSGETAEATRLKRTARRRYTRRKNRICYLQEIFSNEMAKVDDSFFHRLEESFLVEEDKKHERHPIFGNIVDEVAYHEKYPTIYHLRKKLVDSTDKADLRLIYLALAHMIKFRGHFLIEGDLNPDNSDVDKLFIQLVQTYNQLFEENPINASGVDAKAILSARLSKSRRLENLIAQLPGEKKNGLFGNLIALSLGLTPNFKSNFDLAEDAKLQLSKDTYDDDLDNLLAQIGDQYADLFLAAKNLSDAILLSDILRVNTEITKAPLSASMIKRYDEHHQDLTLLKALVRQQLPEKYKEIFFDQSKNGYAGYIDGGASQEEFYKFIKPILEKMDGTEELLVKLNREDLLRKQRTFDNGSIPHQIHLGELHAILRRQEDFYPFLKDNREKIEKILTFRIPYYVGPLARGNSRFAWMTRKSEETITPWNFEEVVDKGASAQSFIERMTNFDKNLPNEKVLPKHSLLYEYFTVYNELTKVKYVTEGMRKPAFLSGEQKKAIVDLLFKTNRKVTVKQLKEDYFKKIECFDSVEISGVEDRFNASLGTYHDLLKIIKDKDFLDNEENEDILEDIVLTLTLFEDREMIEERLKTYAHLFDDKVMKQLKRRRYTGWGRLSRKLINGIRDKQSGKTILDFLKSDGFANRNFMQLIHDDSLTFKEDIQKAQVSGQGDSLHEHIANLAGSPAIKKGILQTVKVVDELVKVMGRHKPENIVIEMARENQTTQKGQKNSRERMKRIEEGIKELGSQILKEHPVENTQLQNEKLYLYYLQNGRDMYVDQELDINRLSDYDVDHIVPQSFLKDDSIDNKVLTRSDKARGKSDNVPSEEVVKKMKNYWRQLLNAKLITQRKFDNLTKAERGGLSELDKAGFIKRQLVETRQITKHVAQILDSRMNTKYDENDKLIREVKVITLKSKLVSDFRKDFQFYKVREINNYHHAHDAYLNAVVGTALIKKYPKLESEFVYGDYKVYDVRKMIAKSEQEIGKATAKYFFYSNIMNFFKTEITLANGEIRKRPLIETNGETGEIVWDKGRDFATVRKVLSMPQVNIVKKTEVQTGGFSKESILPKRNSDKLIARKKDWDPKKYGGFDSPTVAYSVLVVAKVEKGKSKKLKSVKELLGITIMERSSFEKNPIDFLEAKGYKEVKKDLIIKLPKYSLFELENGRKRMLASAGELQKGNELALPSKYVNFLYLASHYEKLKGSPEDNEQKQLFVEQHKHYLDEIIEQISEFSKRVILADANLDKVLSAYNKHRDKPIREQAENIIHLFTLTNLGAPAAFKYFDTTIDRKRYTSTKEVLDATLIHQSITGLYETRIDLSQLGGDGGGGSGGSGGSGGSGGSGGSGGTLQLEEEYRLFEPESTQKQEMDIWLKNFPQAWAETGGMGTAHCQAPVLIQLKATATPISIRQYPMPHEAYQGIKPHIRRMLDQGILKPCQSPWNTPLLPVKKPGTEDYRPVQDLREVNKRVEDIHPTVPNPYNLLSTLPPSHPWYTVLDLKDAFFCLRLHSESQLLFAFEWRDPEIGLSGQLTWTRLPQGFKNSPTLFNEALHSDLADFRVRYPALVLLQYVDDLLLAAATRTECLEGTKALLETLGNKGYRASAKKAQICLQEVTYLGYSLKDGQRWLTKARKEAILSIPVPKNSRQVREFLGKAGYCRLFIPGFAELAAPLYPLTRPGTLFQWGTEQQLAFEDIKKALLSSPALGLPDITKPFELFIDENSGFAKGVLVQKLGPWKRPVAYLSKKLDTVASGWPPCLRMVAAIAILVKDAGKLTLGQPLTILTSHPVEALVRQPPNKWLSNARMTHYQAMLLDAERVHFGPTVSLNPATLLPLPSGGNHHDCLQILAETHGTRPDLTDQPLPDADLTWYTDGSSFIRNGEREAGAAVTTESEVIWAAPLPPGTSAQRAELIALTQALKMAEGKKLTVYTDSRYAFATTHVHGEIYRRRGWLTSEGKEIKNKNEILALLEALFLPKRLSIIHCPGHQKGDSPQAKGNRLADDTAKKAATETHSSLTVLPAGKRTADGSEFEKRTADGSEFESPKKKAKVE

SEQ ID NO: 6083 - protein, 2094 aa, synthetic construct
MPAAKRVKLDGGDKKYSIGLDIGTNSVGWAVITDEYKVPSKKFKVLGNTDRHSIKKNLIGALLFDSGETAEATRLKRTARRRYTRRKNRICYLQEIFSNEMAKVDDSFFHRLEESFLVEEDKKHERHPIFGNIVDEVAYHEKYPTIYHLRKKLVDSTDKADLRLIYLALAHMIKFRGHFLIEGDLNPDNSDVDKLFIQLVQTYNQLFEENPINASGVDAKAILSARLSKSRRLENLIAQLPGEKKNGLFGNLIALSLGLTPNFKSNFDLAEDAKLQLSKDTYDDDLDNLLAQIGDQYADLFLAAKNLSDAILLSDILRVNTEITKAPLSASMIKRYDEHHQDLTLLKALVRQQLPEKYKEIFFDQSKNGYAGYIDGGASQEEFYKFIKPILEKMDGTEELLVKLNREDLLRKQRTFDNGSIPHQIHLGELHAILRRQEDFYPFLKDNREKIEKILTFRIPYYVGPLARGNSRFAWMTRKSEETITPWNFEEVVDKGASAQSFIERMTNFDKNLPNEKVLPKHSLLYEYFTVYNELTKVKYVTEGMRKPAFLSGEQKKAIVDLLFKTNRKVTVKQLKEDYFKKIECFDSVEISGVEDRFNASLGTYHDLLKIIKDKDFLDNEENEDILEDIVLTLTLFEDREMIEERLKTYAHLFDDKVMKQLKRRRYTGWGRLSRKLINGIRDKQSGKTILDFLKSDGFANRNFMQLIHDDSLTFKEDIQKAQVSGQGDSLHEHIANLAGSPAIKKGILQTVKVVDELVKVMGRHKPENIVIEMARENQTTQKGQKNSRERMKRIEEGIKELGSQILKEHPVENTQLQNEKLYLYYLQNGRDMYVDQELDINRLSDYDVDHIVPQSFLKDDSIDNKVLTRSDKARGKSDNVPSEEVVKKMKNYWRQLLNAKLITQRKFDNLTKAERGGLSELDKAGFIKRQLVETRQITKHVAQILDSRMNTKYDENDKLIREVKVITLKSKLVSDFRKDFQFYKVREINNYHHAHDAYLNAVVGTALIKKYPKLESEFVYGDYKVYDVRKMIAKSEQEIGKATAKYFFYSNIMNFFKTEITLANGEIRKRPLIETNGETGEIVWDKGRDFATVRKVLSMPQVNIVKKTEVQTGGFSKESILPKRNSDKLIARKKDWDPKKYGGFDSPTVAYSVLVVAKVEKGKSKKLKSVKELLGITIMERSSFEKNPIDFLEAKGYKEVKKDLIIKLPKYSLFELENGRKRMLASAGELQKGNELALPSKYVNFLYLASHYEKLKGSPEDNEQKQLFVEQHKHYLDEIIEQISEFSKRVILADANLDKVLSAYNKHRDKPIREQAENIIHLFTLTNLGAPAAFKYFDTTIDRKRYTSTKEVLDATLIHQSITGLYETRIDLSQLGGDGGGGSGGSGGSGGSGGSGGSGGVPWLTQQPLQLTILVPLQEYQEKILSKTALPEDQKQQLKTLFVKYDNLWQHWENQVGHRKIRPHNIATGDYPPRPQKQYPINPKAKPSIQIVIDDLLKQGVLTPQNSTMNTPVYPVPKPDGRWRMVLDYREVNKTIPLTAAQNQHSAGILATIVRQKYKTTLDLANGFWAHPITPESYWLTAFTWQGKQYCWTRLPQGFLNSPALFNADVVDLLKEIPNVQVYVDDIYLSHDDPKEHVQQLEKVFQILLQAGYVVSLKKSEIGQKTVEFLGFNITKEGRGLTDTFKTKLLNITPPKDLKQLQSILGLLNFARNFIPNFAELVQPLYNLIAPAKGKYIEWSEENTKQLNMVIEALNTASNLEERLPEQRLVIKVNTSPSAGYVRYYNETGKKPIMYLNYVFSKAELKFSMLEKLLTTMHKALIKAMDLAMGQEILVYSPIVSMTKIQKTPLPERKALPIRWITWMTYLEDPRIQFHYDKTLPELKHIPDVYTSSQSPVKHPSQYEGVFYTDGSAIKSPDPTKSNNAGMGIVHATYKPEYQVLNQWSIPLGNHTAQMAEIAAVEFACKKALKIPGPVLVITDSFYVAESANKELPYWKSNGFVNNKKKPLKHISKWKSIAECLSMKPDITIQHEKGISLQIPVFILKGNALADKLATQGSYVVNAGKRTADGSEFEKRTADGSEFESPKKKAKVE

SEQ ID NO: 6084 - protein, 2101 aa, synthetic construct
MPAAKRVKLDGGDKKYSIGLDIGTNSVGWAVITDEYKVPSKKFKVLGNTDRHSIKKNLIGALLFDSGETAEATRLKRTARRRYTRRKNRICYLQEIFSNEMAKVDDSFFHRLEESFLVEEDKKHERHPIFGNIVDEVAYHEKYPTIYHLRKKLVDSTDKADLRLIYLALAHMIKFRGHFLIEGDLNPDNSDVDKLFIQLVQTYNQLFEENPINASGVDAKAILSARLSKSRRLENLIAQLPGEKKNGLFGNLIALSLGLTPNFKSNFDLAEDAKLQLSKDTYDDDLDNLLAQIGDQYADLFLAAKNLSDAILLSDILRVNTEITKAPLSASMIKRYDEHHQDLTLLKALVRQQLPEKYKEIFFDQSKNGYAGYIDGGASQEEFYKFIKPILEKMDGTEELLVKLNREDLLRKQRTFDNGSIPHQIHLGELHAILRRQEDFYPFLKDNREKIEKILTFRIPYYVGPLARGNSRFAWMTRKSEETITPWNFEEVVDKGASAQSFIERMTNFDKNLPNEKVLPKHSLLYEYFTVYNELTKVKYVTEGMRKPAFLSGEQKKAIVDLLFKTNRKVTVKQLKEDYFKKIECFDSVEISGVEDRFNASLGTYHDLLKIIKDKDFLDNEENEDILEDIVLTLTLFEDREMIEERLKTYAHLFDDKVMKQLKRRRYTGWGRLSRKLINGIRDKQSGKTILDFLKSDGFANRNFMQLIHDDSLTFKEDIQKAQVSGQGDSLHEHIANLAGSPAIKKGILQTVKVVDELVKVMGRHKPENIVIEMARENQTTQKGQKNSRERMKRIEEGIKELGSQILKEHPVENTQLQNEKLYLYYLQNGRDMYVDQELDINRLSDYDVDHIVPQSFLKDDSIDNKVLTRSDKARGKSDNVPSEEVVKKMKNYWRQLLNAKLITQRKFDNLTKAERGGLSELDKAGFIKRQLVETRQITKHVAQILDSRMNTKYDENDKLIREVKVITLKSKLVSDFRKDFQFYKVREINNYHHAHDAYLNAVVGTALIKKYPKLESEFVYGDYKVYDVRKMIAKSEQEIGKATAKYFFYSNIMNFFKTEITLANGEIRKRPLIETNGETGEIVWDKGRDFATVRKVLSMPQVNIVKKTEVQTGGFSKESILPKRNSDKLIARKKDWDPKKYGGFDSPTVAYSVLVVAKVEKGKSKKLKSVKELLGITIMERSSFEKNPIDFLEAKGYKEVKKDLIIKLPKYSLFELENGRKRMLASAGELQKGNELALPSKYVNFLYLASHYEKLKGSPEDNEQKQLFVEQHKHYLDEIIEQISEFSKRVILADANLDKVLSAYNKHRDKPIREQAENIIHLFTLTNLGAPAAFKYFDTTIDRKRYTSTKEVLDATLIHQSITGLYETRIDLSQLGGDGGGGSGGSGGSGGSGGSGGSGGVLNLEEEYRLHEKPVPSSIDPSWLQLFPTVWAERAGMGLANQVPPVVVELRSGASPVAVRQYPMSKEAREGIRPHIQKFLDLGVLVPCRSPWNTPLLPVKKPGTNDYRPVQDLREINKRVQDIHPTVPNPYNLLSSLPPSYTWYSVLDLKDAFFCLRLHPNSQPLFAFEWKDPEKGNTGQLTWTRLPQGFKNSPTLFNEALHRDLAPFRALNPQVVLLQYVDDLLVAAPTYEDCKKGTQKLLQELSKLGYRVSAKKAQLCQREVTYLGYLLKEGKRWLTPARKATVMKIPVPTTPRQVREFLGKAGFCRLFIPGFASLAAPLYPLTKPSIPFIWTEEHQQAFDHIKKALLSAPALALPDLTKPFTLYIDERAGVARGVLTQTLGPWRRPVAYLSKKLDPVASGWPTCLKAVAAVALLLKDADKLTLGQNVTVIASHSLESIVRQPPDRWMTNARMTHYQSLLLNERVSFAPPAVLNPATLLPVESEATPVHRCSEILAEETGTRRDLEDQPLPGVPTWYTDGSSFITEGKRRAGAPIVDGKRTVWASSLPEGTSAQKAELVALTQALRLAEGKNINIYTDSRYAFATAHIHGAIYKQRGWLTSAGKDIKNKEEILALLEAIHLPRRVAIIHCPGHQRGSNPVATGNRRADEAAKQAALSTRVLAGTTKPAGKRTADGSEFEKRTADGSEFESPKKKAKVE

SEQ ID NO: 6085 - protein, 2020 aa, synthetic construct
MPAAKRVKLDGGDKKYSIGLDIGTNSVGWAVITDEYKVPSKKFKVLGNTDRHSIKKNLIGALLFDSGETAEATRLKRTARRRYTRRKNRICYLQEIFSNEMAKVDDSFFHRLEESFLVEEDKKHERHPIFGNIVDEVAYHEKYPTIYHLRKKLVDSTDKADLRLIYLALAHMIKFRGHFLIEGDLNPDNSDVDKLFIQLVQTYNQLFEENPINASGVDAKAILSARLSKSRRLENLIAQLPGEKKNGLFGNLIALSLGLTPNFKSNFDLAEDAKLQLSKDTYDDDLDNLLAQIGDQYADLFLAAKNLSDAILLSDILRVNTEITKAPLSASMIKRYDEHHQDLTLLKALVRQQLPEKYKEIFFDQSKNGYAGYIDGGASQEEFYKFIKPILEKMDGTEELLVKLNREDLLRKQRTFDNGSIPHQIHLGELHAILRRQEDFYPFLKDNREKIEKILTFRIPYYVGPLARGNSRFAWMTRKSEETITPWNFEEVVDKGASAQSFIERMTNFDKNLPNEKVLPKHSLLYEYFTVYNELTKVKYVTEGMRKPAFLSGEQKKAIVDLLFKTNRKVTVKQLKEDYFKKIECFDSVEISGVEDRFNASLGTYHDLLKIIKDKDFLDNEENEDILEDIVLTLTLFEDREMIEERLKTYAHLFDDKVMKQLKRRRYTGWGRLSRKLINGIRDKQSGKTILDFLKSDGFANRNFMQLIHDDSLTFKEDIQKAQVSGQGDSLHEHIANLAGSPAIKKGILQTVKVVDELVKVMGRHKPENIVIEMARENQTTQKGQKNSRERMKRIEEGIKELGSQILKEHPVENTQLQNEKLYLYYLQNGRDMYVDQELDINRLSDYDVDHIVPQSFLKDDSIDNKVLTRSDKARGKSDNVPSEEVVKKMKNYWRQLLNAKLITQRKFDNLTKAERGGLSELDKAGFIKRQLVETRQITKHVAQILDSRMNTKYDENDKLIREVKVITLKSKLVSDFRKDFQFYKVREINNYHHAHDAYLNAVVGTALIKKYPKLESEFVYGDYKVYDVRKMIAKSEQEIGKATAKYFFYSNIMNFFKTEITLANGEIRKRPLIETNGETGEIVWDKGRDFATVRKVLSMPQVNIVKKTEVQTGGFSKESILPKRNSDKLIARKKDWDPKKYGGFDSPTVAYSVLVVAKVEKGKSKKLKSVKELLGITIMERSSFEKNPIDFLEAKGYKEVKKDLIIKLPKYSLFELENGRKRMLASAGELQKGNELALPSKYVNFLYLASHYEKLKGSPEDNEQKQLFVEQHKHYLDEIIEQISEFSKRVILADANLDKVLSAYNKHRDKPIREQAENIIHLFTLTNLGAPAAFKYFDTTIDRKRYTSTKEVLDATLIHQSITGLYETRIDLSQLGGDGGGGSGGSGGSGGSGGSGGSGGAVLGLEHLPRPPQISQFPLNPERLQALQHLVRKALEAGHIEPYTGPGNNPVFPVKKANGTWRFIHDLRATNSLTIDLSSSSPGPPDLSSLPTTLAHLQTIDLRDAFFQIPLPKQFQPYFAFTVPQQCNYGPGTRYAWKVLPQGFKNSPTLFEMQLAHILQPIRQAFPQCTILQYMDDILLASPSHEDLLLLSEATMASLISHGLPVSENKTQQTPGTIKFLGQIISPNHLTYDAVPTVPIRSRWALPELQALLGEIQWVSKGTPTLRQPLHSLYCALQRHTDPRDQIYLNPSQVQSLVQLRQALSQNCRSRLVQTLPLLGAIMLTLTGTTTVVFQSKEQWPLVWLHAPLPHTSQCPWGQLLASAVLLLDKYTLQSYGLLCQTIHHNISTQTFNQFIQTSDHPSVPILLHHSHRFKNLGAQTGELWNTFLKTAAPLAPVKALMPVFTLSPVIINTAPCLFSDGSTSRAAYILWDKQILSQRSFPLPPPHKSAQRAELLGLLHGLSSARSWRCLNIFLDSKYLYHYLRTLALGTFQGRSSQAPFQALLPRLLSRKVVYLHHVRSHTNLPDPISRLNALTDALLITPVLQLAGKRTADGSEFEKRTADGSEFESPKKKAKVE

SEQ ID NO: 6086 - protein, 2016 aa, synthetic construct
MPAAKRVKLDGGDKKYSIGLDIGTNSVGWAVITDEYKVPSKKFKVLGNTDRHSIKKNLIGALLFDSGETAEATRLKRTARRRYTRRKNRICYLQEIFSNEMAKVDDSFFHRLEESFLVEEDKKHERHPIFGNIVDEVAYHEKYPTIYHLRKKLVDSTDKADLRLIYLALAHMIKFRGHFLIEGDLNPDNSDVDKLFIQLVQTYNQLFEENPINASGVDAKAILSARLSKSRRLENLIAQLPGEKKNGLFGNLIALSLGLTPNFKSNFDLAEDAKLQLSKDTYDDDLDNLLAQIGDQYADLFLAAKNLSDAILLSDILRVNTEITKAPLSASMIKRYDEHHQDLTLLKALVRQQLPEKYKEIFFDQSKNGYAGYIDGGASQEEFYKFIKPILEKMDGTEELLVKLNREDLLRKQRTFDNGSIPHQIHLGELHAILRRQEDFYPFLKDNREKIEKILTFRIPYYVGPLARGNSRFAWMTRKSEETITPWNFEEVVDKGASAQSFIERMTNFDKNLPNEKVLPKHSLLYEYFTVYNELTKVKYVTEGMRKPAFLSGEQKKAIVDLLFKTNRKVTVKQLKEDYFKKIECFDSVEISGVEDRFNASLGTYHDLLKIIKDKDFLDNEENEDILEDIVLTLTLFEDREMIEERLKTYAHLFDDKVMKQLKRRRYTGWGRLSRKLINGIRDKQSGKTILDFLKSDGFANRNFMQLIHDDSLTFKEDIQKAQVSGQGDSLHEHIANLAGSPAIKKGILQTVKVVDELVKVMGRHKPENIVIEMARENQTTQKGQKNSRERMKRIEEGIKELGSQILKEHPVENTQLQNEKLYLYYLQNGRDMYVDQELDINRLSDYDVDHIVPQSFLKDDSIDNKVLTRSDKARGKSDNVPSEEVVKKMKNYWRQLLNAKLITQRKFDNLTKAERGGLSELDKAGFIKRQLVETRQITKHVAQILDSRMNTKYDENDKLIREVKVITLKSKLVSDFRKDFQFYKVREINNYHHAHDAYLNAVVGTALIKKYPKLESEFVYGDYKVYDVRKMIAKSEQEIGKATAKYFFYSNIMNFFKTEITLANGEIRKRPLIETNGETGEIVWDKGRDFATVRKVLSMPQVNIVKKTEVQTGGFSKESILPKRNSDKLIARKKDWDPKKYGGFDSPTVAYSVLVVAKVEKGKSKKLKSVKELLGITIMERSSFEKNPIDFLEAKGYKEVKKDLIIKLPKYSLFELENGRKRMLASAGELQKGNELALPSKYVNFLYLASHYEKLKGSPEDNEQKQLFVEQHKHYLDEIIEQISEFSKRVILADANLDKVLSAYNKHRDKPIREQAENIIHLFTLTNLGAPAAFKYFDTTIDRKRYTSTKEVLDATLIHQSITGLYETRIDLSQLGGDGGGGSGGSGGSGGSGGSGGSGGGLEHLPPPPEVSQFPLNPERLQALTDLVSRALEAKHIEPYQGPGNNPIFPVKKPNGKWRFIHDLRATNSLTRDLASPSPGPPDLTSPPQDLPHLRTIDLTDAFFQIPLPAVFQPYFAFTLPQPNNHGPGTRYSWRVLPQGFKNSPTLFQQQLSHILAPVRKAFPNSLIIQYMDDILLASPALRELTALTDKVTNALTKEGLPMSLEKTQATPGSIHFLGQVISPDCITYETLPSIHVKSIWSLAELQSMLGELQWVSKGTPVLRSSLHQLYLALRGHRDPRDTIELTSTQVQALKTIQKALALNCRSRLVSQLPILALIILRPTGTTAVLFQTKQKWPLVWLHTPHPATSLRPWGQLLANAIITLDKYSLQHYGQICKSFHHNISNQALTYYLHTSDQSSVAILLQHSHRFHNLGAQPSGPWRSLLQVPQIFQNIDVLRPPFIISPVVIDHAPCLFSDGATSKAAFILWDKQVIHQQVLPLPSTCSAQAGELFGLLAGLQKSKPWPALNIFLDSKFLIGHLRRMAWGAFLGPSTQCDLHARLFPLLQGKTVYVHHVRSHTLLQDPISRLNEATDALMLAPLLPLAGKRTADGSEFEKRTADGSEFESPKKKAKVE

SEQ ID NO: 6087 - protein, 2013 aa, synthetic construct
MPAAKRVKLDGGDKKYSIGLDIGTNSVGWAVITDEYKVPSKKFKVLGNTDRHSIKKNLIGALLFDSGETAEATRLKRTARRRYTRRKNRICYLQEIFSNEMAKVDDSFFHRLEESFLVEEDKKHERHPIFGNIVDEVAYHEKYPTIYHLRKKLVDSTDKADLRLIYLALAHMIKFRGHFLIEGDLNPDNSDVDKLFIQLVQTYNQLFEENPINASGVDAKAILSARLSKSRRLENLIAQLPGEKKNGLFGNLIALSLGLTPNFKSNFDLAEDAKLQLSKDTYDDDLDNLLAQIGDQYADLFLAAKNLSDAILLSDILRVNTEITKAPLSASMIKRYDEHHQDLTLLKALVRQQLPEKYKEIFFDQSKNGYAGYIDGGASQEEFYKFIKPILEKMDGTEELLVKLNREDLLRKQRTFDNGSIPHQIHLGELHAILRRQEDFYPFLKDNREKIEKILTFRIPYYVGPLARGNSRFAWMTRKSEETITPWNFEEVVDKGASAQSFIERMTNFDKNLPNEKVLPKHSLLYEYFTVYNELTKVKYVTEGMRKPAFLSGEQKKAIVDLLFKTNRKVTVKQLKEDYFKKIECFDSVEISGVEDRFNASLGTYHDLLKIIKDKDFLDNEENEDILEDIVLTLTLFEDREMIEERLKTYAHLFDDKVMKQLKRRRYTGWGRLSRKLINGIRDKQSGKTILDFLKSDGFANRNFMQLIHDDSLTFKEDIQKAQVSGQGDSLHEHIANLAGSPAIKKGILQTVKVVDELVKVMGRHKPENIVIEMARENQTTQKGQKNSRERMKRIEEGIKELGSQILKEHPVENTQLQNEKLYLYYLQNGRDMYVDQELDINRLSDYDVDHIVPQSFLKDDSIDNKVLTRSDKARGKSDNVPSEEVVKKMKNYWRQLLNAKLITQRKFDNLTKAERGGLSELDKAGFIKRQLVETRQITKHVAQILDSRMNTKYDENDKLIREVKVITLKSKLVSDFRKDFQFYKVREINNYHHAHDAYLNAVVGTALIKKYPKLESEFVYGDYKVYDVRKMIAKSEQEIGKATAKYFFYSNIMNFFKTEITLANGEIRKRPLIETNGETGEIVWDKGRDFATVRKVLSMPQVNIVKKTEVQTGGFSKESILPKRNSDKLIARKKDWDPKKYGGFDSPTVAYSVLVVAKVEKGKSKKLKSVKELLGITIMERSSFEKNPIDFLEAKGYKEVKKDLIIKLPKYSLFELENGRKRMLASAGELQKGNELALPSKYVNFLYLASHYEKLKGSPEDNEQKQLFVEQHKHYLDEIIEQISEFSKRVILADANLDKVLSAYNKHRDKPIREQAENIIHLFTLTNLGAPAAFKYFDTTIDRKRYTSTKEVLDATLIHQSITGLYETRIDLSQLGGDGGGGSGGSGGSGGSGGSGGSGGPLGTSDSPVTHADPIDWKSEEPVWVDQWPLTQEKLSAAQQLVQEQLRLGHIEPSTSAWNSPIFVIKKKSGKWRLLQDLRKVNETMMHMGALQPGLPTPSPIPDKSYIIVIDLKDCFYTIPLAPQDCKRFAFSLPSVNFKEPMQRYQWRVLPQGMTNSPTLCQKFVATAIAPVRQRFPQLYLVHYMDDILLAHTDEHLLYQAFSILKQHLSLNGLVIADEKIQTHFPYNYLGFSLYPRVYNTQLVKLQTDHLKTLNDFQKLLGDINWIRPYLKLPTYTLQPLFDILKGDSDPASPRTLSLEGRTALQSIEEAIRQQQITYCDYQRSWGLYILPTPRAPTGVLYQDKPLRWIYLSATPTKHLLPYYELVAKIIAKGRHEAIQYFGMEPPFICVPYALEQQDWLFQFSDNWSIAFANYPGQITHHYPSDKLLQFASSHAFIFPKIVRRQPIPEATLIFTDGSSNGTAALIINHQTYYAQTSFSSAQVVELFAVHQALLTVPTSFNLFTDSSYVVGALQMIETVPIIGTTSPEVLNLFTLIQQVLHCRQHPCFFGHIRAHSTLPGALVQGNHTADVLTKQVFFQSAGKRTADGSEFEKRTADGSEFESPKKKAKVE

SEQ ID NO: 6088 - protein, 2134 aa, synthetic construct
MPAAKRVKLDGGDKKYSIGLDIGTNSVGWAVITDEYKVPSKKFKVLGNTDRHSIKKNLIGALLFDSGETAEATRLKRTARRRYTRRKNRICYLQEIFSNEMAKVDDSFFHRLEESFLVEEDKKHERHPIFGNIVDEVAYHEKYPTIYHLRKKLVDSTDKADLRLIYLALAHMIKFRGHFLIEGDLNPDNSDVDKLFIQLVQTYNQLFEENPINASGVDAKAILSARLSKSRRLENLIAQLPGEKKNGLFGNLIALSLGLTPNFKSNFDLAEDAKLQLSKDTYDDDLDNLLAQIGDQYADLFLAAKNLSDAILLSDILRVNTEITKAPLSASMIKRYDEHHQDLTLLKALVRQQLPEKYKEIFFDQSKNGYAGYIDGGASQEEFYKFIKPILEKMDGTEELLVKLNREDLLRKQRTFDNGSIPHQIHLGELHAILRRQEDFYPFLKDNREKIEKILTFRIPYYVGPLARGNSRFAWMTRKSEETITPWNFEEVVDKGASAQSFIERMTNFDKNLPNEKVLPKHSLLYEYFTVYNELTKVKYVTEGMRKPAFLSGEQKKAIVDLLFKTNRKVTVKQLKEDYFKKIECFDSVEISGVEDRFNASLGTYHDLLKIIKDKDFLDNEENEDILEDIVLTLTLFEDREMIEERLKTYAHLFDDKVMKQLKRRRYTGWGRLSRKLINGIRDKQSGKTILDFLKSDGFANRNFMQLIHDDSLTFKEDIQKAQVSGQGDSLHEHIANLAGSPAIKKGILQTVKVVDELVKVMGRHKPENIVIEMARENQTTQKGQKNSRERMKRIEEGIKELGSQILKEHPVENTQLQNEKLYLYYLQNGRDMYVDQELDINRLSDYDVDHIVPQSFLKDDSIDNKVLTRSDKARGKSDNVPSEEVVKKMKNYWRQLLNAKLITQRKFDNLTKAERGGLSELDKAGFIKRQLVETRQITKHVAQILDSRMNTKYDENDKLIREVKVITLKSKLVSDFRKDFQFYKVREINNYHHAHDAYLNAVVGTALIKKYPKLESEFVYGDYKVYDVRKMIAKSEQEIGKATAKYFFYSNIMNFFKTEITLANGEIRKRPLIETNGETGEIVWDKGRDFATVRKVLSMPQVNIVKKTEVQTGGFSKESILPKRNSDKLIARKKDWDPKKYGGFDSPTVAYSVLVVAKVEKGKSKKLKSVKELLGITIMERSSFEKNPIDFLEAKGYKEVKKDLIIKLPKYSLFELENGRKRMLASAGELQKGNELALPSKYVNFLYLASHYEKLKGSPEDNEQKQLFVEQHKHYLDEIIEQISEFSKRVILADANLDKVLSAYNKHRDKPIREQAENIIHLFTLTNLGAPAAFKYFDTTIDRKRYTSTKEVLDATLIHQSITGLYETRIDLSQLGGDGGGGSGGSGGSGGSGGSGGSGGLLGRDLLTKLKAQIQFSTEGPQVTWEDRPAMCLVLNLEEEYRLHEKPVPPSIDPSWLQLFPMVWAEKAGMGLANQVPPVVVELKSDASPVAVRQYPMSKEAREGIRPHIQRFLDLGILVPCQSPWNTPLLPVKKPGTNDYRPVQDLREVNKRVQDIHPTVPNPYNLLSSLPPSHTWYSVLDLKDAFFCLKLHPNSQPLFAFEWRDPEKGNTGQLTWTRLPQGFKNSPTLFNEALHRDLASFRALNPQVVMLQYVDDLLVAAPTYRDCKEGTRRLLQELSKLGYRVSAKKAQLCREEVTYLGYLLKGGKRWLTPARKATVMKIPTPTTPRQVREFLGKAGFCRLFIPGFASLAAPLYPLTRPKVPFTWTEAHQEAFGRIKEALLSAPALALPDLTKPFALYVDEKEGVARGVLTQTLGPWRRPVAYLSKKLDPVASGWPTCLKAIAAVALLLKDADKLTLGQNVLVIAPHNLESIVRQPPDRWMTNARMTHYQSLLLNERVSFAPPAILNPATLLPVESDDTPIHICSEILAEETGTRPDLRDQPLPGVPAWYTDGSSFIMDGRRQAGAAIVDNKRTVWASNLPEGTSAQKAELIALTQALRLAEGKSINIYTDSRYAFATAHVHGAIYKQRGWLTSAGKDIKNKEEILALLEAIHLPKRVAIIHCPGHQRGTDPVATGNRKADEAAKQAAQSTRILTETTKNAGKRTADGSEFEKRTADGSEFESPKKKAKVE

SEQ ID NO: 6089 - protein, 2225 aa, synthetic construct
MPAAKRVKLDGGDKKYSIGLDIGTNSVGWAVITDEYKVPSKKFKVLGNTDRHSIKKNLIGALLFDSGETAEATRLKRTARRRYTRRKNRICYLQEIFSNEMAKVDDSFFHRLEESFLVEEDKKHERHPIFGNIVDEVAYHEKYPTIYHLRKKLVDSTDKADLRLIYLALAHMIKFRGHFLIEGDLNPDNSDVDKLFIQLVQTYNQLFEENPINASGVDAKAILSARLSKSRRLENLIAQLPGEKKNGLFGNLIALSLGLTPNFKSNFDLAEDAKLQLSKDTYDDDLDNLLAQIGDQYADLFLAAKNLSDAILLSDILRVNTEITKAPLSASMIKRYDEHHQDLTLLKALVRQQLPEKYKEIFFDQSKNGYAGYIDGGASQEEFYKFIKPILEKMDGTEELLVKLNREDLLRKQRTFDNGSIPHQIHLGELHAILRRQEDFYPFLKDNREKIEKILTFRIPYYVGPLARGNSRFAWMTRKSEETITPWNFEEVVDKGASAQSFIERMTNFDKNLPNEKVLPKHSLLYEYFTVYNELTKVKYVTEGMRKPAFLSGEQKKAIVDLLFKTNRKVTVKQLKEDYFKKIECFDSVEISGVEDRFNASLGTYHDLLKIIKDKDFLDNEENEDILEDIVLTLTLFEDREMIEERLKTYAHLFDDKVMKQLKRRRYTGWGRLSRKLINGIRDKQSGKTILDFLKSDGFANRNFMQLIHDDSLTFKEDIQKAQVSGQGDSLHEHIANLAGSPAIKKGILQTVKVVDELVKVMGRHKPENIVIEMARENQTTQKGQKNSRERMKRIEEGIKELGSQILKEHPVENTQLQNEKLYLYYLQNGRDMYVDQELDINRLSDYDVDHIVPQSFLKDDSIDNKVLTRSDKARGKSDNVPSEEVVKKMKNYWRQLLNAKLITQRKFDNLTKAERGGLSELDKAGFIKRQLVETRQITKHVAQILDSRMNTKYDENDKLIREVKVITLKSKLVSDFRKDFQFYKVREINNYHHAHDAYLNAVVGTALIKKYPKLESEFVYGDYKVYDVRKMIAKSEQEIGKATAKYFFYSNIMNFFKTEITLANGEIRKRPLIETNGETGEIVWDKGRDFATVRKVLSMPQVNIVKKTEVQTGGFSKESILPKRNSDKLIARKKDWDPKKYGGFDSPTVAYSVLVVAKVEKGKSKKLKSVKELLGITIMERSSFEKNPIDFLEAKGYKEVKKDLIIKLPKYSLFELENGRKRMLASAGELQKGNELALPSKYVNFLYLASHYEKLKGSPEDNEQKQLFVEQHKHYLDEIIEQISEFSKRVILADANLDKVLSAYNKHRDKPIREQAENIIHLFTLTNLGAPAAFKYFDTTIDRKRYTSTKEVLDATLIHQSITGLYETRIDLSQLGGDGGGGSGGSGGSGGSGGSGGSGGTLGDQGSRGSDPLPEPRVTLTVEGIPTEFLVNTGAEHSVLTKPMGKMGSKRTVVAGATGSKVYPWTTKRLLKIGQKQVTHSFLVIPECPAPLLGRDLLTKLKAQIQFSTEGPQVTWEDRPAMCLVLNLEEEYRLHEKPVPPSIDPSWLQLFPMVWAEKAGMGLANQVPPVVVELKSDASPVAVRQYPMSKEAREGIRPHIQRFLDLGILVPCQSPWNTPLLPVKKPGTNDYRPVQDLREVNKRVQDIHPTVPNPYNLLSSLPPSHTWYSVLDLKDAFFCLKLHPNSQPLFAFEWRDPEKGNTGQLTWTRLPQGFKNSPTLFNEALHRDLASFRALNPQVVMLQYVDDLLVAAPTYRDCKEGTRRLLQELSKLGYRVSAKKAQLCREEVTYLGYLLKGGKRWLTPARKATVMKIPTPTTPRQVREFLGKAGFCRLFIPGFASLAAPLYPLTRPKVPFTWTEAHQEAFGRIKEALLSAPALALPDLTKPFALYVDEKEGVARGVLTQTLGPWRRPVAYLSKKLDPVASGWPTCLKAIAAVALLLKDADKLTLGQNVLVIAPHNLESIVRQPPDRWMTNARMTHYQSLLLNERVSFAPPAILNPATLLPVESDDTPIHICSEILAEETGTRPDLRDQPLPGVPAWYTDGSSFIMDGRRQAGAAIVDNKRTVWASNLPEGTSAQKAELIALTQALRLAEGKSINIYTDSRYAFATAHVHGAIYKQRGWLTSAGKDIKNKEEILALLEAIHLPKRVAIIHCPGHQRGTDPVATGNRKADEAAKQAAQSTRILTETTKNAGKRTADGSEFEKRTADGSEFESPKKKAKVE

SEQ ID NO: 6090 - protein, 2103 aa, synthetic construct; identical to SEQ ID NO: 4503

SEQ ID NO: 6091 - protein, 2103 aa, synthetic construct; identical to SEQ ID NO: 4503

SEQ ID NO: 6092 - protein, 2103 aa, synthetic construct
MPAAKRVKLDGGDKKYSIGLDIGTNSVGWAVITDEYKVPSKKFKVLGNTDRHSIKKNLIGALLFDSGETAEATRLKRTARRRYTRRKNRICYLQEIFSNEMAKVDDSFFHRLEESFLVEEDKKHERHPIFGNIVDEVAYHEKYPTIYHLRKKLVDSTDKADLRLIYLALAHMIKFRGHFLIEGDLNPDNSDVDKLFIQLVQTYNQLFEENPINASGVDAKAILSARLSKSRRLENLIAQLPGEKKNGLFGNLIALSLGLTPNFKSNFDLAEDAKLQLSKDTYDDDLDNLLAQIGDQYADLFLAAKNLSDAILLSDILRVNTEITKAPLSASMIKRYDEHHQDLTLLKALVRQQLPEKYKEIFFDQSKNGYAGYIDGGASQEEFYKFIKPILEKMDGTEELLVKLNREDLLRKQRTFDNGSIPHQIHLGELHAILRRQEDFYPFLKDNREKIEKILTFRIPYYVGPLARGNSRFAWMTRKSEETITPWNFEEVVDKGASAQSFIERMTNFDKNLPNEKVLPKHSLLYEYFTVYNELTKVKYVTEGMRKPAFLSGEQKKAIVDLLFKTNRKVTVKQLKEDYFKKIECFDSVEISGVEDRFNASLGTYHDLLKIIKDKDFLDNEENEDILEDIVLTLTLFEDREMIEERLKTYAHLFDDKVMKQLKRRRYTGWGRLSRKLINGIRDKQSGKTILDFLKSDGFANRNFMQLIHDDSLTFKEDIQKAQVSGQGDSLHEHIANLAGSPAIKKGILQTVKVVDELVKVMGRHKPENIVIEMARENQTTQKGQKNSRERMKRIEEGIKELGSQILKEHPVENTQLQNEKLYLYYLQNGRDMYVDQELDINRLSDYDVDHIVPQSFLKDDSIDNKVLTRSDKARGKSDNVPSEEVVKKMKNYWRQLLNAKLITQRKFDNLTKAERGGLSELDKAGFIKRQLVETRQITKHVAQILDSRMNTKYDENDKLIREVKVITLKSKLVSDFRKDFQFYKVREINNYHHAHDAYLNAVVGTALIKKYPKLESEFVYGDYKVYDVRKMIAKSEQEIGKATAKYFFYSNIMNFFKTEITLANGEIRKRPLIETNGETGEIVWDKGRDFATVRKVLSMPQVNIVKKTEVQTGGFSKESILPKRNSDKLIARKKDWDPKKYGGFDSPTVAYSVLVVAKVEKGKSKKLKSVKELLGITIMERSSFEKNPIDFLEAKGYKEVKKDLIIKLPKYSLFELENGRKRMLASAGELQKGNELALPSKYVNFLYLASHYEKLKGSPEDNEQKQLFVEQHKHYLDEIIEQISEFSKRVILADANLDKVLSAYNKHRDKPIREQAENIIHLFTLTNLGAPAAFKYFDTTIDRKRYTSTKEVLDATLIHQSITGLYETRIDLSQLGGDGGGGSGGSGGSGGSGGSGGSGGTLGIEDEYRLHETSTEPDVSLGSTWLSDFPQAWAETGGMGLAVRQAPLIIPLKATSTPVSIQQYPMSHEARLGIKPHIQRLLDQGILVPCQSPWNTPLLPVKKPGTNDYRPVQDLREVNKRVEDIHPTVPNPYNLLSGLPPSHQWYTVLDLKDAFFCLRLHPTSQPLFAFEWRDPGMGISGQLTWTRLPQGFKNSPTLFDEALHRDLADFRIQHPDLILLQYVDDILLAATSELDCQQGTRALLQTLGDLGYRASAKKAQICQKQVKYLGYLLREGQRWLTEARKETVMGQPVPKTPRQLREFLGTAGFCRLWIPGFAEMAAPLYPLTKTGTLFSWGPDQQKAYQEIKQALLTAPALGLPDLTKPFELFVDEKQGYAKGVLTQKLGPWRRPVAYLSKKLDPVAAGWPPCLRMVAAIAVLTKDAGKLTMGQPLVILAPHAVEALVKQPPDRWLSNARMTHYQAMLLDTDRVQFGPVVALNPATLLPLPEEGAPHDCLEILAETHGTRPDLTDQPIPDADHTWYTDGSSFLQEGQRKAGAAVTTETEVIWAGALPAGTSAQRAELIALTQALKMAEGKRLNVYTDSRYAFATAHIHGEIYRRRGLLTSEGREIKNKSEILALLKALFLPKRLSIIHCLGHQKGDSAEARGNRLADQAAREAAIKTPPDTSTLLAGKRTADGSEFEKRTADGSEFESPKKKAKVE

SEQ ID NO: 6093 - protein, 2103 aa, synthetic construct
MPAAKRVKLDGGDKKYSIGLDIGTNSVGWAVITDEYKVPSKKFKVLGNTDRHSIKKNLIGALLFDSGETAEATRLKRTARRRYTRRKNRICYLQEIFSNEMAKVDDSFFHRLEESFLVEEDKKHERHPIFGNIVDEVAYHEKYPTIYHLRKKLVDSTDKADLRLIYLALAHMIKFRGHFLIEGDLNPDNSDVDKLFIQLVQTYNQLFEENPINASGVDAKAILSARLSKSRRLENLIAQLPGEKKNGLFGNLIALSLGLTPNFKSNFDLAEDAKLQLSKDTYDDDLDNLLAQIGDQYADLFLAAKNLSDAILLSDILRVNTEITKAPLSASMIKRYDEHHQDLTLLKALVRQQLPEKYKEIFFDQSKNGYAGYIDGGASQEEFYKFIKPILEKMDGTEELLVKLNREDLLRKQRTFDNGSIPHQIHLGELHAILRRQEDFYPFLKDNREKIEKILTFRIPYYVGPLARGNSRFAWMTRKSEETITPWNFEEVVDKGASAQSFIERMTNFDKNLPNEKVLPKHSLLYEYFTVYNELTKVKYVTEGMRKPAFLSGEQKKAIVDLLFKTNRKVTVKQLKEDYFKKIECFDSVEISGVEDRFNASLGTYHDLLKIIKDKDFLDNEENEDILEDIVLTLTLFEDREMIEERLKTYAHLFDDKVMKQLKRRRYTGWGRLSRKLINGIRDKQSGKTILDFLKSDGFANRNFMQLIHDDSLTFKEDIQKAQVSGQGDSLHEHIANLAGSPAIKKGILQTVKVVDELVKVMGRHKPENIVIEMARENQTTQKGQKNSRERMKRIEEGIKELGSQILKEHPVENTQLQNEKLYLYYLQNGRDMYVDQELDINRLSDYDVDHIVPQSFLKDDSIDNKVLTRSDKARGKSDNVPSEEVVKKMKNYWRQLLNAKLITQRKFDNLTKAERGGLSELDKAGFIKRQLVETRQITKHVAQILDSRMNTKYDENDKLIREVKVITLKSKLVSDFRKDFQFYKVREINNYHHAHDAYLNAVVGTALIKKYPKLESEFVYGDYKVYDVRKMIAKSEQEIGKATAKYFFYSNIMNFFKTEITLANGEIRKRPLIETNGETGEIVWDKGRDFATVRKVLSMPQVNIVKKTEVQTGGFSKESILPKRNSDKLIARKKDWDPKKYGGFDSPTVAYSVLVVAKVEKGKSKKLKSVKELLGITIMERSSFEKNPIDFLEAKGYKEVKKDLIIKLPKYSLFELENGRKRMLASAGELQKGNELALPSKYVNFLYLASHYEKLKGSPEDNEQKQLFVEQHKHYLDEIIEQISEFSKRVILADANLDKVLSAYNKHRDKPIREQAENIIHLFTLTNLGAPAAFKYFDTTIDRKRYTSTKEVLDATLIHQSITGLYETRIDLSQLGGDGGGGSGGSGGSGGSGGSGGSGGTLGIEDEYRLHETSTEPDVSLGSTWLSDFPQAWAETGGMGLAVRQAPLIIPLKATSTPVSIQQYPMSHEARLGIKPHIQRLLDQGILVPCQSPWNTPLLPVKKPGTNDYRPVQDLREVNKRVEDIHPTVPNPYNLLSGLPPSHQWYTVLDLKDAFFCLRLHPTSQPLFAFEWRDPGMGISGQLTWTRLPQGFKNSPTLFNEALHRDLADFRIQHPDLILLQYVDDILLAATSELDCQQGTRALLQTLGDLGYRASAKKAQICQKQVKYLGYLLREGQRWLTEARKETVMGQPVPKTPRQLREFLGTAGFCRLWIPGFAEMAAPLYPLTKPGTLFSWGPDQQKAYQEIKQALLTAPALGLPDLTKPFELFVDEKQGYAKGVLTQKLGPWRRPVAYLSKKLDPVAAGWPPCLRMVAAIAVLTKDAGKLTMGQPLVILAPHAVEALVKQPPDRWLSNARMTHYQAMLLDTDRVQFGPVVALNPATLLPLPEEGAPHDCLEILAETHGTRPDLTDQPIPDADHTWYTDGSSFLQEGQRKAGAAVTTETEVIWAGALPAGTSAQRAELIALTQALKMAEGKRLNVYTDSRYAFATAHIHGEIYRRRGWLTSEGREIKNKSEILALLKALFLPKRLSIIHCLGHQKGDSAEARGNRLADQAAREAAIKTPPDTSTLLAGKRTADGSEFEKRTADGSEFESPKKKAKVE

SEQ ID NO: 6094 - protein, 2103 aa, synthetic construct
MPAAKRVKLDGGDKKYSIGLDIGTNSVGWAVITDEYKVPSKKFKVLGNTDRHSIKKNLIGALLFDSGETAEATRLKRTARRRYTRRKNRICYLQEIFSNEMAKVDDSFFHRLEESFLVEEDKKHERHPIFGNIVDEVAYHEKYPTIYHLRKKLVDSTDKADLRLIYLALAHMIKFRGHFLIEGDLNPDNSDVDKLFIQLVQTYNQLFEENPINASGVDAKAILSARLSKSRRLENLIAQLPGEKKNGLFGNLIALSLGLTPNFKSNFDLAEDAKLQLSKDTYDDDLDNLLAQIGDQYADLFLAAKNLSDAILLSDILRVNTEITKAPLSASMIKRYDEHHQDLTLLKALVRQQLPEKYKEIFFDQSKNGYAGYIDGGASQEEFYKFIKPILEKMDGTEELLVKLNREDLLRKQRTFDNGSIPHQIHLGELHAILRRQEDFYPFLKDNREKIEKILTFRIPYYVGPLARGNSRFAWMTRKSEETITPWNFEEVVDKGASAQSFIERMTNFDKNLPNEKVLPKHSLLYEYFTVYNELTKVKYVTEGMRKPAFLSGEQKKAIVDLLFKTNRKVTVKQLKEDYFKKIECFDSVEISGVEDRFNASLGTYHDLLKIIKDKDFLDNEENEDILEDIVLTLTLFEDREMIEERLKTYAHLFDDKVMKQLKRRRYTGWGRLSRKLINGIRDKQSGKTILDFLKSDGFANRNFMQLIHDDSLTFKEDIQKAQVSGQGDSLHEHIANLAGSPAIKKGILQTVKVVDELVKVMGRHKPENIVIEMARENQTTQKGQKNSRERMKRIEEGIKELGSQILKEHPVENTQLQNEKLYLYYLQNGRDMYVDQELDINRLSDYDVDHIVPQSFLKDDSIDNKVLTRSDKARGKSDNVPSEEVVKKMKNYWRQLLNAKLITQRKFDNLTKAERGGLSELDKAGFIKRQLVETRQITKHVAQILDSRMNTKYDENDKLIREVKVITLKSKLVSDFRKDFQFYKVREINNYHHAHDAYLNAVVGTALIKKYPKLESEFVYGDYKVYDVRKMIAKSEQEIGKATAKYFFYSNIMNFFKTEITLANGEIRKRPLIETNGETGEIVWDKGRDFATVRKVLSMPQVNIVKKTEVQTGGFSKESILPKRNSDKLIARKKDWDPKKYGGFDSPTVAYSVLVVAKVEKGKSKKLKSVKELLGITIMERSSFEKNPIDFLEAKGYKEVKKDLIIKLPKYSLFELENGRKRMLASAGELQKGNELALPSKYVNFLYLASHYEKLKGSPEDNEQKQLFVEQHKHYLDEIIEQISEFSKRVILADANLDKVLSAYNKHRDKPIREQAENIIHLFTLTNLGAPAAFKYFDTTIDRKRYTSTKEVLDATLIHQSITGLYETRIDLSQLGGDGGGGSGGSGGSGGSGGSGGSGGTLNIEDEYRLHETSKEPDVSLGSTWLSDFPQAWAETGGMGLAVRQAPLIIPLKATSTPVSIKQYPMSQEARLGIKPHIQRLLDQGILVPCQSPWNTPLLPVKKPGTNDYRPVQDLREVNKRVEDIHPTVPNPYNLLSGLPPSHQWYTVLDLKDAFFCLRLHPTSQPLFAFEWRDPEMGISGQLTWTRLPQGFKNSPTLFNEALHRDLAGFRIQHPDLILLQYVDDLLLAATSELDCQQGTRALLQTLGDLGYRASAKKAQICQKQVKYLGYLLKEGQRWLTEARKETVMGQPIPKTPRQLREFLGTAGFCRLWIPGFAEMAAPLYPLTKPGTLFNWGPDQQKAFQEIKQALLTAPALGLPDLTKPFELFVDEKQGYAKGVLTQKLGPWRRPVAYLSKKLDPVAAGWPPCLRMVAAIAVLTKDAGKLTMGQPLVILAPHAVEALVKQPPDRWLSNARMTHYQALLLDTDRVQFGPVVALNPATLLPLPEEGLQHDCLDILAEAHGTRSDLMDQPLPDADHTWYTDGSSFLQEGQRKAGAAVTTETEVIWARALPAGTSAQRAELIALTQALKMAEGKKLNVYTDSRYAFATAHIHGEIYRRRGWLTSEGKEIKNKDEILALLKALFLPKRLSIIHCPGHQKGNSAEARGNRMADQAAREVATRETPETSTLLAGKRTADGSEFEKRTADGSEFESPKKKAKVE

SEQ ID NO: 6095 - protein, 2103 aa, synthetic construct
MPAAKRVKLDGGDKKYSIGLDIGTNSVGWAVITDEYKVPSKKFKVLGNTDRHSIKKNLIGALLFDSGETAEATRLKRTARRRYTRRKNRICYLQEIFSNEMAKVDDSFFHRLEESFLVEEDKKHERHPIFGNIVDEVAYHEKYPTIYHLRKKLVDSTDKADLRLIYLALAHMIKFRGHFLIEGDLNPDNSDVDKLFIQLVQTYNQLFEENPINASGVDAKAILSARLSKSRRLENLIAQLPGEKKNGLFGNLIALSLGLTPNFKSNFDLAEDAKLQLSKDTYDDDLDNLLAQIGDQYADLFLAAKNLSDAILLSDILRVNTEITKAPLSASMIKRYDEHHQDLTLLKALVRQQLPEKYKEIFFDQSKNGYAGYIDGGASQEEFYKFIKPILEKMDGTEELLVKLNREDLLRKQRTFDNGSIPHQIHLGELHAILRRQEDFYPFLKDNREKIEKILTFRIPYYVGPLARGNSRFAWMTRKSEETITPWNFEEVVDKGASAQSFIERMTNFDKNLPNEKVLPKHSLLYEYFTVYNELTKVKYVTEGMRKPAFLSGEQKKAIVDLLFKTNRKVTVKQLKEDYFKKIECFDSVEISGVEDRFNASLGTYHDLLKIIKDKDFLDNEENEDILEDIVLTLTLFEDREMIEERLKTYAHLFDDKVMKQLKRRRYTGWGRLSRKLINGIRDKQSGKTILDFLKSDGFANRNFMQLIHDDSLTFKEDIQKAQVSGQGDSLHEHIANLAGSPAIKKGILQTVKVVDELVKVMGRHKPENIVIEMARENQTTQKGQKNSRERMKRIEEGIKELGSQILKEHPVENTQLQNEKLYLYYLQNGRDMYVDQELDINRLSDYDVDHIVPQSFLKDDSIDNKVLTRSDKARGKSDNVPSEEVVKKMKNYWRQLLNAKLITQRKFDNLTKAERGGLSELDKAGFIKRQLVETRQITKHVAQILDSRMNTKYDENDKLIREVKVITLKSKLVSDFRKDFQFYKVREINNYHHAHDAYLNAVVGTALIKKYPKLESEFVYGDYKVYDVRKMIAKSEQEIGKATAKYFFYSNIMNFFKTEITLANGEIRKRPLIETNGETGEIVWDKGRDFATVRKVLSMPQVNIVKKTEVQTGGFSKESILPKRNSDKLIARKKDWDPKKYGGFDSPTVAYSVLVVAKVEKGKSKKLKSVKELLGITIMERSSFEKNPIDFLEAKGYKEVKKDLIIKLPKYSLFELENGRKRMLASAGELQKGNELALPSKYVNFLYLASHYEKLKGSPEDNEQKQLFVEQHKHYLDEIIEQISEFSKRVILADANLDKVLSAYNKHRDKPIREQAENIIHLFTLTNLGAPAAFKYFDTTIDRKRYTSTKEVLDATLIHQSITGLYETRIDLSQLGGDGGGGSGGSGGSGGSGGSGGSGGTLNIEDEYRLHETSKGPDVPLGSTWLSDFPQAWAETGGMGLAFRQAPLIISLKATSTPVSIKQYPMSQEARLGIKPHIQRLLDQGILVPCQSPWNTPLLPVKKPGTNDYRPVQDLREVNKRVEDIHPTVPNPYNLLSGLPPSHQWYTVLDLKDAFFCLRLHPTSQSLFAFEWKDPEMGISGQLTWTRLPQGFKNSPTLFNEALHRDLADFRIQHPDLILLQYVDDLLLAATSELDCQQGTRALLQTLGDLGYRASAKKAQICQKQVKYLGYLLKEGQRWLTEARKETVMGQPTPKTPRQLREFLGKAGLCRLFIPGFAEMAAPLYPLTKPGTLFKWGPDQQKAYQEIKQALLTAPALGLPDLTKPFELFVDEKQGYAKGVLTQKLGPWRRPVAYLSKKLDPVAAGWPPCLRMVAAIAVLTKDVGKLTMGQPLVILAPHAVEALVKQPPDRWLSNARMTHYQALLLDTDRVQFGPIVALNPATLLPLPEEGLQHDCLDILAEAHGTRPDLTDQPLPDADHTWYTDGSSFLQEGQRRAGAAVTTETEVIWAKALPAGTSAQRAELIALTQALKMAAGKKLNVYTDSRYAFATAHIHGEIYRRRGWLTSEGKEIKNKDEILALLKALFLPKRLSIIHCPGHQKGNHAEARGNRMADQAAREVATRETPETSTLLAGKRTADGSEFEKRTADGSEFESPKKKAKVE

SEQ ID NO: 6096 - protein, 2103 aa, synthetic construct
MPAAKRVKLDGGDKKYSIGLDIGTNSVGWAVITDEYKVPSKKFKVLGNTDRHSIKKNLIGALLFDSGETAEATRLKRTARRRYTRRKNRICYLQEIFSNEMAKVDDSFFHRLEESFLVEEDKKHERHPIFGNIVDEVAYHEKYPTIYHLRKKLVDSTDKADLRLIYLALAHMIKFRGHFLIEGDLNPDNSDVDKLFIQLVQTYNQLFEENPINASGVDAKAILSARLSKSRRLENLIAQLPGEKKNGLFGNLIALSLGLTPNFKSNFDLAEDAKLQLSKDTYDDDLDNLLAQIGDQYADLFLAAKNLSDAILLSDILRVNTEITKAPLSASMIKRYDEHHQDLTLLKALVRQQLPEKYKEIFFDQSKNGYAGYIDGGASQEEFYKFIKPILEKMDGTEELLVKLNREDLLRKQRTFDNGSIPHQIHLGELHAILRRQEDFYPFLKDNREKIEKILTFRIPYYVGPLARGNSRFAWMTRKSEETITPWNFEEVVDKGASAQSFIERMTNFDKNLPNEKVLPKHSLLYEYFTVYNELTKVKYVTEGMRKPAFLSGEQKKAIVDLLFKTNRKVTVKQLKEDYFKKIECFDSVEISGVEDRFNASLGTYHDLLKIIKDKDFLDNEENEDILEDIVLTLTLFEDREMIEERLKTYAHLFDDKVMKQLKRRRYTGWGRLSRKLINGIRDKQSGKTILDFLKSDGFANRNFMQLIHDDSLTFKEDIQKAQVSGQGDSLHEHIANLAGSPAIKKGILQTVKVVDELVKVMGRHKPENIVIEMARENQTTQKGQKNSRERMKRIEEGIKELGSQILKEHPVENTQLQNEKLYLYYLQNGRDMYVDQELDINRLSDYDVDHIVPQSFLKDDSIDNKVLTRSDKARGKSDNVPSEEVVKKMKNYWRQLLNAKLITQRKFDNLTKAERGGLSELDKAGFIKRQLVETRQITKHVAQILDSRMNTKYDENDKLIREVKVITLKSKLVSDFRKDFQFYKVREINNYHHAHDAYLNAVVGTALIKKYPKLESEFVYGDYKVYDVRKMIAKSEQEIGKATAKYFFYSNIMNFFKTEITLANGEIRKRPLIETNGETGEIVWDKGRDFATVRKVLSMPQVNIVKKTEVQTGGFSKESILPKRNSDKLIARKKDWDPKKYGGFDSPTVAYSVLVVAKVEKGKSKKLKSVKELLGITIMERSSFEKNPIDFLEAKGYKEVKKDLIIKLPKYSLFELENGRKRMLASAGELQKGNELALPSKYVNFLYLASHYEKLKGSPEDNEQKQLFVEQHKHYLDEIIEQISEFSKRVILADANLDKVLSAYNKHRDKPIREQAENIIHLFTLTNLGAPAAFKYFDTTIDRKRYTSTKEVLDATLIHQSITGLYETRIDLSQLGGDGGGGSGGSGGSGGSGGSGGSGGTLNIEDEYRLHETSKGPDVPLGSTWLSDFPQAWAETGGMGLAVRQAPLIIPLKATSTPVSIKQYPMSQEARLGIKPHIQRLLDQGILVPCQSPWNTPLLPVKKPGTNDYRPVQDLREVNKRVEDIHPTVPNPYNLLSGLPPSHQWYTVLDLKDAFFCLRLHPTSQSLFAFEWRDPEMGISGQLTWTRLPQGFKNSPTLFNEALHRDLADFRIQHPDLILLQYVDDLLLAATSELDCQQGTRALLQTLGDLGYRASAKKAQICQKQVKYLGYLLKEGQRWLTEARKETVMGQPTPKTPRQLREFLGTAGFCRLWIPGFAEMAAPLYPLTKPGTLFEWGPDQQKAYQEIKQALLTAPALGLPDLTKPFELFVDEKQGYAKGVLTQKLGPWRRPVAYLSKKLDPVAAGWPPCLRMVAAIAVLTKDAGKLTMGQPLVILAPHAVEALVKQPPDRWLSNARMTHYQALLLDTDRVQFGPIVALNPATLLPLPEEGLQHDCLDILAEAHGTRPDLTDQPLPDADHTWYTDGSSFLQEGQRKAGAAVTTETEVVWAKALPAGTSAQRAELIALTQALKMAEGKKLNVYTDSRYAFATAHIHGEIYRRRGWLTSEGKEIKNKDEILALLKALFLPKRLSIIHCPGHQKGNRAEARGNRMADQAAREVATRETPETSTLLAGKRTADGSEFEKRTADGSEFESPKKKAKVE

SEQ ID NO: 6097 - protein, 2103 aa, synthetic construct
MPAAKRVKLDGGDKKYSIGLDIGTNSVGWAVITDEYKVPSKKFKVLGNTDRHSIKKNLIGALLFDSGETAEATRLKRTARRRYTRRKNRICYLQEIFSNEMAKVDDSFFHRLEESFLVEEDKKHERHPIFGNIVDEVAYHEKYPTIYHLRKKLVDSTDKADLRLIYLALAHMIKFRGHFLIEGDLNPDNSDVDKLFIQLVQTYNQLFEENPINASGVDAKAILSARLSKSRRLENLIAQLPGEKKNGLFGNLIALSLGLTPNFKSNFDLAEDAKLQLSKDTYDDDLDNLLAQIGDQYADLFLAAKNLSDAILLSDILRVNTEITKAPLSASMIKRYDEHHQDLTLLKALVRQQLPEKYKEIFFDQSKNGYAGYIDGGASQEEFYKFIKPILEKMDGTEELLVKLNREDLLRKQRTFDNGSIPHQIHLGELHAILRRQEDFYPFLKDNREKIEKILTFRIPYYVGPLARGNSRFAWMTRKSEETITPWNFEEVVDKGASAQSFIERMTNFDKNLPNEKVLPKHSLLYEYFTVYNELTKVKYVTEGMRKPAFLSGEQKKAIVDLLFKTNRKVTVKQLKEDYFKKIECFDSVEISGVEDRFNASLGTYHDLLKIIKDKDFLDNEENEDILEDIVLTLTLFEDREMIEERLKTYAHLFDDKVMKQLKRRRYTGWGRLSRKLINGIRDKQSGKTILDFLKSDGFANRNFMQLIHDDSLTFKEDIQKAQVSGQGDSLHEHIANLAGSPAIKKGILQTVKVVDELVKVMGRHKPENIVIEMARENQTTQKGQKNSRERMKRIEEGIKELGSQILKEHPVENTQLQNEKLYLYYLQNGRDMYVDQELDINRLSDYDVDHIVPQSFLKDDSIDNKVLTRSDKARGKSDNVPSEEVVKKMKNYWRQLLNAKLITQRKFDNLTKAERGGLSELDKAGFIKRQLVETRQITKHVAQILDSRMNTKYDENDKLIREVKVITLKSKLVSDFRKDFQFYKVREINNYHHAHDAYLNAVVGTALIKKYPKLESEFVYGDYKVYDVRKMIAKSEQEIGKATAKYFFYSNIMNFFKTEITLANGEIRKRPLIETNGETGEIVWDKGRDFATVRKVLSMPQVNIVKKTEVQTGGFSKESILPKRNSDKLIARKKDWDPKKYGGFDSPTVAYSVLVVAKVEKGKSKKLKSVKELLGITIMERSSFEKNPIDFLEAKGYKEVKKDLIIKLPKYSLFELENGRKRMLASAGELQKGNELALPSKYVNFLYLASHYEKLKGSPEDNEQKQLFVEQHKHYLDEIIEQISEFSKRVILADANLDKVLSAYNKHRDKPIREQAENIIHLFTLTNLGAPAAFKYFDTTIDRKRYTSTKEVLDATLIHQSITGLYETRIDLSQLGGDGGGGSGGSGGSGGSGGSGGSGGTLNIEDEHRLHETSKEPDVSLGSTWLSDFPQAWAETGGMGLAVRQAPLIIPLKATSTPVSIKQYPMSQEARLGIKPHIQRLLDQGILVPCQSPWNTPLLPVKKPGTNDYRPVQDLREVNKRVEDIHPTVPNPYNLLSGLPPSHQWYTVLDLKDAFFCLRLHPTSQPLFAFEWRDPEMGISGQLTWTRLPQGFKNSPTLFDEALHRDLADFRIQHPDLILLQYVDDLLLAATSELDCQQGTRALLQTLGNLGYRASAKKAQICQKQVKYLGYLLKEGQRWLTEARKETVMGQPTPKTPRQLREFLGTAGFCRLWIPGFAEMAAPLYPLTKTGTLFNWGPDQQKAYQEIKQALLTAPALGLPDLTKPFELFVDEKQGYAKGVLTQKLGPWRRPVAYLSKKLDPVAAGWPPCLRMVAAIAVLTKDAGKLTMGQPLVILAPHAVEALVKQPPDRWLSNARMTHYQALLLDTDRVQFGPVVALNPATLLPLPEEGLQHNCLDILAEAHGTRPDLTDQPLPDADHTWYTDGSSLLQEGQRKAGAAVTTETEVIWAKALPAGTSAQRAELIALTQALKMAEGKKLNVYTDSRYAFATAHIHGEIYRRRGLLTSEGKEIKNKDEILALLKALFLPKRLSIIHCPGHQKGHSAEARGNRMADQAARKAAITETPDTSTLLAGKRTADGSEFEKRTADGSEFESPKKKAKVE

SEQ ID NO: 6098 - protein, 2103 aa, synthetic construct
MPAAKRVKLDGGDKKYSIGLDIGTNSVGWAVITDEYKVPSKKFKVLGNTDRHSIKKNLIGALLFDSGETAEATRLKRTARRRYTRRKNRICYLQEIFSNEMAKVDDSFFHRLEESFLVEEDKKHERHPIFGNIVDEVAYHEKYPTIYHLRKKLVDSTDKADLRLIYLALAHMIKFRGHFLIEGDLNPDNSDVDKLFIQLVQTYNQLFEENPINASGVDAKAILSARLSKSRRLENLIAQLPGEKKNGLFGNLIALSLGLTPNFKSNFDLAEDAKLQLSKDTYDDDLDNLLAQIGDQYADLFLAAKNLSDAILLSDILRVNTEITKAPLSASMIKRYDEHHQDLTLLKALVRQQLPEKYKEIFFDQSKNGYAGYIDGGASQEEFYKFIKPILEKMDGTEELLVKLNREDLLRKQRTFDNGSIPHQIHLGELHAILRRQEDFYPFLKDNREKIEKILTFRIPYYVGPLARGNSRFAWMTRKSEETITPWNFEEVVDKGASAQSFIERMTNFDKNLPNEKVLPKHSLLYEYFTVYNELTKVKYVTEGMRKPAFLSGEQKKAIVDLLFKTNRKVTVKQLKEDYFKKIECFDSVEISGVEDRFNASLGTYHDLLKIIKDKDFLDNEENEDILEDIVLTLTLFEDREMIEERLKTYAHLFDDKVMKQLKRRRYTGWGRLSRKLINGIRDKQSGKTILDFLKSDGFANRNFMQLIHDDSLTFKEDIQKAQVSGQGDSLHEHIANLAGSPAIKKGILQTVKVVDELVKVMGRHKPENIVIEMARENQTTQKGQKNSRERMKRIEEGIKELGSQILKEHPVENTQLQNEKLYLYYLQNGRDMYVDQELDINRLSDYDVDHIVPQSFLKDDSIDNKVLTRSDKARGKSDNVPSEEVVKKMKNYWRQLLNAKLITQRKFDNLTKAERGGLSELDKAGFIKRQLVETRQITKHVAQILDSRMNTKYDENDKLIREVKVITLKSKLVSDFRKDFQFYKVREINNYHHAHDAYLNAVVGTALIKKYPKLESEFVYGDYKVYDVRKMIAKSEQEIGKATAKYFFYSNIMNFFKTEITLANGEIRKRPLIETNGETGEIVWDKGRDFATVRKVLSMPQVNIVKKTEVQTGGFSKESILPKRNSDKLIARKKDWDPKKYGGFDSPTVAYSVLVVAKVEKGKSKKLKSVKELLGITIMERSSFEKNPIDFLEAKGYKEVKKDLIIKLPKYSLFELENGRKRMLASAGELQKGNELALPSKYVNFLYLASHYEKLKGSPEDNEQKQLFVEQHKHYLDEIIEQISEFSKRVILADANLDKVLSAYNKHRDKPIREQAENIIHLFTLTNLGAPAAFKYFDTTIDRKRYTSTKEVLDATLIHQSITGLYETRIDLSQLGGDGGGGSGGSGGSGGSGGSGGSGGTLNIEDEHRLHETSKEPDVSLGSTWLSDFPQAWAETGGMGLAVRQAPLIIPLKATSTPVSIKQYPMSQEARLGIKPHIQRLLDQGILVPCQSPWNTPLLPVKKPGTNDYRPVQDLREVNKRVEDIHPTVPNPYNLLSGLPPSHQWYTVLDLKDAFFCLRLHPTSQPLFAFEWRDPEMGISGQLTWTRLPQGFKNSPTLFNEALHRDLADFRIQHPDLILLQYVDDLLLAATSELDCQQGTRALLQTLGNLGYRASAKKAQICQKQVKYLGYLLKEGQRWLTEARKETVMGQPTPKTPRQLREFLGTAGFCRLWIPGFAEMAAPLYPLTKPGTLFNWGPDQQKAYQEIKQALLTAPALGLPDLTKPFELFVDEKQGYAKGVLTQKLGPWRRPVAYLSKKLDPVAAGWPPCLRMVAAIAVLTKDAGKLTMGQPLVILAPHAVEALVKQPPDRWLSNARMTHYQALLLDTDRVQFGPVVALNPATLLPLPEEGLQHNCLDILAEAHGTRPDLTDQPLPDADHTWYTDGSSLLQEGQRKAGAAVTTETEVIWAKALPAGTSAQRAELIALTQALKMAEGKKLNVYTDSRYAFATAHIHGEIYRRRGWLTSEGKEIKNKDEILALLKALFLPKRLSIIHCPGHQKGHSAEARGNRMADQAARKAAITETPDTSTLLAGKRTADGSEFEKRTADGSEFESPKKKAKVE

SEQ ID NO: 6099 - protein, 2103 aa, synthetic construct; identical to SEQ ID NO: 6098

SEQ ID NO: 6100 - protein, 2017 aa, synthetic construct
MPAAKRVKLDGGDKKYSIGLDIGTNSVGWAVITDEYKVPSKKFKVLGNTDRHSIKKNLIGALLFDSGETAEATRLKRTARRRYTRRKNRICYLQEIFSNEMAKVDDSFFHRLEESFLVEEDKKHERHPIFGNIVDEVAYHEKYPTIYHLRKKLVDSTDKADLRLIYLALAHMIKFRGHFLIEGDLNPDNSDVDKLFIQLVQTYNQLFEENPINASGVDAKAILSARLSKSRRLENLIAQLPGEKKNGLFGNLIALSLGLTPNFKSNFDLAEDAKLQLSKDTYDDDLDNLLAQIGDQYADLFLAAKNLSDAILLSDILRVNTEITKAPLSASMIKRYDEHHQDLTLLKALVRQQLPEKYKEIFFDQSKNGYAGYIDGGASQEEFYKFIKPILEKMDGTEELLVKLNREDLLRKQRTFDNGSIPHQIHLGELHAILRRQEDFYPFLKDNREKIEKILTFRIPYYVGPLARGNSRFAWMTRKSEETITPWNFEEVVDKGASAQSFIERMTNFDKNLPNEKVLPKHSLLYEYFTVYNELTKVKYVTEGMRKPAFLSGEQKKAIVDLLFKTNRKVTVKQLKEDYFKKIECFDSVEISGVEDRFNASLGTYHDLLKIIKDKDFLDNEENEDILEDIVLTLTLFEDREMIEERLKTYAHLFDDKVMKQLKRRRYTGWGRLSRKLINGIRDKQSGKTILDFLKSDGFANRNFMQLIHDDSLTFKEDIQKAQVSGQGDSLHEHIANLAGSPAIKKGILQTVKVVDELVKVMGRHKPENIVIEMARENQTTQKGQKNSRERMKRIEEGIKELGSQILKEHPVENTQLQNEKLYLYYLQNGRDMYVDQELDINRLSDYDVDHIVPQSFLKDDSIDNKVLTRSDKARGKSDNVPSEEVVKKMKNYWRQLLNAKLITQRKFDNLTKAERGGLSELDKAGFIKRQLVETRQITKHVAQILDSRMNTKYDENDKLIREVKVITLKSKLVSDFRKDFQFYKVREINNYHHAHDAYLNAVVGTALIKKYPKLESEFVYGDYKVYDVRKMIAKSEQEIGKATAKYFFYSNIMNFFKTEITLANGEIRKRPLIETNGETGEIVWDKGRDFATVRKVLSMPQVNIVKKTEVQTGGFSKESILPKRNSDKLIARKKDWDPKKYGGFDSPTVAYSVLVVAKVEKGKSKKLKSVKELLGITIMERSSFEKNPIDFLEAKGYKEVKKDLIIKLPKYSLFELENGRKRMLASAGELQKGNELALPSKYVNFLYLASHYEKLKGSPEDNEQKQLFVEQHKHYLDEIIEQISEFSKRVILADANLDKVLSAYNKHRDKPIREQAENIIHLFTLTNLGAPAAFKYFDTTIDRKRYTSTKEVLDATLIHQSITGLYETRIDLSQLGGDGGGGSGGSGGSGGSGGSGGSGGLTAAIDILAPQQCAEPITWKSDEPVWVDQWPLTNDKLAAAQQLVQEQLEAGHITESSSPWNTPIFVIKKKSGKWRLLQDLRAVNATMVLMGALQPGLPSPVAPPQGYLKIIIDLKDCFFSIPLHPSDQKRFAFSLPSTNFKEPMQRFQWKVLPQGMANSPTLCQKYVATAIHKVRHAWKQMYIIHYMDDILIAGKDGQQVLQCFDQLKQELTAAGLHIAPEKVQLQDPYTYLGFELNGPKITNQKAVIRKDKLQTLNDFQKLLGDINWLRPYLKLTTGDLKPLFDTLKPDSDPNSHRSLSKEALASLEKVETAIAEQFVTHINYSLPLIFLIFNTALTPTGLFWQDNPIMWIHLPASPKKVLLPYYDAIADLIILGRDHSKKYFGIEPSTIIQPYSKSQIDWLMQNTEMWPIACASFVGILDNHYPPNKLIQFCKLHTFVFPQIISKTPLNNALLVFTDGSSTGMAAYTLTDTTIKFQTNLNSAQLVELQALIAVLSAFPNQPLNIYTDSAYLAHSIPLLETVAQIKHISETAKLFLQCQQLIYNRSIPFYIGHVRAHSGLPGPIAQGNQRADLATKIVASNINTAGKRTADGSEFEKRTADGSEFESPKKKAKVE

SEQ ID NO: 6101 - protein, 2183 aa, synthetic construct
MPAAKRVKLDGGDKKYSIGLDIGTNSVGWAVITDEYKVPSKKFKVLGNTDRHSIKKNLIGALLFDSGETAEATRLKRTARRRYTRRKNRICYLQEIFSNEMAKVDDSFFHRLEESFLVEEDKKHERHPIFGNIVDEVAYHEKYPTIYHLRKKLVDSTDKADLRLIYLALAHMIKFRGHFLIEGDLNPDNSDVDKLFIQLVQTYNQLFEENPINASGVDAKAILSARLSKSRRLENLIAQLPGEKKNGLFGNLIALSLGLTPNFKSNFDLAEDAKLQLSKDTYDDDLDNLLAQIGDQYADLFLAAKNLSDAILLSDILRVNTEITKAPLSASMIKRYDEHHQDLTLLKALVRQQLPEKYKEIFFDQSKNGYAGYIDGGASQEEFYKFIKPILEKMDGTEELLVKLNREDLLRKQRTFDNGSIPHQIHLGELHAILRRQEDFYPFLKDNREKIEKILTFRIPYYVGPLARGNSRFAWMTRKSEETITPWNFEEVVDKGASAQSFIERMTNFDKNLPNEKVLPKHSLLYEYFTVYNELTKVKYVTEGMRKPAFLSGEQKKAIVDLLFKTNRKVTVKQLKEDYFKKIECFDSVEISGVEDRFNASLGTYHDLLKIIKDKDFLDNEENEDILEDIVLTLTLFEDREMIEERLKTYAHLFDDKVMKQLKRRRYTGWGRLSRKLINGIRDKQSGKTILDFLKSDGFANRNFMQLIHDDSLTFKEDIQKAQVSGQGDSLHEHIANLAGSPAIKKGILQTVKVVDELVKVMGRHKPENIVIEMARENQTTQKGQKNSRERMKRIEEGIKELGSQILKEHPVENTQLQNEKLYLYYLQNGRDMYVDQELDINRLSDYDVDHIVPQSFLKDDSIDNKVLTRSDKARGKSDNVPSEEVVKKMKNYWRQLLNAKLITQRKFDNLTKAERGGLSELDKAGFIKRQLVETRQITKHVAQILDSRMNTKYDENDKLIREVKVITLKSKLVSDFRKDFQFYKVREINNYHHAHDAYLNAVVGTALIKKYPKLESEFVYGDYKVYDVRKMIAKSEQEIGKATAKYFFYSNIMNFFKTEITLANGEIRKRPLIETNGETGEIVWDKGRDFATVRKVLSMPQVNIVKKTEVQTGGFSKESILPKRNSDKLIARKKDWDPKKYGGFDSPTVAYSVLVVAKVEKGKSKKLKSVKELLGITIMERSSFEKNPIDFLEAKGYKEVKKDLIIKLPKYSLFELENGRKRMLASAGELQKGNELALPSKYVNFLYLASHYEKLKGSPEDNEQKQLFVEQHKHYLDEIIEQISEFSKRVILADANLDKVLSAYNKHRDKPIREQAENIIHLFTLTNLGAPAAFKYFDTTIDRKRYTSTKEVLDATLIHQSITGLYETRIDLSQLGGDGGGGSGGSGGSGGSGGSGGSGGMDPLQLLQPLEAEIKGTKLKAHWNSGATITCVPQAFLEEEVPIKNIWIKTIHGEKEQPVYYLTFKIQGRKVEAEVISSPYDYILVSPSDIPWLMKKPLQLTTLVPLQEYEERLLKQTMLTGSYKEKLQSLFLKYDALWQHWENQVGHRRIKPHHIATGTVNPRPQKQYPINPKAKASIQTVINDLLKQGVLIQQNSIMNTPVYPVPKPDGKWRMVLDYREVNKTIPLIAAQNQHSAGILSSIFRGKYKTTLDLSNGFWAHSITPESYWLTAFTWLGQQYCWTRLPQGFLNSPALFTADVVDLLKEVPNVQVYVDDIYISHDDPREHLEQLEKVFSLLLNAGYVVSLKKSEIAQHEVEFLGFNITKEGRGLTETFKQKLLNITPPRDLKQLQSILGLLNFARNFIPNFSELVKPLYNIIATANGKYITWTTDNSQQLQNIISMLNSAENLEERNPEVRLIMKVNTSPSAGYIRFYNEFAKRPIMYLNYVYTKAEVKFTNTEKLLTTIHKGLIKALDLGMGQEILVYSPIVSMTKIQKTPLPERKALPIRWITWMSYLEDPRIQFHYDKTLPELQQVPTVTDDIIAKIKHPSEFSMVFYTDGSAIKHPNVNKSHNAGMGIAQVQFKPEFTVINTWSIPLGDHTAQLAEVAAVEFACKKALKIDGPVLIVTDSFYVAESVNKELPYWQSNGFFNNKKKPLKHVSKWKSIADCIQLKPDIIIIHEKGHQPTASTFHTEGNNLADKLATQGSYVVNAGKRTADGSEFEKRTADGSEFESPKKKAKVE

SEQ ID NO: 6102 - protein, 2094 aa, synthetic construct
MPAAKRVKLDGGDKKYSIGLDIGTNSVGWAVITDEYKVPSKKFKVLGNTDRHSIKKNLIGALLFDSGETAEATRLKRTARRRYTRRKNRICYLQEIFSNEMAKVDDSFFHRLEESFLVEEDKKHERHPIFGNIVDEVAYHEKYPTIYHLRKKLVDSTDKADLRLIYLALAHMIKFRGHFLIEGDLNPDNSDVDKLFIQLVQTYNQLFEENPINASGVDAKAILSARLSKSRRLENLIAQLPGEKKNGLFGNLIALSLGLTPNFKSNFDLAEDAKLQLSKDTYDDDLDNLLAQIGDQYADLFLAAKNLSDAILLSDILRVNTEITKAPLSASMIKRYDEHHQDLTLLKALVRQQLPEKYKEIFFDQSKNGYAGYIDGGASQEEFYKFIKPILEKMDGTEELLVKLNREDLLRKQRTFDNGSIPHQIHLGELHAILRRQEDFYPFLKDNREKIEKILTFRIPYYVGPLARGNSRFAWMTRKSEETITPWNFEEVVDKGASAQSFIERMTNFDKNLPNEKVLPKHSLLYEYFTVYNELTKVKYVTEGMRKPAFLSGEQKKAIVDLLFKTNRKVTVKQLKEDYFKKIECFDSVEISGVEDRFNASLGTYHDLLKIIKDKDFLDNEENEDILEDIVLTLTLFEDREMIEERLKTYAHLFDDKVMKQLKRRRYTGWGRLSRKLINGIRDKQSGKTILDFLKSDGFANRNFMQLIHDDSLTFKEDIQKAQVSGQGDSLHEHIANLAGSPAIKKGILQTVKVVDELVKVMGRHKPENIVIEMARENQTTQKGQKNSRERMKRIEEGIKELGSQILKEHPVENTQLQNEKLYLYYLQNGRDMYVDQELDINRLSDYDVDHIVPQSFLKDDSIDNKVLTRSDKARGKSDNVPSEEVVKKMKNYWRQLLNAKLITQRKFDNLTKAERGGLSELDKAGFIKRQLVETRQITKHVAQILDSRMNTKYDENDKLIREVKVITLKSKLVSDFRKDFQFYKVREINNYHHAHDAYLNAVVGTALIKKYPKLESEFVYGDYKVYDVRKMIAKSEQEIGKATAKYFFYSNIMNFFKTEITLANGEIRKRPLIETNGETGEIVWDKGRDFATVRKVLSMPQVNIVKKTEVQTGGFSKESILPKRNSDKLIARKKDWDPKKYGGFDSPTVAYSVLVVAKVEKGKSKKLKSVKELLGITIMERSSFEKNPIDFLEAKGYKEVKKDLIIKLPKYSLFELENGRKRMLASAGELQKGNELALPSKYVNFLYLASHYEKLKGSPEDNEQKQLFVEQHKHYLDEIIEQISEFSKRVILADANLDKVLSAYNKHRDKPIREQAENIIHLFTLTNLGAPAAFKYFDTTIDRKRYTSTKEVLDATLIHQSITGLYETRIDLSQLGGDGGGGSGGSGGSGGSGGSGGSGGIPWLMKKPLQLTTLVPLQEYEERLLKQTMLTGSYKEKLQSLFLKYDALWQHWENQVGHRRIKPHHIATGTVNPRPQKQYPINPKAKASIQTVINDLLKQGVLIQQNSIMNTPVYPVPKPDGKWRMVLDYREVNKTIPLIAAQNQHSAGILSSIFRGKYKTTLDLSNGFWAHSITPESYWLTAFTWLGQQYCWTRLPQGFLNSPALFNADVVDLLKEVPNVQVYVDDIYISHDDPREHLEQLEKVFSLLLNAGYVVSLKKSEIAQHEVEFLGFNITKEGRGLTETFKQKLLNITPPRDLKQLQSILGLLNFARNFIPNFSELVKPLYNIIATAPGKYITWTTDNSQQLQNIISMLNSAENLEERNPEVRLIMKVNTSPSAGYIRFYNEFAKRPIMYLNYVYTKAEVKFTNTEKLLTTIHKGLIKALDLGMGQEILVYSPIVSMTKIQKTPLPERKALPIRWITWMSYLEDPRIQFHYDKTLPELQQVPTVTDDIIAKIKHPSEFSMVFYTDGSAIKHPNVNKSHNAGMGIAQVQFKPEFTVINTWSIPLGDHTAQLAEVAAVEFACKKALKIDGPVLIVTDSFYVAESVNKELPYWQSNGFFNNKKKPLKHVSKWKSIADCIQLKPDIIIIHEKGHQPTASTFHTEGNNLADKLATQGSYVVNAGKRTADGSEFEKRTADGSEFESPKKKAKVE

SEQ ID NO: 6103 - protein, 2094 aa, synthetic construct
MPAAKRVKLDGGDKKYSIGLDIGTNSVGWAVITDEYKVPSKKFKVLGNTDRHSIKKNLIGALLFDSGETAEATRLKRTARRRYTRRKNRICYLQEIFSNEMAKVDDSFFHRLEESFLVEEDKKHERHPIFGNIVDEVAYHEKYPTIYHLRKKLVDSTDKADLRLIYLALAHMIKFRGHFLIEGDLNPDNSDVDKLFIQLVQTYNQLFEENPINASGVDAKAILSARLSKSRRLENLIAQLPGEKKNGLFGNLIALSLGLTPNFKSNFDLAEDAKLQLSKDTYDDDLDNLLAQIGDQYADLFLAAKNLSDAILLSDILRVNTEITKAPLSASMIKRYDEHHQDLTLLKALVRQQLPEKYKEIFFDQSKNGYAGYIDGGASQEEFYKFIKPILEKMDGTEELLVKLNREDLLRKQRTFDNGSIPHQIHLGELHAILRRQEDFYPFLKDNREKIEKILTFRIPYYVGPLARGNSRFAWMTRKSEETITPWNFEEVVDKGASAQSFIERMTNFDKNLPNEKVLPKHSLLYEYFTVYNELTKVKYVTEGMRKPAFLSGEQKKAIVDLLFKTNRKVTVKQLKEDYFKKIECFDSVEISGVEDRFNASLGTYHDLLKIIKDKDFLDNEENEDILEDIVLTLTLFEDREMIEERLKTYAHLFDDKVMKQLKRRRYTGWGRLSRKLINGIRDKQSGKTILDFLKSDGFANRNFMQLIHDDSLTFKEDIQKAQVSGQGDSLHEHIANLAGSPAIKKGILQTVKVVDELVKVMGRHKPENIVIEMARENQTTQKGQKNSRERMKRIEEGIKELGSQILKEHPVENTQLQNEKLYLYYLQNGRDMYVDQELDINRLSDYDVDHIVPQSFLKDDSIDNKVLTRSDKARGKSDNVPSEEVVKKMKNYWRQLLNAKLITQRKFDNLTKAERGGLSELDKAGFIKRQLVETRQITKHVAQILDSRMNTKYDENDKLIREVKVITLKSKLVSDFRKDFQFYKVREINNYHHAHDAYLNAVVGTALIKKYPKLESEFVYGDYKVYDVRKMIAKSEQEIGKATAKYFFYSNIMNFFKTEITLANGEIRKRPLIETNGETGEIVWDKGRDFATVRKVLSMPQVNIVKKTEVQTGGFSKESILPKRNSDKLIARKKDWDPKKYGGFDSPTVAYSVLVVAKVEKGKSKKLKSVKELLGITIMERSSFEKNPIDFLEAKGYKEVKKDLIIKLPKYSLFELENGRKRMLASAGELQKGNELALPSKYVNFLYLASHYEKLKGSPEDNEQKQLFVEQHKHYLDEIIEQISEFSKRVILADANLDKVLSAYNKHRDKPIREQAENIIHLFTLTNLGAPAAFKYFDTTIDRKRYTSTKEVLDATLIHQSITGLYETRIDLSQLGGDGGGGSGGSGGSGGSGGSGGSGGIPWLMKKPLQLTTLVPLQEYEERLLKQTMLTGSYKEKLQSLFLKYDALWQHWENQVGHRRIKPHHIATGTVNPRPQKQYPINPKAKASIQTVINDLLKQGVLIQQNSIMNTPVYPVPKPDGKWRMVLDYREVNKTIPLIAAQNQHSAGILSSIFRGKYKTTLDLSNGFWAHSITPESYWLTAFTWLGQQYCWTRLPQGFLNSPALFNADVVDLLKEVPNVQVYVDDIYISHDDPREHLEQLEKVFSLLLNAGYVVSLKKSEIAQHEVEFLGFNITKEGRGLTETFKQKLLNITPPRDLKQLQSILGKLNFARNFIPNFSELVKPLYNIIATAPGKYITWTTDNSQQLQNIISMLNSAENLEERNPEVRLIMKVNTSPSAGYIRFYNEFAKRPIMYLNYVYTKAEVKFTNTEKLLTTIHKGLIKALDLGMGQEILVYSPIVSMTKIQKTPLPERKALPIRWITWMSYLEDPRIQFHYDKTLPELQQVPTVTDDIIAKIKHPSEFSMVFYTDGSAIKHPNVNKSHNAGMGIAQVQFKPEFTVINTWSIPLGDHTAQLAEVAAVEFACKKALKIDGPVLIVTDSFYVAESVNKELPYWQSNGFFNNKKKPLKHVSKWKSIADCIQLKPDIIIIHEKGHQPTASTFHTEGNNLADKLATQGSYVVNAGKRTADGSEFEKRTADGSEFESPKKKAKVE

SEQ ID NO: 6104 - protein, 2024 aa, synthetic construct
MPAAKRVKLDGGDKKYSIGLDIGTNSVGWAVITDEYKVPSKKFKVLGNTDRHSIKKNLIGALLFDSGETAEATRLKRTARRRYTRRKNRICYLQEIFSNEMAKVDDSFFHRLEESFLVEEDKKHERHPIFGNIVDEVAYHEKYPTIYHLRKKLVDSTDKADLRLIYLALAHMIKFRGHFLIEGDLNPDNSDVDKLFIQLVQTYNQLFEENPINASGVDAKAILSARLSKSRRLENLIAQLPGEKKNGLFGNLIALSLGLTPNFKSNFDLAEDAKLQLSKDTYDDDLDNLLAQIGDQYADLFLAAKNLSDAILLSDILRVNTEITKAPLSASMIKRYDEHHQDLTLLKALVRQQLPEKYKEIFFDQSKNGYAGYIDGGASQEEFYKFIKPILEKMDGTEELLVKLNREDLLRKQRTFDNGSIPHQIHLGELHAILRRQEDFYPFLKDNREKIEKILTFRIPYYVGPLARGNSRFAWMTRKSEETITPWNFEEVVDKGASAQSFIERMTNFDKNLPNEKVLPKHSLLYEYFTVYNELTKVKYVTEGMRKPAFLSGEQKKAIVDLLFKTNRKVTVKQLKEDYFKKIECFDSVEISGVEDRFNASLGTYHDLLKIIKDKDFLDNEENEDILEDIVLTLTLFEDREMIEERLKTYAHLFDDKVMKQLKRRRYTGWGRLSRKLINGIRDKQSGKTILDFLKSDGFANRNFMQLIHDDSLTFKEDIQKAQVSGQGDSLHEHIANLAGSPAIKKGILQTVKVVDELVKVMGRHKPENIVIEMARENQTTQKGQKNSRERMKRIEEGIKELGSQILKEHPVENTQLQNEKLYLYYLQNGRDMYVDQELDINRLSDYDVDHIVPQSFLKDDSIDNKVLTRSDKARGKSDNVPSEEVVKKMKNYWRQLLNAKLITQRKFDNLTKAERGGLSELDKAGFIKRQLVETRQITKHVAQILDSRMNTKYDENDKLIREVKVITLKSKLVSDFRKDFQFYKVREINNYHHAHDAYLNAVVGTALIKKYPKLESEFVYGDYKVYDVRKMIAKSEQEIGKATAKYFFYSNIMNFFKTEITLANGEIRKRPLIETNGETGEIVWDKGRDFATVRKVLSMPQVNIVKKTEVQTGGFSKESILPKRNSDKLIARKKDWDPKKYGGFDSPTVAYSVLVVAKVEKGKSKKLKSVKELLGITIMERSSFEKNPIDFLEAKGYKEVKKDLIIKLPKYSLFELENGRKRMLASAGELQKGNELALPSKYVNFLYLASHYEKLKGSPEDNEQKQLFVEQHKHYLDEIIEQISEFSKRVILADANLDKVLSAYNKHRDKPIREQAENIIHLFTLTNLGAPAAFKYFDTTIDRKRYTSTKEVLDATLIHQSITGLYETRIDLSQLGGDGGGGSGGSGGSGGSGGSGGSGGPRSRAIDIPVPHADKISWKITDPVWVDQWPLTYEKTLAAIALVQEQLAAGHIEPTNSPWNTPIFIIKKKSGSWRLLQDLRAVNKVMVPMGALQPGLPSPVAIPLNYHKIVIDLKDCFFTIPLHPEDRPYFAFSVPQINFQSPMPRYQWKVLPQGMANSPTLCQKFVAAAIAPVRSQWPEAYILHYMDDILLACDSAEAAKACYAHIISCLTSYGLKIAPDKVQVSEPFSYLGFELHHQQVFTPRVCLKTDHLKTLNDFQKLLGDIQWLRPYLKLPTSALVPLNNILKGDPNPLSVRALTPEAKQSLALINKAIQNQSVQQISYNLPLVLLLLPTPHTPTAVFWQPNGTDPTKNGSPLLWLHLPASPSKVLLTYPSLLAMLIIKGRYTGRQLFGRDPHSIIIPYTQDQLTWLLQTSDEWAIALSSFTGDIDNHYPSDPVIQFAKLHQFIFPKITKCAPIPQATLVFTDGSSNGIAAYVIDNQPISIKSPYLSAQLVELYAILQVFTVLAHQPFNLYTDSAYIAQSVPLLETVPFIKSSTNATPLFSKLQQLILNRQHPFFIGHLRAHLNLPGPLAEGNALADAATQIFPIISDAGKRTADGSEFEKRTADGSEFESPKKKAKVE

SEQ ID NO: 6105 - protein, 2101 aa, synthetic construct
MPAAKRVKLDGGDKKYSIGLDIGTNSVGWAVITDEYKVPSKKFKVLGNTDRHSIKKNLIGALLFDSGETAEATRLKRTARRRYTRRKNRICYLQEIFSNEMAKVDDSFFHRLEESFLVEEDKKHERHPIFGNIVDEVAYHEKYPTIYHLRKKLVDSTDKADLRLIYLALAHMIKFRGHFLIEGDLNPDNSDVDKLFIQLVQTYNQLFEENPINASGVDAKAILSARLSKSRRLENLIAQLPGEKKNGLFGNLIALSLGLTPNFKSNFDLAEDAKLQLSKDTYDDDLDNLLAQIGDQYADLFLAAKNLSDAILLSDILRVNTEITKAPLSASMIKRYDEHHQDLTLLKALVRQQLPEKYKEIFFDQSKNGYAGYIDGGASQEEFYKFIKPILEKMDGTEELLVKLNREDLLRKQRTFDNGSIPHQIHLGELHAILRRQEDFYPFLKDNREKIEKILTFRIPYYVGPLARGNSRFAWMTRKSEETITPWNFEEVVDKGASAQSFIERMTNFDKNLPNEKVLPKHSLLYEYFTVYNELTKVKYVTEGMRKPAFLSGEQKKAIVDLLFKTNRKVTVKQLKEDYFKKIECFDSVEISGVEDRFNASLGTYHDLLKIIKDKDFLDNEENEDILEDIVLTLTLFEDREMIEERLKTYAHLFDDKVMKQLKRRRYTGWGRLSRKLINGIRDKQSGKTILDFLKSDGFANRNFMQLIHDDSLTFKEDIQKAQVSGQGDSLHEHIANLAGSPAIKKGILQTVKVVDELVKVMGRHKPENIVIEMARENQTTQKGQKNSRERMKRIEEGIKELGSQILKEHPVENTQLQNEKLYLYYLQNGRDMYVDQELDINRLSDYDVDHIVPQSFLKDDSIDNKVLTRSDKARGKSDNVPSEEVVKKMKNYWRQLLNAKLITQRKFDNLTKAERGGLSELDKAGFIKRQLVETRQITKHVAQILDSRMNTKYDENDKLIREVKVITLKSKLVSDFRKDFQFYKVREINNYHHAHDAYLNAVVGTALIKKYPKLESEFVYGDYKVYDVRKMIAKSEQEIGKATAKYFFYSNIMNFFKTEITLANGEIRKRPLIETNGETGEIVWDKGRDFATVRKVLSMPQVNIVKKTEVQTGGFSKESILPKRNSDKLIARKKDWDPKKYGGFDSPTVAYSVLVVAKVEKGKSKKLKSVKELLGITIMERSSFEKNPIDFLEAKGYKEVKKDLIIKLPKYSLFELENGRKRMLASAGELQKGNELALPSKYVNFLYLASHYEKLKGSPEDNEQKQLFVEQHKHYLDEIIEQISEFSKRVILADANLDKVLSAYNKHRDKPIREQAENIIHLFTLTNLGAPAAFKYFDTTIDRKRYTSTKEVLDATLIHQSITGLYETRIDLSQLGGDGGGGSGGSGGSGGSGGSGGSGGVLNLEEEYRLHEKPVPSSIDPSWLQLFPTVWAERAGMGLANQVPPVVVELRSGASPVAVRQYPMSKEAREGIRPHIQRFLDLGVLVPCQSPWNTPLLPVKKPGTNDYRPVQDLREINKRVQDIHPTVPNPYNLLSSLPPSHTWYSVLDLKDAFFCLKLHPNSQPLFAFEWRDPEKGNTGQLTWTRLPQGFKNSPTLFDEALHRDLAPFRALNPQVVLLQYVDDLLVAAPTYRDCKEGTQKLLQELSKLGYRVSAKKAQLCQKEVTYLGYLLKEGKRWLTPARKATVMKIPPPTTPRQVREFLGTAGFCRLWIPGFASLAAPLYPLTKESIPFIWTEEHQKAFDRIKEALLSAPALALPDLTKPFTLYVDERAGVARGVLTQTLGPWRRPVAYLSKKLDPVASGWPTCLKAVAAVALLLKDADKLTLGQNVTVIASHSLESIVRQPPDRWMTNARMTHYQSLLLNERVSFAPPAVLNPATLLPVESEATPVHRCSEILAEETGTRRDLKDQPLPGVPAWYTDGSSFIAEGKRRAGAAIVDGKRTVWASSLPEGTSAQKAELVALTQALRLAEGKDINIYTDSRYAFATAHIHGAIYKQRGLLTSAGKDIKNKEEILALLEAIHLPKRVAIIHCPGHQKGNDPVATGNRRADEAAKQAALSTRVLAETTKPAGKRTADGSEFEKRTADGSEFESPKKKAKVE

SEQ ID NO: 6106 - protein, 2101 aa, synthetic construct
MPAAKRVKLDGGDKKYSIGLDIGTNSVGWAVITDEYKVPSKKFKVLGNTDRHSIKKNLIGALLFDSGETAEATRLKRTARRRYTRRKNRICYLQEIFSNEMAKVDDSFFHRLEESFLVEEDKKHERHPIFGNIVDEVAYHEKYPTIYHLRKKLVDSTDKADLRLIYLALAHMIKFRGHFLIEGDLNPDNSDVDKLFIQLVQTYNQLFEENPINASGVDAKAILSARLSKSRRLENLIAQLPGEKKNGLFGNLIALSLGLTPNFKSNFDLAEDAKLQLSKDTYDDDLDNLLAQIGDQYADLFLAAKNLSDAILLSDILRVNTEITKAPLSASMIKRYDEHHQDLTLLKALVRQQLPEKYKEIFFDQSKNGYAGYIDGGASQEEFYKFIKPILEKMDGTEELLVKLNREDLLRKQRTFDNGSIPHQIHLGELHAILRRQEDFYPFLKDNREKIEKILTFRIPYYVGPLARGNSRFAWMTRKSEETITPWNFEEVVDKGASAQSFIERMTNFDKNLPNEKVLPKHSLLYEYFTVYNELTKVKYVTEGMRKPAFLSGEQKKAIVDLLFKTNRKVTVKQLKEDYFKKIECFDSVEISGVEDRFNASLGTYHDLLKIIKDKDFLDNEENEDILEDIVLTLTLFEDREMIEERLKTYAHLFDDKVMKQLKRRRYTGWGRLSRKLINGIRDKQSGKTILDFLKSDGFANRNFMQLIHDDSLTFKEDIQKAQVSGQGDSLHEHIANLAGSPAIKKGILQTVKVVDELVKVMGRHKPENIVIEMARENQTTQKGQKNSRERMKRIEEGIKELGSQILKEHPVENTQLQNEKLYLYYLQNGRDMYVDQELDINRLSDYDVDHIVPQSFLKDDSIDNKVLTRSDKARGKSDNVPSEEVVKKMKNYWRQLLNAKLITQRKFDNLTKAERGGLSELDKAGFIKRQLVETRQITKHVAQILDSRMNTKYDENDKLIREVKVITLKSKLVSDFRKDFQFYKVREINNYHHAHDAYLNAVVGTALIKKYPKLESEFVYGDYKVYDVRKMIAKSEQEIGKATAKYFFYSNIMNFFKTEITLANGEIRKRPLIETNGETGEIVWDKGRDFATVRKVLSMPQVNIVKKTEVQTGGFSKESILPKRNSDKLIARKKDWDPKKYGGFDSPTVAYSVLVVAKVEKGKSKKLKSVKELLGITIMERSSFEKNPIDFLEAKGYKEVKKDLIIKLPKYSLFELENGRKRMLASAGELQKGNELALPSKYVNFLYLASHYEKLKGSPEDNEQKQLFVEQHKHYLDEIIEQISEFSKRVILADANLDKVLSAYNKHRDKPIREQAENIIHLFTLTNLGAPAAFKYFDTTIDRKRYTSTKEVLDATLIHQSITGLYETRIDLSQLGGDGGGGSGGSGGSGGSGGSGGSGGVLNLEEEYRLHEKPVPSSIDPSWLQLFPTVWAERAGMGLANQVPPVVVELRSGASPVAVRQYPMSKEAREGIRPHIQRFLDLGVLVPCQSPWNTPLLPVKKPGTNDYRPVQDLREINKRVQDIHPTVPNPYNLLSSLPPSHTWYSVLDLKDAFFCLKLHPNSQPLFAFEWRDPEKGNTGQLTWTRLPQGFKNSPTLFNEALHRDLAPFRALNPQVVLLQYVDDLLVAAPTYRDCKEGTQKLLQELSKLGYRVSAKKAQLCQKEVTYLGYLLKEGKRWLTPARKATVMKIPPPTTPRQVREFLGTAGFCRLWIPGFASLAAPLYPLTKPSIPFIWTEEHQKAFDRIKEALLSAPALALPDLTKPFTLYVDERAGVARGVLTQTLGPWRRPVAYLSKKLDPVASGWPTCLKAVAAVALLLKDADKLTLGQNVTVIASHSLESIVRQPPDRWMTNARMTHYQSLLLNERVSFAPPAVLNPATLLPVESEATPVHRCSEILAEETGTRRDLKDQPLPGVPAWYTDGSSFIAEGKRRAGAAIVDGKRTVWASSLPEGTSAQKAELVALTQALRLAEGKDINIYTDSRYAFATAHIHGAIYKQRGWLTSAGKDIKNKEEILALLEAIHLPKRVAIIHCPGHQKGNDPVATGNRRADEAAKQAALSTRVLAETTKPAGKRTADGSEFEKRTADGSEFESPKKKAKVE

SEQ ID NO: 6107 - protein, 2103 aa, synthetic construct
MPAAKRVKLDGGDKKYSIGLDIGTNSVGWAVITDEYKVPSKKFKVLGNTDRHSIKKNLIGALLFDSGETAEATRLKRTARRRYTRRKNRICYLQEIFSNEMAKVDDSFFHRLEESFLVEEDKKHERHPIFGNIVDEVAYHEKYPTIYHLRKKLVDSTDKADLRLIYLALAHMIKFRGHFLIEGDLNPDNSDVDKLFIQLVQTYNQLFEENPINASGVDAKAILSARLSKSRRLENLIAQLPGEKKNGLFGNLIALSLGLTPNFKSNFDLAEDAKLQLSKDTYDDDLDNLLAQIGDQYADLFLAAKNLSDAILLSDILRVNTEITKAPLSASMIKRYDEHHQDLTLLKALVRQQLPEKYKEIFFDQSKNGYAGYIDGGASQEEFYKFIKPILEKMDGTEELLVKLNREDLLRKQRTFDNGSIPHQIHLGELHAILRRQEDFYPFLKDNREKIEKILTFRIPYYVGPLARGNSRFAWMTRKSEETITPWNFEEVVDKGASAQSFIERMTNFDKNLPNEKVLPKHSLLYEYFTVYNELTKVKYVTEGMRKPAFLSGEQKKAIVDLLFKTNRKVTVKQLKEDYFKKIECFDSVEISGVEDRFNASLGTYHDLLKIIKDKDFLDNEENEDILEDIVLTLTLFEDREMIEERLKTYAHLFDDKVMKQLKRRRYTGWGRLSRKLINGIRDKQSGKTILDFLKSDGFANRNFMQLIHDDSLTFKEDIQKAQVSGQGDSLHEHIANLAGSPAIKKGILQTVKVVDELVKVMGRHKPENIVIEMARENQTTQKGQKNSRERMKRIEEGIKELGSQILKEHPVENTQLQNEKLYLYYLQNGRDMYVDQELDINRLSDYDVDHIVPQSFLKDDSIDNKVLTRSDKARGKSDNVPSEEVVKKMKNYWRQLLNAKLITQRKFDNLTKAERGGLSELDKAGFIKRQLVETRQITKHVAQILDSRMNTKYDENDKLIREVKVITLKSKLVSDFRKDFQFYKVREINNYHHAHDAYLNAVVGTALIKKYPKLESEFVYGDYKVYDVRKMIAKSEQEIGKATAKYFFYSNIMNFFKTEITLANGEIRKRPLIETNGETGEIVWDKGRDFATVRKVLSMPQVNIVKKTEVQTGGFSKESILPKRNSDKLIARKKDWDPKKYGGFDSPTVAYSVLVVAKVEKGKSKKLKSVKELLGITIMERSSFEKNPIDFLEAKGYKEVKKDLIIKLPKYSLFELENGRKRMLASAGELQKGNELALPSKYVNFLYLASHYEKLKGSPEDNEQKQLFVEQHKHYLDEIIEQISEFSKRVILADANLDKVLSAYNKHRDKPIREQAENIIHLFTLTNLGAPAAFKYFDTTIDRKRYTSTKEVLDATLIHQSITGLYETRIDLSQLGGDGGGGSGGSGGSGGSGGSGGSGGTLNIEDEYRLHETSKEPDVPLGSTWLSDFPQAWAETGGMGLAVRQAPLIIPLKATSTPVSIKQYPMSQEARLGIKPHIQRLLDQGILVPCQSPWNTPLLPVKKPGTNDYRPVQDLREVNKRVEDIHPTVPNPYNLLSGLPPSHQWYTVLDLKDAFFCLRLHPTSQPLFAFEWRDPEMGISGQLTWTRLPQGFKNSPTLFNEALHRDLADFRIQHPDLILLQYVDDLLLAATSEQDCQRGTRALLQTLGNLGYRASAKKAQICQKQVKYLGYLLKEGQRWLTEARKETVMGQPTPKTPRQLREFLGKAGFCRLFIPGFAEMAAPLYPLTKPGTLFNWGPDQQKAYQEIKQALLTAPALGLPDLTKPFELFVDEKQGYAKGVLTQKLGPWRRPVAYLSKKLDPVAAGWPPCLRMVAAIAVLTKDAGKLTMGQPLVILAPHAVEALVKQPPDRWLSNARMTHYQAMLLDTDRVQFGPVVALNPATLLPLPEKEAPHDCLEILAETHGTRPDLTDQPIPDADYTWYTDGSSFLQEGQRRAGAAVTTETEVIWARALPAGTSAQRAELIALTQALKMAEGKKLNVYTDSRYAFATAHVHGEIYRRRGWLTSEGREIKNKNEILALLKALFLPKRLSIIHCPGHQKGNSAEARGNRMADQAAREAAMKAVLETSTLLAGKRTADGSEFEKRTADGSEFESPKKKAKVE

SEQ ID NO: 6108 - protein, 2092 aa, synthetic construct
MPAAKRVKLDGGDKKYSIGLDIGTNSVGWAVITDEYKVPSKKFKVLGNTDRHSIKKNLIGALLFDSGETAEATRLKRTARRRYTRRKNRICYLQEIFSNEMAKVDDSFFHRLEESFLVEEDKKHERHPIFGNIVDEVAYHEKYPTIYHLRKKLVDSTDKADLRLIYLALAHMIKFRGHFLIEGDLNPDNSDVDKLFIQLVQTYNQLFEENPINASGVDAKAILSARLSKSRRLENLIAQLPGEKKNGLFGNLIALSLGLTPNFKSNFDLAEDAKLQLSKDTYDDDLDNLLAQIGDQYADLFLAAKNLSDAILLSDILRVNTEITKAPLSASMIKRYDEHHQDLTLLKALVRQQLPEKYKEIFFDQSKNGYAGYIDGGASQEEFYKFIKPILEKMDGTEELLVKLNREDLLRKQRTFDNGSIPHQIHLGELHAILRRQEDFYPFLKDNREKIEKILTFRIPYYVGPLARGNSRFAWMTRKSEETITPWNFEEVVDKGASAQSFIERMTNFDKNLPNEKVLPKHSLLYEYFTVYNELTKVKYVTEGMRKPAFLSGEQKKAIVDLLFKTNRKVTVKQLKEDYFKKIECFDSVEISGVEDRFNASLGTYHDLLKIIKDKDFLDNEENEDILEDIVLTLTLFEDREMIEERLKTYAHLFDDKVMKQLKRRRYTGWGRLSRKLINGIRDKQSGKTILDFLKSDGFANRNFMQLIHDDSLTFKEDIQKAQVSGQGDSLHEHIANLAGSPAIKKGILQTVKVVDELVKVMGRHKPENIVIEMARENQTTQKGQKNSRERMKRIEEGIKELGSQILKEHPVENTQLQNEKLYLYYLQNGRDMYVDQELDINRLSDYDVDHIVPQSFLKDDSIDNKVLTRSDKARGKSDNVPSEEVVKKMKNYWRQLLNAKLITQRKFDNLTKAERGGLSELDKAGFIKRQLVETRQITKHVAQILDSRMNTKYDENDKLIREVKVITLKSKLVSDFRKDFQFYKVREINNYHHAHDAYLNAVVGTALIKKYPKLESEFVYGDYKVYDVRKMIAKSEQEIGKATAKYFFYSNIMNFFKTEITLANGEIRKRPLIETNGETGEIVWDKGRDFATVRKVLSMPQVNIVKKTEVQTGGFSKESILPKRNSDKLIARKKDWDPKKYGGFDSPTVAYSVLVVAKVEKGKSKKLKSVKELLGITIMERSSFEKNPIDFLEAKGYKEVKKDLIIKLPKYSLFELENGRKRMLASAGELQKGNELALPSKYVNFLYLASHYEKLKGSPEDNEQKQLFVEQHKHYLDEIIEQISEFSKRVILADANLDKVLSAYNKHRDKPIREQAENIIHLFTLTNLGAPAAFKYFDTTIDRKRYTSTKEVLDATLIHQSITGLYETRIDLSQLGGDGGGGGGSGGTAPLEEEYRLFLEAPIQNVTLLEQWKREIPKVWAEINPPGLASTQAPIHVQLLSTALPVRVRQYPITLEAKRSLRETIRKFRAAGILRPVHSPWNTPLLPVRKSGTSEYRMVQDLREVNKRVETIHPTVPNPYTLLSLLPPDRIWYSVLDLKDAFFCIPLAPESQLIFAFEWADAEEGESGQLTWTRLPQGFKNSPTLFNEALNRDLQGFRLDHPSVSLLQYVDDLLIAADTQAACLSATRDLLMTLAELGYRVSGKKAQLCQEEVTYLGFKIHKGSRSLSNSRTQAILQIPVPKTKRQVREFLGKIGYCRLFIPGFAELAQPLYAATRPGNDPLVWGEKEEEAFQSLKLALTQPPALALPSLDKPFQLFVEETSGAAKGVLTQALGPWKRPVAYLSKRLDPVAAGWPRCLRAIAAAALLTREASKLTFGQDIEITSSHNLESLLRSPPDKWLTNARITQYQVLLLDPPRVRFKQTAALNPATLLPETDDTLPIHHCLDTLDSLTSTRPDLTDQPLAQAEATLFTDGSSYIRDGKRYAGAAVVTLDSVIWAEPLPIGTSAQKAELIALTKALEWSKDKSVNIYTDSRYAFATLHVHGMIYRERGWLTAGGKAIKNAPEILALLTAVWLPKRVAVMHCKGHQKDDAPTSTGNRRADEVAREVAIRPLSTQATISAGKRTADGSEFEKRTADGSEFESPKKKAKVE

SEQ ID NO: 6109 - protein, 2081 aa, synthetic construct
MPAAKRVKLDGGDKKYSIGLDIGTNSVGWAVITDEYKVPSKKFKVLGNTDRHSIKKNLIGALLFDSGETAEATRLKRTARRRYTRRKNRICYLQEIFSNEMAKVDDSFFHRLEESFLVEEDKKHERHPIFGNIVDEVAYHEKYPTIYHLRKKLVDSTDKADLRLIYLALAHMIKFRGHFLIEGDLNPDNSDVDKLFIQLVQTYNQLFEENPINASGVDAKAILSARLSKSRRLENLIAQLPGEKKNGLFGNLIALSLGLTPNFKSNFDLAEDAKLQLSKDTYDDDLDNLLAQIGDQYADLFLAAKNLSDAILLSDILRVNTEITKAPLSASMIKRYDEHHQDLTLLKALVRQQLPEKYKEIFFDQSKNGYAGYIDGGASQEEFYKFIKPILEKMDGTEELLVKLNREDLLRKQRTFDNGSIPHQIHLGELHAILRRQEDFYPFLKDNREKIEKILTFRIPYYVGPLARGNSRFAWMTRKSEETITPWNFEEVVDKGASAQSFIERMTNFDKNLPNEKVLPKHSLLYEYFTVYNELTKVKYVTEGMRKPAFLSGEQKKAIVDLLFKTNRKVTVKQLKEDYFKKIECFDSVEISGVEDRFNASLGTYHDLLKIIKDKDFLDNEENEDILEDIVLTLTLFEDREMIEERLKTYAHLFDDKVMKQLKRRRYTGWGRLSRKLINGIRDKQSGKTILDFLKSDGFANRNFMQLIHDDSLTFKEDIQKAQVSGQGDSLHEHIANLAGSPAIKKGILQTVKVVDELVKVMGRHKPENIVIEMARENQTTQKGQKNSRERMKRIEEGIKELGSQILKEHPVENTQLQNEKLYLYYLQNGRDMYVDQELDINRLSDYDVDHIVPQSFLKDDSIDNKVLTRSDKARGKSDNVPSEEVVKKMKNYWRQLLNAKLITQRKFDNLTKAERGGLSELDKAGFIKRQLVETRQITKHVAQILDSRMNTKYDENDKLIREVKVITLKSKLVSDFRKDFQFYKVREINNYHHAHDAYLNAVVGTALIKKYPKLESEFVYGDYKVYDVRKMIAKSEQEIGKATAKYFFYSNIMNFFKTEITLANGEIRKRPLIETNGETGEIVWDKGRDFATVRKVLSMPQVNIVKKTEVQTGGFSKESILPKRNSDKLIARKKDWDPKKYGGFDSPTVAYSVLVVAKVEKGKSKKLKSVKELLGITIMERSSFEKNPIDFLEAKGYKEVKKDLIIKLPKYSLFELENGRKRMLASAGELQKGNELALPSKYVNFLYLASHYEKLKGSPEDNEQKQLFVEQHKHYLDEIIEQISEFSKRVILADANLDKVLSAYNKHRDKPIREQAENIIHLFTLTNLGAPAAFKYFDTTIDRKRYTSTKEVLDATLIHQSITGLYETRIDLSQLGGDGGGGGGSGGVPWILKKPLELTIKLDLEEQQGTLLNNSILSKKGKEELKQLFEKYSALWQSWENQVGHRRIRPHKIATGTVKPTPQKQYHINPKAKPDIQIVINDLLKQGVLIQKESTMNTPVYPVPKPNGRWRMVLDYRAVNKVTPLIAVQNQHSYGILGSLFKGRYKTTIDLSNGFWAHPIVPEDYWITAFTWQGKQYCWTVLPQGFLNSPGLFTGDVVDLLQGIPNVEVYVDDVYISHDSEKEHLEYLDILFNRLKEAGYIISLKKSNIANSIVDFLGFQITNEGRGLTDTFKEKLENITAPTTLKQLQSILGLLNFARNFIPDFTELIAPLYALIPKSTKNYVPWQIEHSTTLETLITKLNGAEYLQGRKGDKTLIMKVNASYTTGYIRYYNEGEKKPISYVSIVFSKTELKFTELEKLLTTVHKGLLKALDLSMGQNIHVYSPIVSMQNIQKTPQTAKKALASRWLSWLSYLEDPRIRFFYDPQMPALKDLPAVDTGKDNKKHPSNFQHIFYTDGSAITSPTKEGHLNAGMGIVYFINKDGNLQKQQEWSISLGNHTAQFAEIAAFEFALKKCLPLGGNILVVTDSNYVAKAYNEELDVWASNGFVNNRKKPLKHISKWKSVADLKRLRPDVVVTHEPGHQKLDSSPHAYGNNLADQLATQASFKVHAGKRTADGSEFEKRTADGSEFESPKKKAKVE

SEQ ID NO: 6110 - protein, 2088 aa, synthetic construct
MPAAKRVKLDGGDKKYSIGLDIGTNSVGWAVITDEYKVPSKKFKVLGNTDRHSIKKNLIGALLFDSGETAEATRLKRTARRRYTRRKNRICYLQEIFSNEMAKVDDSFFHRLEESFLVEEDKKHERHPIFGNIVDEVAYHEKYPTIYHLRKKLVDSTDKADLRLIYLALAHMIKFRGHFLIEGDLNPDNSDVDKLFIQLVQTYNQLFEENPINASGVDAKAILSARLSKSRRLENLIAQLPGEKKNGLFGNLIALSLGLTPNFKSNFDLAEDAKLQLSKDTYDDDLDNLLAQIGDQYADLFLAAKNLSDAILLSDILRVNTEITKAPLSASMIKRYDEHHQDLTLLKALVRQQLPEKYKEIFFDQSKNGYAGYIDGGASQEEFYKFIKPILEKMDGTEELLVKLNREDLLRKQRTFDNGSIPHQIHLGELHAILRRQEDFYPFLKDNREKIEKILTFRIPYYVGPLARGNSRFAWMTRKSEETITPWNFEEVVDKGASAQSFIERMTNFDKNLPNEKVLPKHSLLYEYFTVYNELTKVKYVTEGMRKPAFLSGEQKKAIVDLLFKTNRKVTVKQLKEDYFKKIECFDSVEISGVEDRFNASLGTYHDLLKIIKDKDFLDNEENEDILEDIVLTLTLFEDREMIEERLKTYAHLFDDKVMKQLKRRRYTGWGRLSRKLINGIRDKQSGKTILDFLKSDGFANRNFMQLIHDDSLTFKEDIQKAQVSGQGDSLHEHIANLAGSPAIKKGILQTVKVVDELVKVMGRHKPENIVIEMARENQTTQKGQKNSRERMKRIEEGIKELGSQILKEHPVENTQLQNEKLYLYYLQNGRDMYVDQELDINRLSDYDVDHIVPQSFLKDDSIDNKVLTRSDKARGKSDNVPSEEVVKKMKNYWRQLLNAKLITQRKFDNLTKAERGGLSELDKAGFIKRQLVETRQITKHVAQILDSRMNTKYDENDKLIREVKVITLKSKLVSDFRKDFQFYKVREINNYHHAHDAYLNAVVGTALIKKYPKLESEFVYGDYKVYDVRKMIAKSEQEIGKATAKYFFYSNIMNFFKTEITLANGEIRKRPLIETNGETGEIVWDKGRDFATVRKVLSMPQVNIVKKTEVQTGGFSKESILPKRNSDKLIARKKDWDPKKYGGFDSPTVAYSVLVVAKVEKGKSKKLKSVKELLGITIMERSSFEKNPIDFLEAKGYKEVKKDLIIKLPKYSLFELENGRKRMLASAGELQKGNELALPSKYVNFLYLASHYEKLKGSPEDNEQKQLFVEQHKHYLDEIIEQISEFSKRVILADANLDKVLSAYNKHRDKPIREQAENIIHLFTLTNLGAPAAFKYFDTTIDRKRYTSTKEVLDATLIHQSITGLYETRIDLSQLGGDGGGGGGSGGVLNLEEEYRLHEKPVPSSIDPSWLQLFPTVWAERAGMGLANQVPPVVVELRSGASPVAVRQYPMSKEAREGIRPHIQKFLDLGVLVPCRSPWNTPLLPVKKPGTNDYRPVQDLREINKRVQDIHPTVPNPYNLLSSLPPSYTWYSVLDLKDAFFCLRLHPNSQPLFAFEWKDPEKGNTGQLTWTRLPQGFKNSPTLFNEALHRDLAPFRALNPQVVLLQYVDDLLVAAPTYEDCKKGTQKLLQELSKLGYRVSAKKAQLCQREVTYLGYLLKEGKRWLTPARKATVMKIPVPTTPRQVREFLGTAGFCRLWIPGFASLAAPLYPLTKPSIPFIWTEEHQQAFDHIKKALLSAPALALPDLTKPFTLYIDERAGVARGVLTQTLGPWRRPVAYLSKKLDPVASGWPTCLKAVAAVALLLKDADKLTLGQNVTVIASHSLESIVRQPPDRWMTNARMTHYQSLLLNERVSFAPPAVLNPATLLPVESEATPVHRCSEILAEETGTRRDLEDQPLPGVPTWYTDGSSFITEGKRRAGAPIVDGKRTVWASSLPEGTSAQKAELVALTQALRLAEGKNINIYTDSRYAFATAHIHGAIYKQRGWLTSAGKDIKNKEEILALLEAIHLPRRVAIIHCPGHQRGSNPVATGNRRADEAAKQAALSTRVLAGTTKPAGKRTADGSEFEKRTADGSEFESPKKKAKVE

SEQ ID NO: 6111 - protein, 2090 aa, synthetic construct
MPAAKRVKLDGGDKKYSIGLDIGTNSVGWAVITDEYKVPSKKFKVLGNTDRHSIKKNLIGALLFDSGETAEATRLKRTARRRYTRRKNRICYLQEIFSNEMAKVDDSFFHRLEESFLVEEDKKHERHPIFGNIVDEVAYHEKYPTIYHLRKKLVDSTDKADLRLIYLALAHMIKFRGHFLIEGDLNPDNSDVDKLFIQLVQTYNQLFEENPINASGVDAKAILSARLSKSRRLENLIAQLPGEKKNGLFGNLIALSLGLTPNFKSNFDLAEDAKLQLSKDTYDDDLDNLLAQIGDQYADLFLAAKNLSDAILLSDILRVNTEITKAPLSASMIKRYDEHHQDLTLLKALVRQQLPEKYKEIFFDQSKNGYAGYIDGGASQEEFYKFIKPILEKMDGTEELLVKLNREDLLRKQRTFDNGSIPHQIHLGELHAILRRQEDFYPFLKDNREKIEKILTFRIPYYVGPLARGNSRFAWMTRKSEETITPWNFEEVVDKGASAQSFIERMTNFDKNLPNEKVLPKHSLLYEYFTVYNELTKVKYVTEGMRKPAFLSGEQKKAIVDLLFKTNRKVTVKQLKEDYFKKIECFDSVEISGVEDRFNASLGTYHDLLKIIKDKDFLDNEENEDILEDIVLTLTLFEDREMIEERLKTYAHLFDDKVMKQLKRRRYTGWGRLSRKLINGIRDKQSGKTILDFLKSDGFANRNFMQLIHDDSLTFKEDIQKAQVSGQGDSLHEHIANLAGSPAIKKGILQTVKVVDELVKVMGRHKPENIVIEMARENQTTQKGQKNSRERMKRIEEGIKELGSQILKEHPVENTQLQNEKLYLYYLQNGRDMYVDQELDINRLSDYDVDHIVPQSFLKDDSIDNKVLTRSDKARGKSDNVPSEEVVKKMKNYWRQLLNAKLITQRKFDNLTKAERGGLSELDKAGFIKRQLVETRQITKHVAQILDSRMNTKYDENDKLIREVKVITLKSKLVSDFRKDFQFYKVREINNYHHAHDAYLNAVVGTALIKKYPKLESEFVYGDYKVYDVRKMIAKSEQEIGKATAKYFFYSNIMNFFKTEITLANGEIRKRPLIETNGETGEIVWDKGRDFATVRKVLSMPQVNIVKKTEVQTGGFSKESILPKRNSDKLIARKKDWDPKKYGGFDSPTVAYSVLVVAKVEKGKSKKLKSVKELLGITIMERSSFEKNPIDFLEAKGYKEVKKDLIIKLPKYSLFELENGRKRMLASAGELQKGNELALPSKYVNFLYLASHYEKLKGSPEDNEQKQLFVEQHKHYLDEIIEQISEFSKRVILADANLDKVLSAYNKHRDKPIREQAENIIHLFTLTNLGAPAAFKYFDTTIDRKRYTSTKEVLDATLIHQSITGLYETRIDLSQLGGDGGGGGGSGGTLNIEDEYRLHETSKEPDVSLGSTWLSDFPQAWAETGGMGLAVRQAPLIIPLKATSTPVSIKQYPMSQEARLGIKPHIQRLLDQGILVPCQSPWNTPLLPVKKPGTNDYRPVQDLREVNKRVEDIHPTVPNPYNLLSGLPPSHQWYTVLDLKDAFFCLRLHPTSQPLFAFEWRDPEMGISGQLTWTRLPQGFKNSPTLFDEALHRDLAGFRIQHPDLILLQYVDDLLLAATSELDCQQGTRALLQTLGDLGYRASAKKAQICQKQVKYLGYLLKEGQRWLTEARKETVMGQPIPKTPRQLREFLGTAGFCRLWIPGFAEMAAPLYPLTKTGTLFNWGPDQQKAFQEIKQALLTAPALGLPDLTKPFELFVDEKQGYAKGVLTQKLGPWRRPVAYLSKKLDPVAAGWPPCLRMVAAIAVLTKDAGKLTMGQPLVILAPHAVEALVKQPPDRWLSNARMTHYQALLLDTDRVQFGPVVALNPATLLPLPEEGLQHDCLDILAEAHGTRSDLMDQPLPDADHTWYTDGSSFLQEGQRKAGAAVTTETEVIWARALPAGTSAQRAELIALTQALKMAEGKKLNVYTDSRYAFATAHIHGEIYRRRGLLTSEGKEIKNKDEILALLKALFLPKRLSIIHCPGHQKGNSAEARGNRMADQAAREVATRETPETSTLLAGKRTADGSEFEKRTADGSEFESPKKKAKVE

SEQ ID NO: 6112 - protein, 2090 aa, synthetic construct
MPAAKRVKLDGGDKKYSIGLDIGTNSVGWAVITDEYKVPSKKFKVLGNTDRHSIKKNLIGALLFDSGETAEATRLKRTARRRYTRRKNRICYLQEIFSNEMAKVDDSFFHRLEESFLVEEDKKHERHPIFGNIVDEVAYHEKYPTIYHLRKKLVDSTDKADLRLIYLALAHMIKFRGHFLIEGDLNPDNSDVDKLFIQLVQTYNQLFEENPINASGVDAKAILSARLSKSRRLENLIAQLPGEKKNGLFGNLIALSLGLTPNFKSNFDLAEDAKLQLSKDTYDDDLDNLLAQIGDQYADLFLAAKNLSDAILLSDILRVNTEITKAPLSASMIKRYDEHHQDLTLLKALVRQQLPEKYKEIFFDQSKNGYAGYIDGGASQEEFYKFIKPILEKMDGTEELLVKLNREDLLRKQRTFDNGSIPHQIHLGELHAILRRQEDFYPFLKDNREKIEKILTFRIPYYVGPLARGNSRFAWMTRKSEETITPWNFEEVVDKGASAQSFIERMTNFDKNLPNEKVLPKHSLLYEYFTVYNELTKVKYVTEGMRKPAFLSGEQKKAIVDLLFKTNRKVTVKQLKEDYFKKIECFDSVEISGVEDRFNASLGTYHDLLKIIKDKDFLDNEENEDILEDIVLTLTLFEDREMIEERLKTYAHLFDDKVMKQLKRRRYTGWGRLSRKLINGIRDKQSGKTILDFLKSDGFANRNFMQLIHDDSLTFKEDIQKAQVSGQGDSLHEHIANLAGSPAIKKGILQTVKVVDELVKVMGRHKPENIVIEMARENQTTQKGQKNSRERMKRIEEGIKELGSQILKEHPVENTQLQNEKLYLYYLQNGRDMYVDQELDINRLSDYDVDHIVPQSFLKDDSIDNKVLTRSDKARGKSDNVPSEEVVKKMKNYWRQLLNAKLITQRKFDNLTKAERGGLSELDKAGFIKRQLVETRQITKHVAQILDSRMNTKYDENDKLIREVKVITLKSKLVSDFRKDFQFYKVREINNYHHAHDAYLNAVVGTALIKKYPKLESEFVYGDYKVYDVRKMIAKSEQEIGKATAKYFFYSNIMNFFKTEITLANGEIRKRPLIETNGETGEIVWDKGRDFATVRKVLSMPQVNIVKKTEVQTGGFSKESILPKRNSDKLIARKKDWDPKKYGGFDSPTVAYSVLVVAKVEKGKSKKLKSVKELLGITIMERSSFEKNPIDFLEAKGYKEVKKDLIIKLPKYSLFELENGRKRMLASAGELQKGNELALPSKYVNFLYLASHYEKLKGSPEDNEQKQLFVEQHKHYLDEIIEQISEFSKRVILADANLDKVLSAYNKHRDKPIREQAENIIHLFTLTNLGAPAAFKYFDTTIDRKRYTSTKEVLDATLIHQSITGLYETRIDLSQLGGDGGGGGGSGGTLNIEDEYRLHETSKEPDVSLGSTWLSDFPQAWAETGGMGLAVRQAPLIIPLKATSTPVSIKQYPMSQEARLGIKPHIQRLLDQGILVPCQSPWNTPLLPVKKPGTNDYRPVQDLREVNKRVEDIHPTVPNPYNLLSGLPPSHQWYTVLDLKDAFFCLRLHPTSQPLFAFEWRDPEMGISGQLTWTRLPQGFKNSPTLFNEALHRDLAGFRIQHPDLILLQYVDDLLLAATSELDCQQGTRALLQTLGDLGYRASAKKAQICQKQVKYLGYLLKEGQRWLTEARKETVMGQPIPKTPRQLREFLGTAGFCRLWIPGFAEMAAPLYPLTKPGTLFNWGPDQQKAFQEIKQALLTAPALGLPDLTKPFELFVDEKQGYAKGVLTQKLGPWRRPVAYLSKKLDPVAAGWPPCLRMVAAIAVLTKDAGKLTMGQPLVILAPHAVEALVKQPPDRWLSNARMTHYQALLLDTDRVQFGPVVALNPATLLPLPEEGLQHDCLDILAEAHGTRSDLMDQPLPDADHTWYTDGSSFLQEGQRKAGAAVTTETEVIWARALPAGTSAQRAELIALTQALKMAEGKKLNVYTDSRYAFATAHIHGEIYRRRGWLTSEGKEIKNKDEILALLKALFLPKRLSIIHCPGHQKGNSAEARGNRMADQAAREVATRETPETSTLLAGKRTADGSEFEKRTADGSEFESPKKKAKVE

SEQ ID NO: 6113 - protein, 2110 aa, synthetic construct
MPAAKRVKLDGGDKKYSIGLDIGTNSVGWAVITDEYKVPSKKFKVLGNTDRHSIKKNLIGALLFDSGETAEATRLKRTARRRYTRRKNRICYLQEIFSNEMAKVDDSFFHRLEESFLVEEDKKHERHPIFGNIVDEVAYHEKYPTIYHLRKKLVDSTDKADLRLIYLALAHMIKFRGHFLIEGDLNPDNSDVDKLFIQLVQTYNQLFEENPINASGVDAKAILSARLSKSRRLENLIAQLPGEKKNGLFGNLIALSLGLTPNFKSNFDLAEDAKLQLSKDTYDDDLDNLLAQIGDQYADLFLAAKNLSDAILLSDILRVNTEITKAPLSASMIKRYDEHHQDLTLLKALVRQQLPEKYKEIFFDQSKNGYAGYIDGGASQEEFYKFIKPILEKMDGTEELLVKLNREDLLRKQRTFDNGSIPHQIHLGELHAILRRQEDFYPFLKDNREKIEKILTFRIPYYVGPLARGNSRFAWMTRKSEETITPWNFEEVVDKGASAQSFIERMTNFDKNLPNEKVLPKHSLLYEYFTVYNELTKVKYVTEGMRKPAFLSGEQKKAIVDLLFKTNRKVTVKQLKEDYFKKIECFDSVEISGVEDRFNASLGTYHDLLKIIKDKDFLDNEENEDILEDIVLTLTLFEDREMIEERLKTYAHLFDDKVMKQLKRRRYTGWGRLSRKLINGIRDKQSGKTILDFLKSDGFANRNFMQLIHDDSLTFKEDIQKAQVSGQGDSLHEHIANLAGSPAIKKGILQTVKVVDELVKVMGRHKPENIVIEMARENQTTQKGQKNSRERMKRIEEGIKELGSQILKEHPVENTQLQNEKLYLYYLQNGRDMYVDQELDINRLSDYDVDHIVPQSFLKDDSIDNKVLTRSDKARGKSDNVPSEEVVKKMKNYWRQLLNAKLITQRKFDNLTKAERGGLSELDKAGFIKRQLVETRQITKHVAQILDSRMNTKYDENDKLIREVKVITLKSKLVSDFRKDFQFYKVREINNYHHAHDAYLNAVVGTALIKKYPKLESEFVYGDYKVYDVRKMIAKSEQEIGKATAKYFFYSNIMNFFKTEITLANGEIRKRPLIETNGETGEIVWDKGRDFATVRKVLSMPQVNIVKKTEVQTGGFSKESILPKRNSDKLIARKKDWDPKKYGGFDSPTVAYSVLVVAKVEKGKSKKLKSVKELLGITIMERSSFEKNPIDFLEAKGYKEVKKDLIIKLPKYSLFELENGRKRMLASAGELQKGNELALPSKYVNFLYLASHYEKLKGSPEDNEQKQLFVEQHKHYLDEIIEQISEFSKRVILADANLDKVLSAYNKHRDKPIREQAENIIHLFTLTNLGAPAAFKYFDTTIDRKRYTSTKEVLDATLIHQSITGLYETRIDLSQLGGDGGGGGGSGGVQEISDSRPMLHIYLNGRRFLGLLDTGADKTCIAGRDWPANWPIHQTESSLQGLGMACGVARSSQPLRWQHEDKSGIIHPFVIPTLPFTLWGRDIMKDIKVRLMTDSPDDSQDLMIGAIESNLFADQISWKSDQPVWLNQWPLKQEKLQALQQLVTEQLQLGHLEESNSPWNTPVFVIKKKSGKWRLLQDLRAVNATMHDMGALQPGLPSPVAVPKGWEIIIIDLQDCFFNIKLHPEDCKRFAFSVPSPNFKRPYQRFQWKVLPQGMKNSPTLCQKFVDKAILTVRDKYQDSYIVHYMDDILLAHPSRSIVDEILTSMIQALNKHGLVVSTEKIQKYDNLKYLGTHIQGDSVSYQKLQIRTDKLRTLNDFQKLLGNINWIRPFLKLTTGELKPLFEILNGDSNPISTRKLTPEACKALQLMNERLSTARVKRLDLSQPWSLCILKTEYTPTACLWQDGVVEWIHLPHISPKVITPYDIFCTQLIIKGRHRSKELFSKDPDYIVVPYTKVQFDLLLQEKEDWPISLLGFLGEVHFHLPKDPLLTFTLQTAIIFPHMTSTTPLEKGIVIFTDGSANGRSVTYIQGREPIIKENTQNTAQQAEIVAVITAFEEVSQPFNLYTDSKYVTGLFPEIETATLSPRTKIYTELKHLQRLIHKRQEKFYIGHIRGHTGLPGPLAQGNAYADSLTRILTAAGKRTADGSEFEKRTADGSEFESPKKKAKVE

SEQ ID NO: 6114 - protein, 2170 aa, synthetic construct
MPAAKRVKLDGGDKKYSIGLDIGTNSVGWAVITDEYKVPSKKFKVLGNTDRHSIKKNLIGALLFDSGETAEATRLKRTARRRYTRRKNRICYLQEIFSNEMAKVDDSFFHRLEESFLVEEDKKHERHPIFGNIVDEVAYHEKYPTIYHLRKKLVDSTDKADLRLIYLALAHMIKFRGHFLIEGDLNPDNSDVDKLFIQLVQTYNQLFEENPINASGVDAKAILSARLSKSRRLENLIAQLPGEKKNGLFGNLIALSLGLTPNFKSNFDLAEDAKLQLSKDTYDDDLDNLLAQIGDQYADLFLAAKNLSDAILLSDILRVNTEITKAPLSASMIKRYDEHHQDLTLLKALVRQQLPEKYKEIFFDQSKNGYAGYIDGGASQEEFYKFIKPILEKMDGTEELLVKLNREDLLRKQRTFDNGSIPHQIHLGELHAILRRQEDFYPFLKDNREKIEKILTFRIPYYVGPLARGNSRFAWMTRKSEETITPWNFEEVVDKGASAQSFIERMTNFDKNLPNEKVLPKHSLLYEYFTVYNELTKVKYVTEGMRKPAFLSGEQKKAIVDLLFKTNRKVTVKQLKEDYFKKIECFDSVEISGVEDRFNASLGTYHDLLKIIKDKDFLDNEENEDILEDIVLTLTLFEDREMIEERLKTYAHLFDDKVMKQLKRRRYTGWGRLSRKLINGIRDKQSGKTILDFLKSDGFANRNFMQLIHDDSLTFKEDIQKAQVSGQGDSLHEHIANLAGSPAIKKGILQTVKVVDELVKVMGRHKPENIVIEMARENQTTQKGQKNSRERMKRIEEGIKELGSQILKEHPVENTQLQNEKLYLYYLQNGRDMYVDQELDINRLSDYDVDHIVPQSFLKDDSIDNKVLTRSDKARGKSDNVPSEEVVKKMKNYWRQLLNAKLITQRKFDNLTKAERGGLSELDKAGFIKRQLVETRQITKHVAQILDSRMNTKYDENDKLIREVKVITLKSKLVSDFRKDFQFYKVREINNYHHAHDAYLNAVVGTALIKKYPKLESEFVYGDYKVYDVRKMIAKSEQEIGKATAKYFFYSNIMNFFKTEITLANGEIRKRPLIETNGETGEIVWDKGRDFATVRKVLSMPQVNIVKKTEVQTGGFSKESILPKRNSDKLIARKKDWDPKKYGGFDSPTVAYSVLVVAKVEKGKSKKLKSVKELLGITIMERSSFEKNPIDFLEAKGYKEVKKDLIIKLPKYSLFELENGRKRMLASAGELQKGNELALPSKYVNFLYLASHYEKLKGSPEDNEQKQLFVEQHKHYLDEIIEQISEFSKRVILADANLDKVLSAYNKHRDKPIREQAENIIHLFTLTNLGAPAAFKYFDTTIDRKRYTSTKEVLDATLIHQSITGLYETRIDLSQLGGDGGGGGGSGGMDPLQLLQPLEAEIKGTKLKAHWNSGATITCVPEAFLEDERPIQTMLIKTIHGEKQQDVYYLTFKVQGRKVEAEVLASPYDYILLNPSDVPWLMKKPLQLTVLVPLHEYQERLLQQTALPKEQKELLQKLFLKYDALWQHWENQVGHRRIKPHNIATGTLAPRPQKQYPINPKAKPSIQIVIDDLLKQGVLIQQNSTMNTPVYPVPKPDGKWRMVLDYREVNKTIPLIAAQNQHSAGILSSIYRGKYKTTLDLTNGFWAHPITPESYWLTAFTWQGKQYCWTRLPQGFLNSPALFNADVVDLLKEIPNVQAYVDDIYISHDDPQEHLEQLEKIFSILLNAGYVVSLKKSEIAQREVEFLGFNITKEGRGLTDTFKQKLLNITPPKDLKQLQSILGKLNFARNFIPNYSELVKPLYTIVAPANGKFISWTEDNSNQLQHIISVLNQADNLEERNPETRLIIKVNSSPSAGYIRYYNEGSKRPIMYVNYIFSKAEAKFTQTEKLLTTMHKGLIKAMDLAMGQEILVYSPIVSMTKIQRTPLPERKALPVRWITWMTYLEDPRIQFHYDKSLPELQQIPNVTEDVIAKTKHPSEFAMVFYTDGSAIKHPDVNKSHSAGMGIAQVQFIPEYKIVHQWSIPLGDHTAQLAEIAAVEFACKKALKISGPVLIVTDSFYVAESANKELPYWKSNGFLNNKKKPLRHVSKWKSIAECLQLKPDIIIMHEKGHQQPMTTLHTEGNNLADKLATQGSYVVHAGKRTADGSEFEKRTADGSEFESPKKKAKVE

SEQ ID NO: 6115 - protein, 2088 aa, synthetic construct
MPAAKRVKLDGGDKKYSIGLDIGTNSVGWAVITDEYKVPSKKFKVLGNTDRHSIKKNLIGALLFDSGETAEATRLKRTARRRYTRRKNRICYLQEIFSNEMAKVDDSFFHRLEESFLVEEDKKHERHPIFGNIVDEVAYHEKYPTIYHLRKKLVDSTDKADLRLIYLALAHMIKFRGHFLIEGDLNPDNSDVDKLFIQLVQTYNQLFEENPINASGVDAKAILSARLSKSRRLENLIAQLPGEKKNGLFGNLIALSLGLTPNFKSNFDLAEDAKLQLSKDTYDDDLDNLLAQIGDQYADLFLAAKNLSDAILLSDILRVNTEITKAPLSASMIKRYDEHHQDLTLLKALVRQQLPEKYKEIFFDQSKNGYAGYIDGGASQEEFYKFIKPILEKMDGTEELLVKLNREDLLRKQRTFDNGSIPHQIHLGELHAILRRQEDFYPFLKDNREKIEKILTFRIPYYVGPLARGNSRFAWMTRKSEETITPWNFEEVVDKGASAQSFIERMTNFDKNLPNEKVLPKHSLLYEYFTVYNELTKVKYVTEGMRKPAFLSGEQKKAIVDLLFKTNRKVTVKQLKEDYFKKIECFDSVEISGVEDRFNASLGTYHDLLKIIKDKDFLDNEENEDILEDIVLTLTLFEDREMIEERLKTYAHLFDDKVMKQLKRRRYTGWGRLSRKLINGIRDKQSGKTILDFLKSDGFANRNFMQLIHDDSLTFKEDIQKAQVSGQGDSLHEHIANLAGSPAIKKGILQTVKVVDELVKVMGRHKPENIVIEMARENQTTQKGQKNSRERMKRIEEGIKELGSQILKEHPVENTQLQNEKLYLYYLQNGRDMYVDQELDINRLSDYDVDHIVPQSFLKDDSIDNKVLTRSDKARGKSDNVPSEEVVKKMKNYWRQLLNAKLITQRKFDNLTKAERGGLSELDKAGFIKRQLVETRQITKHVAQILDSRMNTKYDENDKLIREVKVITLKSKLVSDFRKDFQFYKVREINNYHHAHDAYLNAVVGTALIKKYPKLESEFVYGDYKVYDVRKMIAKSEQEIGKATAKYFFYSNIMNFFKTEITLANGEIRKRPLIETNGETGEIVWDKGRDFATVRKVLSMPQVNIVKKTEVQTGGFSKESILPKRNSDKLIARKKDWDPKKYGGFDSPTVAYSVLVVAKVEKGKSKKLKSVKELLGITIMERSSFEKNPIDFLEAKGYKEVKKDLIIKLPKYSLFELENGRKRMLASAGELQKGNELALPSKYVNFLYLASHYEKLKGSPEDNEQKQLFVEQHKHYLDEIIEQISEFSKRVILADANLDKVLSAYNKHRDKPIREQAENIIHLFTLTNLGAPAAFKYFDTTIDRKRYTSTKEVLDATLIHQSITGLYETRIDLSQLGGDGGGGGGSGGVLNLEEEYRLHEKPVPSSIDPSWLQLFPTVWAERAGMGLANQVPPVVVELRSGASPVAVRQYPMSKEAREGIRPHIQRFLDLGVLVPCQSPWNTPLLPVKKPGTNDYRPVQDLREINKRVQDIHPTVPNPYNLLSSLPPSHTWYSVLDLKDAFFCLKLHPNSQPLFAFEWRDPEKGNTGQLTWTRLPQGFKNSPTLFNEALHRDLAPFRALNPQVVLLQYVDDLLVAAPTYRDCKEGTQKLLQELSKLGYRVSAKKAQLCQKEVTYLGYLLKEGKRWLTPARKATVMKIPPPTTPRQVREFLGTAGFCRLWIPGFASLAAPLYPLTKPSIPFIWTEEHQKAFDRIKEALLSAPALALPDLTKPFTLYVDERAGVARGVLTQTLGPWRRPVAYLSKKLDPVASGWPTCLKAVAAVALLLKDADKLTLGQNVTVIASHSLESIVRQPPDRWMTNARMTHYQSLLLNERVSFAPPAVLNPATLLPVESEATPVHRCSEILAEETGTRRDLKDQPLPGVPAWYTDGSSFIAEGKRRAGAAIVDGKRTVWASSLPEGTSAQKAELVALTQALRLAEGKDINIYTDSRYAFATAHIHGAIYKQRGWLTSAGKDIKNKEEILALLEAIHLPKRVAIIHCPGHQKGNDPVATGNRRADEAAKQAALSTRVLAETTKPAGKRTADGSEFEKRTADGSEFESPKKKAKVE

SEQ ID NO: 6116 - protein, 2088 aa, synthetic construct
MPAAKRVKLDGGDKKYSIGLDIGTNSVGWAVITDEYKVPSKKFKVLGNTDRHSIKKNLIGALLFDSGETAEATRLKRTARRRYTRRKNRICYLQEIFSNEMAKVDDSFFHRLEESFLVEEDKKHERHPIFGNIVDEVAYHEKYPTIYHLRKKLVDSTDKADLRLIYLALAHMIKFRGHFLIEGDLNPDNSDVDKLFIQLVQTYNQLFEENPINASGVDAKAILSARLSKSRRLENLIAQLPGEKKNGLFGNLIALSLGLTPNFKSNFDLAEDAKLQLSKDTYDDDLDNLLAQIGDQYADLFLAAKNLSDAILLSDILRVNTEITKAPLSASMIKRYDEHHQDLTLLKALVRQQLPEKYKEIFFDQSKNGYAGYIDGGASQEEFYKFIKPILEKMDGTEELLVKLNREDLLRKQRTFDNGSIPHQIHLGELHAILRRQEDFYPFLKDNREKIEKILTFRIPYYVGPLARGNSRFAWMTRKSEETITPWNFEEVVDKGASAQSFIERMTNFDKNLPNEKVLPKHSLLYEYFTVYNELTKVKYVTEGMRKPAFLSGEQKKAIVDLLFKTNRKVTVKQLKEDYFKKIECFDSVEISGVEDRFNASLGTYHDLLKIIKDKDFLDNEENEDILEDIVLTLTLFEDREMIEERLKTYAHLFDDKVMKQLKRRRYTGWGRLSRKLINGIRDKQSGKTILDFLKSDGFANRNFMQLIHDDSLTFKEDIQKAQVSGQGDSLHEHIANLAGSPAIKKGILQTVKVVDELVKVMGRHKPENIVIEMARENQTTQKGQKNSRERMKRIEEGIKELGSQILKEHPVENTQLQNEKLYLYYLQNGRDMYVDQELDINRLSDYDVDHIVPQSFLKDDSIDNKVLTRSDKARGKSDNVPSEEVVKKMKNYWRQLLNAKLITQRKFDNLTKAERGGLSELDKAGFIKRQLVETRQITKHVAQILDSRMNTKYDENDKLIREVKVITLKSKLVSDFRKDFQFYKVREINNYHHAHDAYLNAVVGTALIKKYPKLESEFVYGDYKVYDVRKMIAKSEQEIGKATAKYFFYSNIMNFFKTEITLANGEIRKRPLIETNGETGEIVWDKGRDFATVRKVLSMPQVNIVKKTEVQTGGFSKESILPKRNSDKLIARKKDWDPKKYGGFDSPTVAYSVLVVAKVEKGKSKKLKSVKELLGITIMERSSFEKNPIDFLEAKGYKEVKKDLIIKLPKYSLFELENGRKRMLASAGELQKGNELALPSKYVNFLYLASHYEKLKGSPEDNEQKQLFVEQHKHYLDEIIEQISEFSKRVILADANLDKVLSAYNKHRDKPIREQAENIIHLFTLTNLGAPAAFKYFDTTIDRKRYTSTKEVLDATLIHQSITGLYETRIDLSQLGGDGGGGGGSGGVLNLEEEYRLHEKPVPSSIDPSWLQLFPTVWAERAGMGLANQVPPVVVELRSGASPVAVRQYPMSKEAREGIRPHIQRFLDLGVLVPCQSPWNTPLLPVKKPGTNDYRPVQDLREINKRVQDIHPTVPNPYNLLSSLPPSHTWYSVLDLKDAFFCLKLHPNSQPLFAFEWRDPEKGNTGQLTWTRLPQGFKNSPTLFNEALHRDLAPFRALNPQVVLLQYVDDLLVAAPTYRDCKEGTQKLLQELSKLGYRVSAKKAQLCQKEVTYLGYLLKEGKRWLTPARKATVMKIPPPTTPRQVREFLGKAGFCRLFIPGFASLAAPLYPLTKPSIPFIWTEEHQKAFDRIKEALLSAPALALPDLTKPFTLYVDERAGVARGVLTQTLGPWRRPVAYLSKKLDPVASGWPTCLKAVAAVALLLKDADKLTLGQNVTVIASHSLESIVRQPPDRWMTNARMTHYQSLLLNERVSFAPPAVLNPATLLPVESEATPVHRCSEILAEETGTRRDLKDQPLPGVPAWYTDGSSFIAEGKRRAGAAIVDGKRTVWASSLPEGTSAQKAELVALTQALRLAEGKDINIYTDSRYAFATAHIHGAIYKQRGWLTSAGKDIKNKEEILALLEAIHLPKRVAIIHCPGHQKGNDPVATGNRRADEAAKQAALSTRVLAETTKPAGKRTADGSEFEKRTADGSEFESPKKKAKVE

SEQ ID NO: 6117 - protein, 2090 aa, synthetic construct
MPAAKRVKLDGGDKKYSIGLDIGTNSVGWAVITDEYKVPSKKFKVLGNTDRHSIKKNLIGALLFDSGETAEATRLKRTARRRYTRRKNRICYLQEIFSNEMAKVDDSFFHRLEESFLVEEDKKHERHPIFGNIVDEVAYHEKYPTIYHLRKKLVDSTDKADLRLIYLALAHMIKFRGHFLIEGDLNPDNSDVDKLFIQLVQTYNQLFEENPINASGVDAKAILSARLSKSRRLENLIAQLPGEKKNGLFGNLIALSLGLTPNFKSNFDLAEDAKLQLSKDTYDDDLDNLLAQIGDQYADLFLAAKNLSDAILLSDILRVNTEITKAPLSASMIKRYDEHHQDLTLLKALVRQQLPEKYKEIFFDQSKNGYAGYIDGGASQEEFYKFIKPILEKMDGTEELLVKLNREDLLRKQRTFDNGSIPHQIHLGELHAILRRQEDFYPFLKDNREKIEKILTFRIPYYVGPLARGNSRFAWMTRKSEETITPWNFEEVVDKGASAQSFIERMTNFDKNLPNEKVLPKHSLLYEYFTVYNELTKVKYVTEGMRKPAFLSGEQKKAIVDLLFKTNRKVTVKQLKEDYFKKIECFDSVEISGVEDRFNASLGTYHDLLKIIKDKDFLDNEENEDILEDIVLTLTLFEDREMIEERLKTYAHLFDDKVMKQLKRRRYTGWGRLSRKLINGIRDKQSGKTILDFLKSDGFANRNFMQLIHDDSLTFKEDIQKAQVSGQGDSLHEHIANLAGSPAIKKGILQTVKVVDELVKVMGRHKPENIVIEMARENQTTQKGQKNSRERMKRIEEGIKELGSQILKEHPVENTQLQNEKLYLYYLQNGRDMYVDQELDINRLSDYDVDHIVPQSFLKDDSIDNKVLTRSDKARGKSDNVPSEEVVKKMKNYWRQLLNAKLITQRKFDNLTKAERGGLSELDKAGFIKRQLVETRQITKHVAQILDSRMNTKYDENDKLIREVKVITLKSKLVSDFRKDFQFYKVREINNYHHAHDAYLNAVVGTALIKKYPKLESEFVYGDYKVYDVRKMIAKSEQEIGKATAKYFFYSNIMNFFKTEITLANGEIRKRPLIETNGETGEIVWDKGRDFATVRKVLSMPQVNIVKKTEVQTGGFSKESILPKRNSDKLIARKKDWDPKKYGGFDSPTVAYSVLVVAKVEKGKSKKLKSVKELLGITIMERSSFEKNPIDFLEAKGYKEVKKDLIIKLPKYSLFELENGRKRMLASAGELQKGNELALPSKYVNFLYLASHYEKLKGSPEDNEQKQLFVEQHKHYLDEIIEQISEFSKRVILADANLDKVLSAYNKHRDKPIREQAENIIHLFTLTNLGAPAAFKYFDTTIDRKRYTSTKEVLDATLIHQSITGLYETRIDLSQLGGDGGGGGGSGGTLNIEDEYRLHETSKEPDVPLGSTWLSDFPQAWAETGGMGLAVRQAPLIIPLKATSTPVSIKQYPMSQEARLGIKPHIQRLLDQGILVPCQSPWNTPLLPVKKPGTNDYRPVQDLREVNKRVEDIHPTVPNPYNLLSGLPPSHQWYTVLDLKDAFFCLRLHPTSQPLFAFEWRDPEMGISGQLTWTRLPQGFKNSPTLFNEALHRDLADFRIQHPDLILLQYVDDLLLAATSEQDCQRGTRALLQTLGNLGYRASAKKAQICQKQVKYLGYLLKEGQRWLTEARKETVMGQPTPKTPRQLREFLGKAGFCRLFIPGFAEMAAPLYPLTKPGTLFNWGPDQQKAYQEIKQALLTAPALGLPDLTKPFELFVDEKQGYAKGVLTQKLGPWRRPVAYLSKKLDPVAAGWPPCLRMVAAIAVLTKDAGKLTMGQPLVILAPHAVEALVKQPPDRWLSNARMTHYQAMLLDTDRVQFGPVVALNPATLLPLPEKEAPHDCLEILAETHGTRPDLTDQPIPDADYTWYTDGSSFLQEGQRRAGAAVTTETEVIWARALPAGTSAQRAELIALTQALKMAEGKKLNVYTDSRYAFATAHVHGEIYRRRGWLTSEGREIKNKNEILALLKALFLPKRLSIIHCPGHQKGNSAEARGNRMADQAAREAAMKAVLETSTLLAGKRTADGSEFEKRTADGSEFESPKKKAKVE

SEQ ID NO: 6118 - protein, 2101 aa, synthetic construct
MPAAKRVKLDGGDKKYSIGLDIGTNSVGWAVITDEYKVPSKKFKVLGNTDRHSIKKNLIGALLFDSGETAEATRLKRTARRRYTRRKNRICYLQEIFSNEMAKVDDSFFHRLEESFLVEEDKKHERHPIFGNIVDEVAYHEKYPTIYHLRKKLVDSTDKADLRLIYLALAHMIKFRGHFLIEGDLNPDNSDVDKLFIQLVQTYNQLFEENPINASGVDAKAILSARLSKSRRLENLIAQLPGEKKNGLFGNLIALSLGLTPNFKSNFDLAEDAKLQLSKDTYDDDLDNLLAQIGDQYADLFLAAKNLSDAILLSDILRVNTEITKAPLSASMIKRYDEHHQDLTLLKALVRQQLPEKYKEIFFDQSKNGYAGYIDGGASQEEFYKFIKPILEKMDGTEELLVKLNREDLLRKQRTFDNGSIPHQIHLGELHAILRRQEDFYPFLKDNREKIEKILTFRIPYYVGPLARGNSRFAWMTRKSEETITPWNFEEVVDKGASAQSFIERMTNFDKNLPNEKVLPKHSLLYEYFTVYNELTKVKYVTEGMRKPAFLSGEQKKAIVDLLFKTNRKVTVKQLKEDYFKKIECFDSVEISGVEDRFNASLGTYHDLLKIIKDKDFLDNEENEDILEDIVLTLTLFEDREMIEERLKTYAHLFDDKVMKQLKRRRYTGWGRLSRKLINGIRDKQSGKTILDFLKSDGFANRNFMQLIHDDSLTFKEDIQKAQVSGQGDSLHEHIANLAGSPAIKKGILQTVKVVDELVKVMGRHKPENIVIEMARENQTTQKGQKNSRERMKRIEEGIKELGSQILKEHPVENTQLQNEKLYLYYLQNGRDMYVDQELDINRLSDYDVDHIVPQSFLKDDSIDNKVLTRSDKARGKSDNVPSEEVVKKMKNYWRQLLNAKLITQRKFDNLTKAERGGLSELDKAGFIKRQLVETRQITKHVAQILDSRMNTKYDENDKLIREVKVITLKSKLVSDFRKDFQFYKVREINNYHHAHDAYLNAVVGTALIKKYPKLESEFVYGDYKVYDVRKMIAKSEQEIGKATAKYFFYSNIMNFFKTEITLANGEIRKRPLIETNGETGEIVWDKGRDFATVRKVLSMPQVNIVKKTEVQTGGFSKESILPKRNSDKLIARKKDWDPKKYGGFDSPTVAYSVLVVAKVEKGKSKKLKSVKELLGITIMERSSFEKNPIDFLEAKGYKEVKKDLIIKLPKYSLFELENGRKRMLASAGELQKGNELALPSKYVNFLYLASHYEKLKGSPEDNEQKQLFVEQHKHYLDEIIEQISEFSKRVILADANLDKVLSAYNKHRDKPIREQAENIIHLFTLTNLGAPAAFKYFDTTIDRKRYTSTKEVLDATLIHQSITGLYETRIDLSQLGGDGGGGGGSGGGGSGGTVSLQDEHRLFDIPVTTSLPDVWLQDFPQAWAETGGLGRAKCQAPIIIDLKPTAVPVSIKQYPMSLEAHMGIRQHIIKFLELGVLRPCRSPWNTPLLPVKKPGTQDYRPVQDLREINKRTVDIHPTVPNPYNLLSTLKPDYSWYTVLDLKDAFFCLPLAPQSQELFAFEWKDPERGISGQLTWTRLPQGFKNSPTLFNEALHRDLTDFRTQHPEVTLLQYVDDLLLAAPTKKACTQGTRHLLQELGEKGYRASAKKAQICQTKVTYLGYILSEGKRWLTPGRIETVARIPPPRNPREVREFLGKAGFCRLFIPGFAELAAPLYALTKPSTPFTWQTEHQLAFEALKKALLSAPALGLPDTSKPFTLFLDERQGIAKGVLTQKLGPWKRPVAYLSKKLDPVAAGWPPCLRIMAATAMLVKDSAKLTLGQPLTVITPHTLEAIVRQPPDRWITNARLTHYQALLLDTDRVQFGPPVTLNPATLLPVPENQPSPHDCRQVLAETHGTREDLKDQELPDADHTWYTDGSSYLDSGTRRAGAAVVDGHNTIWAQSLPPGTSAQKAELIALTKALELSKGKKANIYTDSRYAFATAHTHGSIYERRGWLTSEGKEIKNKAEIIALLKALFLPQEVAIIHCPGHQKGQDPVAVGNRQADRVARQAAMAEVLTLATEPDNTSHITAGKRTADGSEFEKRTADGSEFESPKKKAKVE

SEQ ID NO: 6119 - protein, 2175 aa, synthetic construct
MPAAKRVKLDGGDKKYSIGLDIGTNSVGWAVITDEYKVPSKKFKVLGNTDRHSIKKNLIGALLFDSGETAEATRLKRTARRRYTRRKNRICYLQEIFSNEMAKVDDSFFHRLEESFLVEEDKKHERHPIFGNIVDEVAYHEKYPTIYHLRKKLVDSTDKADLRLIYLALAHMIKFRGHFLIEGDLNPDNSDVDKLFIQLVQTYNQLFEENPINASGVDAKAILSARLSKSRRLENLIAQLPGEKKNGLFGNLIALSLGLTPNFKSNFDLAEDAKLQLSKDTYDDDLDNLLAQIGDQYADLFLAAKNLSDAILLSDILRVNTEITKAPLSASMIKRYDEHHQDLTLLKALVRQQLPEKYKEIFFDQSKNGYAGYIDGGASQEEFYKFIKPILEKMDGTEELLVKLNREDLLRKQRTFDNGSIPHQIHLGELHAILRRQEDFYPFLKDNREKIEKILTFRIPYYVGPLARGNSRFAWMTRKSEETITPWNFEEVVDKGASAQSFIERMTNFDKNLPNEKVLPKHSLLYEYFTVYNELTKVKYVTEGMRKPAFLSGEQKKAIVDLLFKTNRKVTVKQLKEDYFKKIECFDSVEISGVEDRFNASLGTYHDLLKIIKDKDFLDNEENEDILEDIVLTLTLFEDREMIEERLKTYAHLFDDKVMKQLKRRRYTGWGRLSRKLINGIRDKQSGKTILDFLKSDGFANRNFMQLIHDDSLTFKEDIQKAQVSGQGDSLHEHIANLAGSPAIKKGILQTVKVVDELVKVMGRHKPENIVIEMARENQTTQKGQKNSRERMKRIEEGIKELGSQILKEHPVENTQLQNEKLYLYYLQNGRDMYVDQELDINRLSDYDVDHIVPQSFLKDDSIDNKVLTRSDKARGKSDNVPSEEVVKKMKNYWRQLLNAKLITQRKFDNLTKAERGGLSELDKAGFIKRQLVETRQITKHVAQILDSRMNTKYDENDKLIREVKVITLKSKLVSDFRKDFQFYKVREINNYHHAHDAYLNAVVGTALIKKYPKLESEFVYGDYKVYDVRKMIAKSEQEIGKATAKYFFYSNIMNFFKTEITLANGEIRKRPLIETNGETGEIVWDKGRDFATVRKVLSMPQVNIVKKTEVQTGGFSKESILPKRNSDKLIARKKDWDPKKYGGFDSPTVAYSVLVVAKVEKGKSKKLKSVKELLGITIMERSSFEKNPIDFLEAKGYKEVKKDLIIKLPKYSLFELENGRKRMLASAGELQKGNELALPSKYVNFLYLASHYEKLKGSPEDNEQKQLFVEQHKHYLDEIIEQISEFSKRVILADANLDKVLSAYNKHRDKPIREQAENIIHLFTLTNLGAPAAFKYFDTTIDRKRYTSTKEVLDATLIHQSITGLYETRIDLSQLGGDGGGGGGSGGGGSGGMNPLQLLQPLPAEIKGTKLLAHWNSGATITCIPESFLEDEQPIKKTLIKTIHGEKQQNVYYVTFKVKGRKVEAEVIASPYEYILLSPTDVPWLTQQPLQLTILVPLQEYQEKILSKTALPEDQKQQLKTLFVKYDNLWQHWENQVGHRKIRPHNIATGDYPPRPQKQYPINPKAKPSIQIVIDDLLKQGVLTPQNSTMNTPVYPVPKPDGRWRMVLDYREVNKTIPLTAAQNQHSAGILATIVRQKYKTTLDLANGFWAHPITPESYWLTAFTWQGKQYCWTRLPQGFLNSPALFNADVVDLLKEIPNVQVYVDDIYLSHDDPKEHVQQLEKVFQILLQAGYVVSLKKSEIGQKTVEFLGFNITKEGRGLTDTFKTKLLNITPPKDLKQLQSILGKLNFARNFIPNFAELVQPLYNLIAPAKGKYIEWSEENTKQLNMVIEALNTASNLEERLPEQRLVIKVNTSPSAGYVRYYNETGKKPIMYLNYVFSKAELKFSMLEKLLTTMHKALIKAMDLAMGQEILVYSPIVSMTKIQKTPLPERKALPIRWITWMTYLEDPRIQFHYDKTLPELKHIPDVYTSSQSPVKHPSQYEGVFYTDGSAIKSPDPTKSNNAGMGIVHATYKPEYQVLNQWSIPLGNHTAQMAEIAAVEFACKKALKIPGPVLVITDSFYVAESANKELPYWKSNGFVNNKKKPLKHISKWKSIAECLSMKPDITIQHEKGISLQIPVFILKGNALADKLATQGSYVVNAGKRTADGSEFEKRTADGSEFESPKKKAKVE

SEQ ID NO: 6120 - protein, 2217 aa, synthetic construct
MPAAKRVKLDGGDKKYSIGLDIGTNSVGWAVITDEYKVPSKKFKVLGNTDRHSIKKNLIGALLFDSGETAEATRLKRTARRRYTRRKNRICYLQEIFSNEMAKVDDSFFHRLEESFLVEEDKKHERHPIFGNIVDEVAYHEKYPTIYHLRKKLVDSTDKADLRLIYLALAHMIKFRGHFLIEGDLNPDNSDVDKLFIQLVQTYNQLFEENPINASGVDAKAILSARLSKSRRLENLIAQLPGEKKNGLFGNLIALSLGLTPNFKSNFDLAEDAKLQLSKDTYDDDLDNLLAQIGDQYADLFLAAKNLSDAILLSDILRVNTEITKAPLSASMIKRYDEHHQDLTLLKALVRQQLPEKYKEIFFDQSKNGYAGYIDGGASQEEFYKFIKPILEKMDGTEELLVKLNREDLLRKQRTFDNGSIPHQIHLGELHAILRRQEDFYPFLKDNREKIEKILTFRIPYYVGPLARGNSRFAWMTRKSEETITPWNFEEVVDKGASAQSFIERMTNFDKNLPNEKVLPKHSLLYEYFTVYNELTKVKYVTEGMRKPAFLSGEQKKAIVDLLFKTNRKVTVKQLKEDYFKKIECFDSVEISGVEDRFNASLGTYHDLLKIIKDKDFLDNEENEDILEDIVLTLTLFEDREMIEERLKTYAHLFDDKVMKQLKRRRYTGWGRLSRKLINGIRDKQSGKTILDFLKSDGFANRNFMQLIHDDSLTFKEDIQKAQVSGQGDSLHEHIANLAGSPAIKKGILQTVKVVDELVKVMGRHKPENIVIEMARENQTTQKGQKNSRERMKRIEEGIKELGSQILKEHPVENTQLQNEKLYLYYLQNGRDMYVDQELDINRLSDYDVDHIVPQSFLKDDSIDNKVLTRSDKARGKSDNVPSEEVVKKMKNYWRQLLNAKLITQRKFDNLTKAERGGLSELDKAGFIKRQLVETRQITKHVAQILDSRMNTKYDENDKLIREVKVITLKSKLVSDFRKDFQFYKVREINNYHHAHDAYLNAVVGTALIKKYPKLESEFVYGDYKVYDVRKMIAKSEQEIGKATAKYFFYSNIMNFFKTEITLANGEIRKRPLIETNGETGEIVWDKGRDFATVRKVLSMPQVNIVKKTEVQTGGFSKESILPKRNSDKLIARKKDWDPKKYGGFDSPTVAYSVLVVAKVEKGKSKKLKSVKELLGITIMERSSFEKNPIDFLEAKGYKEVKKDLIIKLPKYSLFELENGRKRMLASAGELQKGNELALPSKYVNFLYLASHYEKLKGSPEDNEQKQLFVEQHKHYLDEIIEQISEFSKRVILADANLDKVLSAYNKHRDKPIREQAENIIHLFTLTNLGAPAAFKYFDTTIDRKRYTSTKEVLDATLIHQSITGLYETRIDLSQLGGDGGGGGGSGGGGSGGTLGDQGSRGSDPLPEPRVTLTVEGIPTEFLVNTGAEHSVLTKPMGKMGSKRTVVAGATGSKVYPWTTKRLLKIGQKQVTHSFLVIPECPAPLLGRDLLTKLKAQIQFSTEGPQVTWEDRPAMCLVLNLEEEYRLHEKPVPPSIDPSWLQLFPMVWAEKAGMGLANQVPPVVVELKSDASPVAVRQYPMSKEAREGIRPHIQRFLDLGILVPCQSPWNTPLLPVKKPGTNDYRPVQDLREVNKRVQDIHPTVPNPYNLLSSLPPSHTWYSVLDLKDAFFCLKLHPNSQPLFAFEWRDPEKGNTGQLTWTRLPQGFKNSPTLFDEALHRDLASFRALNPQVVMLQYVDDLLVAAPTYRDCKEGTRRLLQELSKLGYRVSAKKAQLCREEVTYLGYLLKGGKRWLTPARKATVMKIPTPTTPRQVREFLGTAGFCRLWIPGFASLAAPLYPLTREKVPFTWTEAHQEAFGRIKEALLSAPALALPDLTKPFALYVDEKEGVARGVLTQTLGPWRRPVAYLSKKLDPVASGWPTCLKAIAAVALLLKDADKLTLGQNVLVIAPHNLESIVRQPPDRWMTNARMTHYQSLLLNERVSFAPPAILNPATLLPVESDDTPIHICSEILAEETGTRPDLRDQPLPGVPAWYTDGSSFIMDGRRQAGAAIVDNKRTVWASNLPEGTSAQKAELIALTQALRLAEGKSINIYTDSRYAFATAHVHGAIYKQRGLLTSAGKDIKNKEEILALLEAIHLPKRVAIIHCPGHQRGTDPVATGNRKADEAAKQAAQSTRILTETTKNAGKRTADGSEFEKRTADGSEFESPKKKAKVE

SEQ ID NO: 6121 - protein, 2126 aa, synthetic construct
MPAAKRVKLDGGDKKYSIGLDIGTNSVGWAVITDEYKVPSKKFKVLGNTDRHSIKKNLIGALLFDSGETAEATRLKRTARRRYTRRKNRICYLQEIFSNEMAKVDDSFFHRLEESFLVEEDKKHERHPIFGNIVDEVAYHEKYPTIYHLRKKLVDSTDKADLRLIYLALAHMIKFRGHFLIEGDLNPDNSDVDKLFIQLVQTYNQLFEENPINASGVDAKAILSARLSKSRRLENLIAQLPGEKKNGLFGNLIALSLGLTPNFKSNFDLAEDAKLQLSKDTYDDDLDNLLAQIGDQYADLFLAAKNLSDAILLSDILRVNTEITKAPLSASMIKRYDEHHQDLTLLKALVRQQLPEKYKEIFFDQSKNGYAGYIDGGASQEEFYKFIKPILEKMDGTEELLVKLNREDLLRKQRTFDNGSIPHQIHLGELHAILRRQEDFYPFLKDNREKIEKILTFRIPYYVGPLARGNSRFAWMTRKSEETITPWNFEEVVDKGASAQSFIERMTNFDKNLPNEKVLPKHSLLYEYFTVYNELTKVKYVTEGMRKPAFLSGEQKKAIVDLLFKTNRKVTVKQLKEDYFKKIECFDSVEISGVEDRFNASLGTYHDLLKIIKDKDFLDNEENEDILEDIVLTLTLFEDREMIEERLKTYAHLFDDKVMKQLKRRRYTGWGRLSRKLINGIRDKQSGKTILDFLKSDGFANRNFMQLIHDDSLTFKEDIQKAQVSGQGDSLHEHIANLAGSPAIKKGILQTVKVVDELVKVMGRHKPENIVIEMARENQTTQKGQKNSRERMKRIEEGIKELGSQILKEHPVENTQLQNEKLYLYYLQNGRDMYVDQELDINRLSDYDVDHIVPQSFLKDDSIDNKVLTRSDKARGKSDNVPSEEVVKKMKNYWRQLLNAKLITQRKFDNLTKAERGGLSELDKAGFIKRQLVETRQITKHVAQILDSRMNTKYDENDKLIREVKVITLKSKLVSDFRKDFQFYKVREINNYHHAHDAYLNAVVGTALIKKYPKLESEFVYGDYKVYDVRKMIAKSEQEIGKATAKYFFYSNIMNFFKTEITLANGEIRKRPLIETNGETGEIVWDKGRDFATVRKVLSMPQVNIVKKTEVQTGGFSKESILPKRNSDKLIARKKDWDPKKYGGFDSPTVAYSVLVVAKVEKGKSKKLKSVKELLGITIMERSSFEKNPIDFLEAKGYKEVKKDLIIKLPKYSLFELENGRKRMLASAGELQKGNELALPSKYVNFLYLASHYEKLKGSPEDNEQKQLFVEQHKHYLDEIIEQISEFSKRVILADANLDKVLSAYNKHRDKPIREQAENIIHLFTLTNLGAPAAFKYFDTTIDRKRYTSTKEVLDATLIHQSITGLYETRIDLSQLGGDGGGGGGSGGGGSGGLLGRDLLTKLKAQIQFSTEGPQVTWEDRPAMCLVLNLEEEYRLHEKPVPPSIDPSWLQLFPMVWAEKAGMGLANQVPPVVVELKSDASPVAVRQYPMSKEAREGIRPHIQRFLDLGILVPCQSPWNTPLLPVKKPGTNDYRPVQDLREVNKRVQDIHPTVPNPYNLLSSLPPSHTWYSVLDLKDAFFCLKLHPNSQPLFAFEWRDPEKGNTGQLTWTRLPQGFKNSPTLFNEALHRDLASFRALNPQVVMLQYVDDLLVAAPTYRDCKEGTRRLLQELSKLGYRVSAKKAQLCREEVTYLGYLLKGGKRWLTPARKATVMKIPTPTTPRQVREFLGTAGFCRLWIPGFASLAAPLYPLTRPKVPFTWTEAHQEAFGRIKEALLSAPALALPDLTKPFALYVDEKEGVARGVLTQTLGPWRRPVAYLSKKLDPVASGWPTCLKAIAAVALLLKDADKLTLGQNVLVIAPHNLESIVRQPPDRWMTNARMTHYQSLLLNERVSFAPPAILNPATLLPVESDDTPIHICSEILAEETGTRPDLRDQPLPGVPAWYTDGSSFIMDGRRQAGAAIVDNKRTVWASNLPEGTSAQKAELIALTQALRLAEGKSINIYTDSRYAFATAHVHGAIYKQRGWLTSAGKDIKNKEEILALLEAIHLPKRVAIIHCPGHQRGTDPVATGNRKADEAAKQAAQSTRILTETTKNAGKRTADGSEFEKRTADGSEFESPKKKAKVE

SEQ ID NO: 6122 - protein, 2217 aa, synthetic construct
MPAAKRVKLDGGDKKYSIGLDIGTNSVGWAVITDEYKVPSKKFKVLGNTDRHSIKKNLIGALLFDSGETAEATRLKRTARRRYTRRKNRICYLQEIFSNEMAKVDDSFFHRLEESFLVEEDKKHERHPIFGNIVDEVAYHEKYPTIYHLRKKLVDSTDKADLRLIYLALAHMIKFRGHFLIEGDLNPDNSDVDKLFIQLVQTYNQLFEENPINASGVDAKAILSARLSKSRRLENLIAQLPGEKKNGLFGNLIALSLGLTPNFKSNFDLAEDAKLQLSKDTYDDDLDNLLAQIGDQYADLFLAAKNLSDAILLSDILRVNTEITKAPLSASMIKRYDEHHQDLTLLKALVRQQLPEKYKEIFFDQSKNGYAGYIDGGASQEEFYKFIKPILEKMDGTEELLVKLNREDLLRKQRTFDNGSIPHQIHLGELHAILRRQEDFYPFLKDNREKIEKILTFRIPYYVGPLARGNSRFAWMTRKSEETITPWNFEEVVDKGASAQSFIERMTNFDKNLPNEKVLPKHSLLYEYFTVYNELTKVKYVTEGMRKPAFLSGEQKKAIVDLLFKTNRKVTVKQLKEDYFKKIECFDSVEISGVEDRFNASLGTYHDLLKIIKDKDFLDNEENEDILEDIVLTLTLFEDREMIEERLKTYAHLFDDKVMKQLKRRRYTGWGRLSRKLINGIRDKQSGKTILDFLKSDGFANRNFMQLIHDDSLTFKEDIQKAQVSGQGDSLHEHIANLAGSPAIKKGILQTVKVVDELVKVMGRHKPENIVIEMARENQTTQKGQKNSRERMKRIEEGIKELGSQILKEHPVENTQLQNEKLYLYYLQNGRDMYVDQELDINRLSDYDVDHIVPQSFLKDDSIDNKVLTRSDKARGKSDNVPSEEVVKKMKNYWRQLLNAKLITQRKFDNLTKAERGGLSELDKAGFIKRQLVETRQITKHVAQILDSRMNTKYDENDKLIREVKVITLKSKLVSDFRKDFQFYKVREINNYHHAHDAYLNAVVGTALIKKYPKLESEFVYGDYKVYDVRKMIAKSEQEIGKATAKYFFYSNIMNFFKTEITLANGEIRKRPLIETNGETGEIVWDKGRDFATVRKVLSMPQVNIVKKTEVQTGGFSKESILPKRNSDKLIARKKDWDPKKYGGFDSPTVAYSVLVVAKVEKGKSKKLKSVKELLGITIMERSSFEKNPIDFLEAKGYKEVKKDLIIKLPKYSLFELENGRKRMLASAGELQKGNELALPSKYVNFLYLASHYEKLKGSPEDNEQKQLFVEQHKHYLDEIIEQISEFSKRVILADANLDKVLSAYNKHRDKPIREQAENIIHLFTLTNLGAPAAFKYFDTTIDRKRYTSTKEVLDATLIHQSITGLYETRIDLSQLGGDGGGGGGSGGGGSGGTLGDQGSRGSDPLPEPRVTLTVEGIPTEFLVNTGAEHSVLTKPMGKMGSKRTVVAGATGSKVYPWTTKRLLKIGQKQVTHSFLVIPECPAPLLGRDLLTKLKAQIQFSTEGPQVTWEDRPAMCLVLNLEEEYRLHEKPVPPSIDPSWLQLFPMVWAEKAGMGLANQVPPVVVELKSDASPVAVRQYPMSKEAREGIRPHIQRFLDLGILVPCQSPWNTPLLPVKKPGTNDYRPVQDLREVNKRVQDIHPTVPNPYNLLSSLPPSHTWYSVLDLKDAFFCLKLHPNSQPLFAFEWRDPEKGNTGQLTWTRLPQGFKNSPTLFNEALHRDLASFRALNPQVVMLQYVDDLLVAAPTYRDCKEGTRRLLQELSKLGYRVSAKKAQLCREEVTYLGYLLKGGKRWLTPARKATVMKIPTPTTPRQVREFLGTAGFCRLWIPGFASLAAPLYPLTRPKVPFTWTEAHQEAFGRIKEALLSAPALALPDLTKPFALYVDEKEGVARGVLTQTLGPWRRPVAYLSKKLDPVASGWPTCLKAIAAVALLLKDADKLTLGQNVLVIAPHNLESIVRQPPDRWMTNARMTHYQSLLLNERVSFAPPAILNPATLLPVESDDTPIHICSEILAEETGTRPDLRDQPLPGVPAWYTDGSSFIMDGRRQAGAAIVDNKRTVWASNLPEGTSAQKAELIALTQALRLAEGKSINIYTDSRYAFATAHVHGAIYKQRGWLTSAGKDIKNKEEILALLEAIHLPKRVAIIHCPGHQRGTDPVATGNRKADEAAKQAAQSTRILTETTKNAGKRTADGSEFEKRTADGSEFESPKKKAKVE

SEQ ID NO: 6123 - protein, 2217 aa, synthetic construct
MPAAKRVKLDGGDKKYSIGLDIGTNSVGWAVITDEYKVPSKKFKVLGNTDRHSIKKNLIGALLFDSGETAEATRLKRTARRRYTRRKNRICYLQEIFSNEMAKVDDSFFHRLEESFLVEEDKKHERHPIFGNIVDEVAYHEKYPTIYHLRKKLVDSTDKADLRLIYLALAHMIKFRGHFLIEGDLNPDNSDVDKLFIQLVQTYNQLFEENPINASGVDAKAILSARLSKSRRLENLIAQLPGEKKNGLFGNLIALSLGLTPNFKSNFDLAEDAKLQLSKDTYDDDLDNLLAQIGDQYADLFLAAKNLSDAILLSDILRVNTEITKAPLSASMIKRYDEHHQDLTLLKALVRQQLPEKYKEIFFDQSKNGYAGYIDGGASQEEFYKFIKPILEKMDGTEELLVKLNREDLLRKQRTFDNGSIPHQIHLGELHAILRRQEDFYPFLKDNREKIEKILTFRIPYYVGPLARGNSRFAWMTRKSEETITPWNFEEVVDKGASAQSFIERMTNFDKNLPNEKVLPKHSLLYEYFTVYNELTKVKYVTEGMRKPAFLSGEQKKAIVDLLFKTNRKVTVKQLKEDYFKKIECFDSVEISGVEDRFNASLGTYHDLLKIIKDKDFLDNEENEDILEDIVLTLTLFEDREMIEERLKTYAHLFDDKVMKQLKRRRYTGWGRLSRKLINGIRDKQSGKTILDFLKSDGFANRNFMQLIHDDSLTFKEDIQKAQVSGQGDSLHEHIANLAGSPAIKKGILQTVKVVDELVKVMGRHKPENIVIEMARENQTTQKGQKNSRERMKRIEEGIKELGSQILKEHPVENTQLQNEKLYLYYLQNGRDMYVDQELDINRLSDYDVDHIVPQSFLKDDSIDNKVLTRSDKARGKSDNVPSEEVVKKMKNYWRQLLNAKLITQRKFDNLTKAERGGLSELDKAGFIKRQLVETRQITKHVAQILDSRMNTKYDENDKLIREVKVITLKSKLVSDFRKDFQFYKVREINNYHHAHDAYLNAVVGTALIKKYPKLESEFVYGDYKVYDVRKMIAKSEQEIGKATAKYFFYSNIMNFFKTEITLANGEIRKRPLIETNGETGEIVWDKGRDFATVRKVLSMPQVNIVKKTEVQTGGFSKESILPKRNSDKLIARKKDWDPKKYGGFDSPTVAYSVLVVAKVEKGKSKKLKSVKELLGITIMERSSFEKNPIDFLEAKGYKEVKKDLIIKLPKYSLFELENGRKRMLASAGELQKGNELALPSKYVNFLYLASHYEKLKGSPEDNEQKQLFVEQHKHYLDEIIEQISEFSKRVILADANLDKVLSAYNKHRDKPIREQAENIIHLFTLTNLGAPAAFKYFDTTIDRKRYTSTKEVLDATLIHQSITGLYETRIDLSQLGGDGGGGGGSGGGGSGGTLGDQGSRGSDPLPEPRVTLTVEGIPTEFLVNTGAEHSVLTKPMGKMGSKRTVVAGATGSKVYPWTTKRLLKIGQKQVTHSFLVIPECPAPLLGRDLLTKLKAQIQFSTEGPQVTWEDRPAMCLVLNLEEEYRLHEKPVPPSIDPSWLQLFPMVWAEKAGMGLANQVPPVVVELKSDASPVAVRQYPMSKEAREGIRPHIQRFLDLGILVPCQSPWNTPLLPVKKPGTNDYRPVQDLREVNKRVQDIHPTVPNPYNLLSSLPPSHTWYSVLDLKDAFFCLKLHPNSQPLFAFEWRDPEKGNTGQLTWTRLPQGFKNSPTLFNEALHRDLASFRALNPQVVMLQYVDDLLVAAPTYRDCKEGTRRLLQELSKLGYRVSAKKAQLCREEVTYLGYLLKGGKRWLTPARKATVMKIPTPTTPRQVREFLGKAGFCRLFIPGFASLAAPLYPLTRPKVPFTWTEAHQEAFGRIKEALLSAPALALPDLTKPFALYVDEKEGVARGVLTQTLGPWRRPVAYLSKKLDPVASGWPTCLKAIAAVALLLKDADKLTLGQNVLVIAPHNLESIVRQPPDRWMTNARMTHYQSLLLNERVSFAPPAILNPATLLPVESDDTPIHICSEILAEETGTRPDLRDQPLPGVPAWYTDGSSFIMDGRRQAGAAIVDNKRTVWASNLPEGTSAQKAELIALTQALRLAEGKSINIYTDSRYAFATAHVHGAIYKQRGWLTSAGKDIKNKEEILALLEAIHLPKRVAIIHCPGHQRGTDPVATGNRKADEAAKQAAQSTRILTETTKNAGKRTADGSEFEKRTADGSEFESPKKKAKVE

SEQ ID NO: 6124 - protein, 2095 aa, synthetic construct
MPAAKRVKLDGGDKKYSIGLDIGTNSVGWAVITDEYKVPSKKFKVLGNTDRHSIKKNLIGALLFDSGETAEATRLKRTARRRYTRRKNRICYLQEIFSNEMAKVDDSFFHRLEESFLVEEDKKHERHPIFGNIVDEVAYHEKYPTIYHLRKKLVDSTDKADLRLIYLALAHMIKFRGHFLIEGDLNPDNSDVDKLFIQLVQTYNQLFEENPINASGVDAKAILSARLSKSRRLENLIAQLPGEKKNGLFGNLIALSLGLTPNFKSNFDLAEDAKLQLSKDTYDDDLDNLLAQIGDQYADLFLAAKNLSDAILLSDILRVNTEITKAPLSASMIKRYDEHHQDLTLLKALVRQQLPEKYKEIFFDQSKNGYAGYIDGGASQEEFYKFIKPILEKMDGTEELLVKLNREDLLRKQRTFDNGSIPHQIHLGELHAILRRQEDFYPFLKDNREKIEKILTFRIPYYVGPLARGNSRFAWMTRKSEETITPWNFEEVVDKGASAQSFIERMTNFDKNLPNEKVLPKHSLLYEYFTVYNELTKVKYVTEGMRKPAFLSGEQKKAIVDLLFKTNRKVTVKQLKEDYFKKIECFDSVEISGVEDRFNASLGTYHDLLKIIKDKDFLDNEENEDILEDIVLTLTLFEDREMIEERLKTYAHLFDDKVMKQLKRRRYTGWGRLSRKLINGIRDKQSGKTILDFLKSDGFANRNFMQLIHDDSLTFKEDIQKAQVSGQGDSLHEHIANLAGSPAIKKGILQTVKVVDELVKVMGRHKPENIVIEMARENQTTQKGQKNSRERMKRIEEGIKELGSQILKEHPVENTQLQNEKLYLYYLQNGRDMYVDQELDINRLSDYDVDHIVPQSFLKDDSIDNKVLTRSDKARGKSDNVPSEEVVKKMKNYWRQLLNAKLITQRKFDNLTKAERGGLSELDKAGFIKRQLVETRQITKHVAQILDSRMNTKYDENDKLIREVKVITLKSKLVSDFRKDFQFYKVREINNYHHAHDAYLNAVVGTALIKKYPKLESEFVYGDYKVYDVRKMIAKSEQEIGKATAKYFFYSNIMNFFKTEITLANGEIRKRPLIETNGETGEIVWDKGRDFATVRKVLSMPQVNIVKKTEVQTGGFSKESILPKRNSDKLIARKKDWDPKKYGGFDSPTVAYSVLVVAKVEKGKSKKLKSVKELLGITIMERSSFEKNPIDFLEAKGYKEVKKDLIIKLPKYSLFELENGRKRMLASAGELQKGNELALPSKYVNFLYLASHYEKLKGSPEDNEQKQLFVEQHKHYLDEIIEQISEFSKRVILADANLDKVLSAYNKHRDKPIREQAENIIHLFTLTNLGAPAAFKYFDTTIDRKRYTSTKEVLDATLIHQSITGLYETRIDLSQLGGDGGGGGGSGGGGSGGTLNLEDEYRLYETSAEPEVSPGSTWLSDFPQAWAETGGMGLAVRQAPLIIPLKATSTPVSIKQYPMSQEAKLGIKPHIQRLLDQGILVPCQSPWNTPLLPVKKPGTNDYRPVQDLREVNKRVEDIHPTVPNPYNLLSGLPPSHRWYTVLDLKDAFFCLRLHPTSQPLFAFEWRDPGMGISGQLTWTRLPQGFKNSPTLFNEALHRDLADFRIQHPDLILLQYVDDILLAATSELDCQQGTRALLLTLGNLGYRASAKKAQLCQKQVKYLGYLLKEGQRWLTEARKETVMGQPTPKTPRQLREFLGTAGFCRLWIPGFAEMAAPLYPLTKPGTLFNWGPDQQKAYQEIKQALLTAPALGLPDLTKPFELFVDEKQGYAKGVLTQKLGPWRRPVAYLSKKLDPVAAGWPPCLRMVAAIAVLRKDAGKLTMGQPLVILAPHAVEALVKQPPDRWLSNARMTHYQAMLLDTDRVQFGPVVALNPATLLPLPEEGAPHDCLEILAETHGTRPDLTDQPIPDADHTWYTDGSSFLQEGQRKAGAAVTTETEVIWARALPAGTSAQRAELIALTQALKMAEGKRLNVYTDSRYAFATAHIHGEIYRRRGWLTSEGREIKNKSEILALLKALFLPKRLSIIHCLGHQKGDSAEARGNRLADQAAREAAIKTPPDTSTLLAGKRTADGSEFEKRTADGSEFESPKKKAKVE

SEQ ID NO: 6125 - protein, 2095 aa, synthetic construct
MPAAKRVKLDGGDKKYSIGLDIGTNSVGWAVITDEYKVPSKKFKVLGNTDRHSIKKNLIGALLFDSGETAEATRLKRTARRRYTRRKNRICYLQEIFSNEMAKVDDSFFHRLEESFLVEEDKKHERHPIFGNIVDEVAYHEKYPTIYHLRKKLVDSTDKADLRLIYLALAHMIKFRGHFLIEGDLNPDNSDVDKLFIQLVQTYNQLFEENPINASGVDAKAILSARLSKSRRLENLIAQLPGEKKNGLFGNLIALSLGLTPNFKSNFDLAEDAKLQLSKDTYDDDLDNLLAQIGDQYADLFLAAKNLSDAILLSDILRVNTEITKAPLSASMIKRYDEHHQDLTLLKALVRQQLPEKYKEIFFDQSKNGYAGYIDGGASQEEFYKFIKPILEKMDGTEELLVKLNREDLLRKQRTFDNGSIPHQIHLGELHAILRRQEDFYPFLKDNREKIEKILTFRIPYYVGPLARGNSRFAWMTRKSEETITPWNFEEVVDKGASAQSFIERMTNFDKNLPNEKVLPKHSLLYEYFTVYNELTKVKYVTEGMRKPAFLSGEQKKAIVDLLFKTNRKVTVKQLKEDYFKKIECFDSVEISGVEDRFNASLGTYHDLLKIIKDKDFLDNEENEDILEDIVLTLTLFEDREMIEERLKTYAHLFDDKVMKQLKRRRYTGWGRLSRKLINGIRDKQSGKTILDFLKSDGFANRNFMQLIHDDSLTFKEDIQKAQVSGQGDSLHEHIANLAGSPAIKKGILQTVKVVDELVKVMGRHKPENIVIEMARENQTTQKGQKNSRERMKRIEEGIKELGSQILKEHPVENTQLQNEKLYLYYLQNGRDMYVDQELDINRLSDYDVDHIVPQSFLKDDSIDNKVLTRSDKARGKSDNVPSEEVVKKMKNYWRQLLNAKLITQRKFDNLTKAERGGLSELDKAGFIKRQLVETRQITKHVAQILDSRMNTKYDENDKLIREVKVITLKSKLVSDFRKDFQFYKVREINNYHHAHDAYLNAVVGTALIKKYPKLESEFVYGDYKVYDVRKMIAKSEQEIGKATAKYFFYSNIMNFFKTEITLANGEIRKRPLIETNGETGEIVWDKGRDFATVRKVLSMPQVNIVKKTEVQTGGFSKESILPKRNSDKLIARKKDWDPKKYGGFDSPTVAYSVLVVAKVEKGKSKKLKSVKELLGITIMERSSFEKNPIDFLEAKGYKEVKKDLIIKLPKYSLFELENGRKRMLASAGELQKGNELALPSKYVNFLYLASHYEKLKGSPEDNEQKQLFVEQHKHYLDEIIEQISEFSKRVILADANLDKVLSAYNKHRDKPIREQAENIIHLFTLTNLGAPAAFKYFDTTIDRKRYTSTKEVLDATLIHQSITGLYETRIDLSQLGGDGGGGGGSGGGGSGGTLNLEDEYRLYETSAEPEVSPGSTWLSDFPQAWAETGGMGLAVRQAPLIIPLKATSTPVSIKQYPMSQEAKLGIKPHIQRLLDQGILVPCQSPWNTPLLPVKKPGTNDYRPVQDLREVNKRVEDIHPTVPNPYNLLSGLPPSHRWYTVLDLKDAFFCLRLHPTSQPLFAFEWRDPGMGISGQLTWTRLPQGFKNSPTLFNEALHRDLADFRIQHPDLILLQYVDDILLAATSELDCQQGTRALLLTLGNLGYRASAKKAQLCQKQVKYLGYLLKEGQRWLTEARKETVMGQPTPKTPRQLREFLGKAGFCRLFIPGFAEMAAPLYPLTKPGTLFNWGPDQQKAYQEIKQALLTAPALGLPDLTKPFELFVDEKQGYAKGVLTQKLGPWRRPVAYLSKKLDPVAAGWPPCLRMVAAIAVLRKDAGKLTMGQPLVILAPHAVEALVKQPPDRWLSNARMTHYQAMLLDTDRVQFGPVVALNPATLLPLPEEGAPHDCLEILAETHGTRPDLTDQPIPDADHTWYTDGSSFLQEGQRKAGAAVTTETEVIWARALPAGTSAQRAELIALTQALKMAEGKRLNVYTDSRYAFATAHIHGEIYRRRGWLTSEGREIKNKSEILALLKALFLPKRLSIIHCLGHQKGDSAEARGNRLADQAAREAAIKTPPDTSTLLAGKRTADGSEFEKRTADGSEFESPKKKAKVE

SEQ ID NO: 6126 - protein, 2095 aa, synthetic construct
MPAAKRVKLDGGDKKYSIGLDIGTNSVGWAVITDEYKVPSKKFKVLGNTDRHSIKKNLIGALLFDSGETAEATRLKRTARRRYTRRKNRICYLQEIFSNEMAKVDDSFFHRLEESFLVEEDKKHERHPIFGNIVDEVAYHEKYPTIYHLRKKLVDSTDKADLRLIYLALAHMIKFRGHFLIEGDLNPDNSDVDKLFIQLVQTYNQLFEENPINASGVDAKAILSARLSKSRRLENLIAQLPGEKKNGLFGNLIALSLGLTPNFKSNFDLAEDAKLQLSKDTYDDDLDNLLAQIGDQYADLFLAAKNLSDAILLSDILRVNTEITKAPLSASMIKRYDEHHQDLTLLKALVRQQLPEKYKEIFFDQSKNGYAGYIDGGASQEEFYKFIKPILEKMDGTEELLVKLNREDLLRKQRTFDNGSIPHQIHLGELHAILRRQEDFYPFLKDNREKIEKILTFRIPYYVGPLARGNSRFAWMTRKSEETITPWNFEEVVDKGASAQSFIERMTNFDKNLPNEKVLPKHSLLYEYFTVYNELTKVKYVTEGMRKPAFLSGEQKKAIVDLLFKTNRKVTVKQLKEDYFKKIECFDSVEISGVEDRFNASLGTYHDLLKIIKDKDFLDNEENEDILEDIVLTLTLFEDREMIEERLKTYAHLFDDKVMKQLKRRRYTGWGRLSRKLINGIRDKQSGKTILDFLKSDGFANRNFMQLIHDDSLTFKEDIQKAQVSGQGDSLHEHIANLAGSPAIKKGILQTVKVVDELVKVMGRHKPENIVIEMARENQTTQKGQKNSRERMKRIEEGIKELGSQILKEHPVENTQLQNEKLYLYYLQNGRDMYVDQELDINRLSDYDVDHIVPQSFLKDDSIDNKVLTRSDKARGKSDNVPSEEVVKKMKNYWRQLLNAKLITQRKFDNLTKAERGGLSELDKAGFIKRQLVETRQITKHVAQILDSRMNTKYDENDKLIREVKVITLKSKLVSDFRKDFQFYKVREINNYHHAHDAYLNAVVGTALIKKYPKLESEFVYGDYKVYDVRKMIAKSEQEIGKATAKYFFYSNIMNFFKTEITLANGEIRKRPLIETNGETGEIVWDKGRDFATVRKVLSMPQVNIVKKTEVQTGGFSKESILPKRNSDKLIARKKDWDPKKYGGFDSPTVAYSVLVVAKVEKGKSKKLKSVKELLGITIMERSSFEKNPIDFLEAKGYKEVKKDLIIKLPKYSLFELENGRKRMLASAGELQKGNELALPSKYVNFLYLASHYEKLKGSPEDNEQKQLFVEQHKHYLDEIIEQISEFSKRVILADANLDKVLSAYNKHRDKPIREQAENIIHLFTLTNLGAPAAFKYFDTTIDRKRYTSTKEVLDATLIHQSITGLYETRIDLSQLGGDGGGGGGSGGGGSGGTLGIEDEYRLHETSTEPDVSLGSTWLSDFPQAWAETGGMGLAVRQAPLIIPLKATSTPVSIQQYPMSHEARLGIKPHIQRLLDQGILVPCQSPWNTPLLPVKKPGTNDYRPVQDLREVNKRVEDIHPTVPNPYNLLSGLPPSHQWYTVLDLKDAFFCLRLHPTSQPLFAFEWRDPGMGISGQLTWTRLPQGFKNSPTLFNEALHRDLADFRIQHPDLILLQYVDDILLAATSELDCQQGTRALLQTLGDLGYRASAKKAQICQKQVKYLGYLLREGQRWLTEARKETVMGQPVPKTPRQLREFLGTAGFCRLWIPGFAEMAAPLYPLTKPGTLFSWGPDQQKAYQEIKQALLTAPALGLPDLTKPFELFVDEKQGYAKGVLTQKLGPWRRPVAYLSKKLDPVAAGWPPCLRMVAAIAVLTKDAGKLTMGQPLVILAPHAVEALVKQPPDRWLSNARMTHYQAMLLDTDRVQFGPVVALNPATLLPLPEEGAPHDCLEILAETHGTRPDLTDQPIPDADHTWYTDGSSFLQEGQRKAGAAVTTETEVIWAGALPAGTSAQRAELIALTQALKMAEGKRLNVYTDSRYAFATAHIHGEIYRRRGWLTSEGREIKNKSEILALLKALFLPKRLSIIHCLGHQKGDSAEARGNRLADQAAREAAIKTPPDTSTLLAGKRTADGSEFEKRTADGSEFESPKKKAKVE

SEQ ID NO: 6127 - protein, 2095 aa, synthetic construct
MPAAKRVKLDGGDKKYSIGLDIGTNSVGWAVITDEYKVPSKKFKVLGNTDRHSIKKNLIGALLFDSGETAEATRLKRTARRRYTRRKNRICYLQEIFSNEMAKVDDSFFHRLEESFLVEEDKKHERHPIFGNIVDEVAYHEKYPTIYHLRKKLVDSTDKADLRLIYLALAHMIKFRGHFLIEGDLNPDNSDVDKLFIQLVQTYNQLFEENPINASGVDAKAILSARLSKSRRLENLIAQLPGEKKNGLFGNLIALSLGLTPNFKSNFDLAEDAKLQLSKDTYDDDLDNLLAQIGDQYADLFLAAKNLSDAILLSDILRVNTEITKAPLSASMIKRYDEHHQDLTLLKALVRQQLPEKYKEIFFDQSKNGYAGYIDGGASQEEFYKFIKPILEKMDGTEELLVKLNREDLLRKQRTFDNGSIPHQIHLGELHAILRRQEDFYPFLKDNREKIEKILTFRIPYYVGPLARGNSRFAWMTRKSEETITPWNFEEVVDKGASAQSFIERMTNFDKNLPNEKVLPKHSLLYEYFTVYNELTKVKYVTEGMRKPAFLSGEQKKAIVDLLFKTNRKVTVKQLKEDYFKKIECFDSVEISGVEDRFNASLGTYHDLLKIIKDKDFLDNEENEDILEDIVLTLTLFEDREMIEERLKTYAHLFDDKVMKQLKRRRYTGWGRLSRKLINGIRDKQSGKTILDFLKSDGFANRNFMQLIHDDSLTFKEDIQKAQVSGQGDSLHEHIANLAGSPAIKKGILQTVKVVDELVKVMGRHKPENIVIEMARENQTTQKGQKNSRERMKRIEEGIKELGSQILKEHPVENTQLQNEKLYLYYLQNGRDMYVDQELDINRLSDYDVDHIVPQSFLKDDSIDNKVLTRSDKARGKSDNVPSEEVVKKMKNYWRQLLNAKLITQRKFDNLTKAERGGLSELDKAGFIKRQLVETRQITKHVAQILDSRMNTKYDENDKLIREVKVITLKSKLVSDFRKDFQFYKVREINNYHHAHDAYLNAVVGTALIKKYPKLESEFVYGDYKVYDVRKMIAKSEQEIGKATAKYFFYSNIMNFFKTEITLANGEIRKRPLIETNGETGEIVWDKGRDFATVRKVLSMPQVNIVKKTEVQTGGFSKESILPKRNSDKLIARKKDWDPKKYGGFDSPTVAYSVLVVAKVEKGKSKKLKSVKELLGITIMERSSFEKNPIDFLEAKGYKEVKKDLIIKLPKYSLFELENGRKRMLASAGELQKGNELALPSKYVNFLYLASHYEKLKGSPEDNEQKQLFVEQHKHYLDEIIEQISEFSKRVILADANLDKVLSAYNKHRDKPIREQAENIIHLFTLTNLGAPAAFKYFDTTIDRKRYTSTKEVLDATLIHQSITGLYETRIDLSQLGGDGGGGGGSGGGGSGGTLNIEDEYRLHETSKGPDVPLGSTWLSDFPQAWAETGGMGLAFRQAPLIISLKATSTPVSIKQYPMSQEARLGIKPHIQRLLDQGILVPCQSPWNTPLLPVKKPGTNDYRPVQDLREVNKRVEDIHPTVPNPYNLLSGLPPSHQWYTVLDLKDAFFCLRLHPTSQSLFAFEWKDPEMGISGQLTWTRLPQGFKNSPTLFNEALHRDLADFRIQHPDLILLQYVDDLLLAATSELDCQQGTRALLQTLGDLGYRASAKKAQICQKQVKYLGYLLKEGQRWLTEARKETVMGQPTPKTPRQLREFLGTAGLCRLWIPGFAEMAAPLYPLTKPGTLFKWGPDQQKAYQEIKQALLTAPALGLPDLTKPFELFVDEKQGYAKGVLTQKLGPWRRPVAYLSKKLDPVAAGWPPCLRMVAAIAVLTKDVGKLTMGQPLVILAPHAVEALVKQPPDRWLSNARMTHYQALLLDTDRVQFGPIVALNPATLLPLPEEGLQHDCLDILAEAHGTRPDLTDQPLPDADHTWYTDGSSFLQEGQRRAGAAVTTETEVIWAKALPAGTSAQRAELIALTQALKMAAGKKLNVYTDSRYAFATAHIHGEIYRRRGWLTSEGKEIKNKDEILALLKALFLPKRLSIIHCPGHQKGNHAEARGNRMADQAAREVATRETPETSTLLAGKRTADGSEFEKRTADGSEFESPKKKAKVE

SEQ ID NO: 6128 - protein, 2086 aa, synthetic construct
MPAAKRVKLDGGDKKYSIGLDIGTNSVGWAVITDEYKVPSKKFKVLGNTDRHSIKKNLIGALLFDSGETAEATRLKRTARRRYTRRKNRICYLQEIFSNEMAKVDDSFFHRLEESFLVEEDKKHERHPIFGNIVDEVAYHEKYPTIYHLRKKLVDSTDKADLRLIYLALAHMIKFRGHFLIEGDLNPDNSDVDKLFIQLVQTYNQLFEENPINASGVDAKAILSARLSKSRRLENLIAQLPGEKKNGLFGNLIALSLGLTPNFKSNFDLAEDAKLQLSKDTYDDDLDNLLAQIGDQYADLFLAAKNLSDAILLSDILRVNTEITKAPLSASMIKRYDEHHQDLTLLKALVRQQLPEKYKEIFFDQSKNGYAGYIDGGASQEEFYKFIKPILEKMDGTEELLVKLNREDLLRKQRTFDNGSIPHQIHLGELHAILRRQEDFYPFLKDNREKIEKILTFRIPYYVGPLARGNSRFAWMTRKSEETITPWNFEEVVDKGASAQSFIERMTNFDKNLPNEKVLPKHSLLYEYFTVYNELTKVKYVTEGMRKPAFLSGEQKKAIVDLLFKTNRKVTVKQLKEDYFKKIECFDSVEISGVEDRFNASLGTYHDLLKIIKDKDFLDNEENEDILEDIVLTLTLFEDREMIEERLKTYAHLFDDKVMKQLKRRRYTGWGRLSRKLINGIRDKQSGKTILDFLKSDGFANRNFMQLIHDDSLTFKEDIQKAQVSGQGDSLHEHIANLAGSPAIKKGILQTVKVVDELVKVMGRHKPENIVIEMARENQTTQKGQKNSRERMKRIEEGIKELGSQILKEHPVENTQLQNEKLYLYYLQNGRDMYVDQELDINRLSDYDVDHIVPQSFLKDDSIDNKVLTRSDKARGKSDNVPSEEVVKKMKNYWRQLLNAKLITQRKFDNLTKAERGGLSELDKAGFIKRQLVETRQITKHVAQILDSRMNTKYDENDKLIREVKVITLKSKLVSDFRKDFQFYKVREINNYHHAHDAYLNAVVGTALIKKYPKLESEFVYGDYKVYDVRKMIAKSEQEIGKATAKYFFYSNIMNFFKTEITLANGEIRKRPLIETNGETGEIVWDKGRDFATVRKVLSMPQVNIVKKTEVQTGGFSKESILPKRNSDKLIARKKDWDPKKYGGFDSPTVAYSVLVVAKVEKGKSKKLKSVKELLGITIMERSSFEKNPIDFLEAKGYKEVKKDLIIKLPKYSLFELENGRKRMLASAGELQKGNELALPSKYVNFLYLASHYEKLKGSPEDNEQKQLFVEQHKHYLDEIIEQISEFSKRVILADANLDKVLSAYNKHRDKPIREQAENIIHLFTLTNLGAPAAFKYFDTTIDRKRYTSTKEVLDATLIHQSITGLYETRIDLSQLGGDGGGGGGSGGGGSGGVPWLMKKPLQLTVLVPLHEYQERLLQQTALPKEQKELLQKLFLKYDALWQHWENQVGHRRIKPHNIATGTLAPRPQKQYPINPKAKPSIQIVIDDLLKQGVLIQQNSTMNTPVYPVPKPDGKWRMVLDYREVNKTIPLIAAQNQHSAGILSSIYRGKYKTTLDLTNGFWAHPITPESYWLTAFTWQGKQYCWTRLPQGFLNSPALFTADVVDLLKEIPNVQAYVDDIYISHDDPQEHLEQLEKIFSILLNAGYVVSLKKSEIAQREVEFLGFNITKEGRGLTDTFKQKLLNITPPKDLKQLQSILGLLNFARNFIPNYSELVKPLYTIVANANGKFISWTEDNSNQLQHIISVLNQADNLEERNPETRLIIKVNSSPSAGYIRYYNEGSKRPIMYVNYIFSKAEAKFTQTEKLLTTMHKGLIKAMDLAMGQEILVYSPIVSMTKIQRTPLPERKALPVRWITWMTYLEDPRIQFHYDKSLPELQQIPNVTEDVIAKTKHPSEFAMVFYTDGSAIKHPDVNKSHSAGMGIAQVQFIPEYKIVHQWSIPLGDHTAQLAEIAAVEFACKKALKISGPVLIVTDSFYVAESANKELPYWKSNGFLNNKKKPLRHVSKWKSIAECLQLKPDIIIMHEKGHQQPMTTLHTEGNNLADKLATQGSYVVHAGKRTADGSEFEKRTADGSEFESPKKKAKVE

SEQ ID NO: 6129 - protein, 2102 aa, synthetic construct
MPAAKRVKLDGGDKKYSIGLDIGTNSVGWAVITDEYKVPSKKFKVLGNTDRHSIKKNLIGALLFDSGETAEATRLKRTARRRYTRRKNRICYLQEIFSNEMAKVDDSFFHRLEESFLVEEDKKHERHPIFGNIVDEVAYHEKYPTIYHLRKKLVDSTDKADLRLIYLALAHMIKFRGHFLIEGDLNPDNSDVDKLFIQLVQTYNQLFEENPINASGVDAKAILSARLSKSRRLENLIAQLPGEKKNGLFGNLIALSLGLTPNFKSNFDLAEDAKLQLSKDTYDDDLDNLLAQIGDQYADLFLAAKNLSDAILLSDILRVNTEITKAPLSASMIKRYDEHHQDLTLLKALVRQQLPEKYKEIFFDQSKNGYAGYIDGGASQEEFYKFIKPILEKMDGTEELLVKLNREDLLRKQRTFDNGSIPHQIHLGELHAILRRQEDFYPFLKDNREKIEKILTFRIPYYVGPLARGNSRFAWMTRKSEETITPWNFEEVVDKGASAQSFIERMTNFDKNLPNEKVLPKHSLLYEYFTVYNELTKVKYVTEGMRKPAFLSGEQKKAIVDLLFKTNRKVTVKQLKEDYFKKIECFDSVEISGVEDRFNASLGTYHDLLKIIKDKDFLDNEENEDILEDIVLTLTLFEDREMIEERLKTYAHLFDDKVMKQLKRRRYTGWGRLSRKLINGIRDKQSGKTILDFLKSDGFANRNFMQLIHDDSLTFKEDIQKAQVSGQGDSLHEHIANLAGSPAIKKGILQTVKVVDELVKVMGRHKPENIVIEMARENQTTQKGQKNSRERMKRIEEGIKELGSQILKEHPVENTQLQNEKLYLYYLQNGRDMYVDQELDINRLSDYDVDHIVPQSFLKDDSIDNKVLTRSDKARGKSDNVPSEEVVKKMKNYWRQLLNAKLITQRKFDNLTKAERGGLSELDKAGFIKRQLVETRQITKHVAQILDSRMNTKYDENDKLIREVKVITLKSKLVSDFRKDFQFYKVREINNYHHAHDAYLNAVVGTALIKKYPKLESEFVYGDYKVYDVRKMIAKSEQEIGKATAKYFFYSNIMNFFKTEITLANGEIRKRPLIETNGETGEIVWDKGRDFATVRKVLSMPQVNIVKKTEVQTGGFSKESILPKRNSDKLIARKKDWDPKKYGGFDSPTVAYSVLVVAKVEKGKSKKLKSVKELLGITIMERSSFEKNPIDFLEAKGYKEVKKDLIIKLPKYSLFELENGRKRMLASAGELQKGNELALPSKYVNFLYLASHYEKLKGSPEDNEQKQLFVEQHKHYLDEIIEQISEFSKRVILADANLDKVLSAYNKHRDKPIREQAENIIHLFTLTNLGAPAAFKYFDTTIDRKRYTSTKEVLDATLIHQSITGLYETRIDLSQLGGDGGGGGGSGGGGSGGGGSGGTAPLEEEYRLFLEAPIQNVTLLEQWKREIPKVWAEINPPGLASTQAPIHVQLLSTALPVRVRQYPITLEAKRSLRETIRKFRAAGILRPVHSPWNTPLLPVRKSGTSEYRMVQDLREVNKRVETIHPTVPNPYTLLSLLPPDRIWYSVLDLKDAFFCIPLAPESQLIFAFEWADAEEGESGQLTWTRLPQGFKNSPTLFNEALNRDLQGFRLDHPSVSLLQYVDDLLIAADTQAACLSATRDLLMTLAELGYRVSGKKAQLCQEEVTYLGFKIHKGSRSLSNSRTQAILQIPVPKTKRQVREFLGTIGYCRLWIPGFAELAQPLYAATRPGNDPLVWGEKEEEAFQSLKLALTQPPALALPSLDKPFQLFVEETSGAAKGVLTQALGPWKRPVAYLSKRLDPVAAGWPRCLRAIAAAALLTREASKLTFGQDIEITSSHNLESLLRSPPDKWLTNARITQYQVLLLDPPRVRFKQTAALNPATLLPETDDTLPIHHCLDTLDSLTSTRPDLTDQPLAQAEATLFTDGSSYIRDGKRYAGAAVVTLDSVIWAEPLPIGTSAQKAELIALTKALEWSKDKSVNIYTDSRYAFATLHVHGMIYRERGWLTAGGKAIKNAPEILALLTAVWLPKRVAVMHCKGHQKDDAPTSTGNRRADEVAREVAIRPLSTQATISAGKRTADGSEFEKRTADGSEFESPKKKAKVE

SEQ ID NO: 6130 - protein, 2102 aa, synthetic construct
MPAAKRVKLDGGDKKYSIGLDIGTNSVGWAVITDEYKVPSKKFKVLGNTDRHSIKKNLIGALLFDSGETAEATRLKRTARRRYTRRKNRICYLQEIFSNEMAKVDDSFFHRLEESFLVEEDKKHERHPIFGNIVDEVAYHEKYPTIYHLRKKLVDSTDKADLRLIYLALAHMIKFRGHFLIEGDLNPDNSDVDKLFIQLVQTYNQLFEENPINASGVDAKAILSARLSKSRRLENLIAQLPGEKKNGLFGNLIALSLGLTPNFKSNFDLAEDAKLQLSKDTYDDDLDNLLAQIGDQYADLFLAAKNLSDAILLSDILRVNTEITKAPLSASMIKRYDEHHQDLTLLKALVRQQLPEKYKEIFFDQSKNGYAGYIDGGASQEEFYKFIKPILEKMDGTEELLVKLNREDLLRKQRTFDNGSIPHQIHLGELHAILRRQEDFYPFLKDNREKIEKILTFRIPYYVGPLARGNSRFAWMTRKSEETITPWNFEEVVDKGASAQSFIERMTNFDKNLPNEKVLPKHSLLYEYFTVYNELTKVKYVTEGMRKPAFLSGEQKKAIVDLLFKTNRKVTVKQLKEDYFKKIECFDSVEISGVEDRFNASLGTYHDLLKIIKDKDFLDNEENEDILEDIVLTLTLFEDREMIEERLKTYAHLFDDKVMKQLKRRRYTGWGRLSRKLINGIRDKQSGKTILDFLKSDGFANRNFMQLIHDDSLTFKEDIQKAQVSGQGDSLHEHIANLAGSPAIKKGILQTVKVVDELVKVMGRHKPENIVIEMARENQTTQKGQKNSRERMKRIEEGIKELGSQILKEHPVENTQLQNEKLYLYYLQNGRDMYVDQELDINRLSDYDVDHIVPQSFLKDDSIDNKVLTRSDKARGKSDNVPSEEVVKKMKNYWRQLLNAKLITQRKFDNLTKAERGGLSELDKAGFIKRQLVETRQITKHVAQILDSRMNTKYDENDKLIREVKVITLKSKLVSDFRKDFQFYKVREINNYHHAHDAYLNAVVGTALIKKYPKLESEFVYGDYKVYDVRKMIAKSEQEIGKATAKYFFYSNIMNFFKTEITLANGEIRKRPLIETNGETGEIVWDKGRDFATVRKVLSMPQVNIVKKTEVQTGGFSKESILPKRNSDKLIARKKDWDPKKYGGFDSPTVAYSVLVVAKVEKGKSKKLKSVKELLGITIMERSSFEKNPIDFLEAKGYKEVKKDLIIKLPKYSLFELENGRKRMLASAGELQKGNELALPSKYVNFLYLASHYEKLKGSPEDNEQKQLFVEQHKHYLDEIIEQISEFSKRVILADANLDKVLSAYNKHRDKPIREQAENIIHLFTLTNLGAPAAFKYFDTTIDRKRYTSTKEVLDATLIHQSITGLYETRIDLSQLGGDGGGGGGSGGGGSGGGGSGGTAPLEEEYRLFLEAPIQNVTLLEQWKREIPKVWAEINPPGLASTQAPIHVQLLSTALPVRVRQYPITLEAKRSLRETIRKFRAAGILRPVHSPWNTPLLPVRKSGTSEYRMVQDLREVNKRVETIHPTVPNPYTLLSLLPPDRIWYSVLDLKDAFFCIPLAPESQLIFAFEWADAEEGESGQLTWTRLPQGFKNSPTLFNEALNRDLQGFRLDHPSVSLLQYVDDLLIAADTQAACLSATRDLLMTLAELGYRVSGKKAQLCQEEVTYLGFKIHKGSRSLSNSRTQAILQIPVPKTKRQVREFLGKIGYCRLFIPGFAELAQPLYAATRPGNDPLVWGEKEEEAFQSLKLALTQPPALALPSLDKPFQLFVEETSGAAKGVLTQALGPWKRPVAYLSKRLDPVAAGWPRCLRAIAAAALLTREASKLTFGQDIEITSSHNLESLLRSPPDKWLTNARITQYQVLLLDPPRVRFKQTAALNPATLLPETDDTLPIHHCLDTLDSLTSTRPDLTDQPLAQAEATLFTDGSSYIRDGKRYAGAAVVTLDSVIWAEPLPIGTSAQKAELIALTKALEWSKDKSVNIYTDSRYAFATLHVHGMIYRERGWLTAGGKAIKNAPEILALLTAVWLPKRVAVMHCKGHQKDDAPTSTGNRRADEVAREVAIRPLSTQATISAGKRTADGSEFEKRTADGSEFESPKKKAKVE

SEQ ID NO: 6131 - protein, 2106 aa, synthetic construct
MPAAKRVKLDGGDKKYSIGLDIGTNSVGWAVITDEYKVPSKKFKVLGNTDRHSIKKNLIGALLFDSGETAEATRLKRTARRRYTRRKNRICYLQEIFSNEMAKVDDSFFHRLEESFLVEEDKKHERHPIFGNIVDEVAYHEKYPTIYHLRKKLVDSTDKADLRLIYLALAHMIKFRGHFLIEGDLNPDNSDVDKLFIQLVQTYNQLFEENPINASGVDAKAILSARLSKSRRLENLIAQLPGEKKNGLFGNLIALSLGLTPNFKSNFDLAEDAKLQLSKDTYDDDLDNLLAQIGDQYADLFLAAKNLSDAILLSDILRVNTEITKAPLSASMIKRYDEHHQDLTLLKALVRQQLPEKYKEIFFDQSKNGYAGYIDGGASQEEFYKFIKPILEKMDGTEELLVKLNREDLLRKQRTFDNGSIPHQIHLGELHAILRRQEDFYPFLKDNREKIEKILTFRIPYYVGPLARGNSRFAWMTRKSEETITPWNFEEVVDKGASAQSFIERMTNFDKNLPNEKVLPKHSLLYEYFTVYNELTKVKYVTEGMRKPAFLSGEQKKAIVDLLFKTNRKVTVKQLKEDYFKKIECFDSVEISGVEDRFNASLGTYHDLLKIIKDKDFLDNEENEDILEDIVLTLTLFEDREMIEERLKTYAHLFDDKVMKQLKRRRYTGWGRLSRKLINGIRDKQSGKTILDFLKSDGFANRNFMQLIHDDSLTFKEDIQKAQVSGQGDSLHEHIANLAGSPAIKKGILQTVKVVDELVKVMGRHKPENIVIEMARENQTTQKGQKNSRERMKRIEEGIKELGSQILKEHPVENTQLQNEKLYLYYLQNGRDMYVDQELDINRLSDYDVDHIVPQSFLKDDSIDNKVLTRSDKARGKSDNVPSEEVVKKMKNYWRQLLNAKLITQRKFDNLTKAERGGLSELDKAGFIKRQLVETRQITKHVAQILDSRMNTKYDENDKLIREVKVITLKSKLVSDFRKDFQFYKVREINNYHHAHDAYLNAVVGTALIKKYPKLESEFVYGDYKVYDVRKMIAKSEQEIGKATAKYFFYSNIMNFFKTEITLANGEIRKRPLIETNGETGEIVWDKGRDFATVRKVLSMPQVNIVKKTEVQTGGFSKESILPKRNSDKLIARKKDWDPKKYGGFDSPTVAYSVLVVAKVEKGKSKKLKSVKELLGITIMERSSFEKNPIDFLEAKGYKEVKKDLIIKLPKYSLFELENGRKRMLASAGELQKGNELALPSKYVNFLYLASHYEKLKGSPEDNEQKQLFVEQHKHYLDEIIEQISEFSKRVILADANLDKVLSAYNKHRDKPIREQAENIIHLFTLTNLGAPAAFKYFDTTIDRKRYTSTKEVLDATLIHQSITGLYETRIDLSQLGGDGGGGGGSGGGGSGGGGSGGTVSLQDEHRLFDIPVTTSLPDVWLQDFPQAWAETGGLGRAKCQAPIIIDLKPTAVPVSIKQYPMSLEAHMGIRQHIIKFLELGVLRPCRSPWNTPLLPVKKPGTQDYRPVQDLREINKRTVDIHPTVPNPYNLLSTLKPDYSWYTVLDLKDAFFCLPLAPQSQELFAFEWKDPERGISGQLTWTRLPQGFKNSPTLFNEALHRDLTDFRTQHPEVTLLQYVDDLLLAAPTKKACTQGTRHLLQELGEKGYRASAKKAQICQTKVTYLGYILSEGKRWLTPGRIETVARIPPPRNPREVREFLGTAGFCRLWIPGFAELAAPLYALTKPSTPFTWQTEHQLAFEALKKALLSAPALGLPDTSKPFTLFLDERQGIAKGVLTQKLGPWKRPVAYLSKKLDPVAAGWPPCLRIMAATAMLVKDSAKLTLGQPLTVITPHTLEAIVRQPPDRWITNARLTHYQALLLDTDRVQFGPPVTLNPATLLPVPENQPSPHDCRQVLAETHGTREDLKDQELPDADHTWYTDGSSYLDSGTRRAGAAVVDGHNTIWAQSLPPGTSAQKAELIALTKALELSKGKKANIYTDSRYAFATAHTHGSIYERRGWLTSEGKEIKNKAEIIALLKALFLPQEVAIIHCPGHQKGQDPVAVGNRQADRVARQAAMAEVLTLATEPDNTSHITAGKRTADGSEFEKRTADGSEFESPKKKAKVE

SEQ ID NO: 6132 - protein, 2091 aa, synthetic construct
MPAAKRVKLDGGDKKYSIGLDIGTNSVGWAVITDEYKVPSKKFKVLGNTDRHSIKKNLIGALLFDSGETAEATRLKRTARRRYTRRKNRICYLQEIFSNEMAKVDDSFFHRLEESFLVEEDKKHERHPIFGNIVDEVAYHEKYPTIYHLRKKLVDSTDKADLRLIYLALAHMIKFRGHFLIEGDLNPDNSDVDKLFIQLVQTYNQLFEENPINASGVDAKAILSARLSKSRRLENLIAQLPGEKKNGLFGNLIALSLGLTPNFKSNFDLAEDAKLQLSKDTYDDDLDNLLAQIGDQYADLFLAAKNLSDAILLSDILRVNTEITKAPLSASMIKRYDEHHQDLTLLKALVRQQLPEKYKEIFFDQSKNGYAGYIDGGASQEEFYKFIKPILEKMDGTEELLVKLNREDLLRKQRTFDNGSIPHQIHLGELHAILRRQEDFYPFLKDNREKIEKILTFRIPYYVGPLARGNSRFAWMTRKSEETITPWNFEEVVDKGASAQSFIERMTNFDKNLPNEKVLPKHSLLYEYFTVYNELTKVKYVTEGMRKPAFLSGEQKKAIVDLLFKTNRKVTVKQLKEDYFKKIECFDSVEISGVEDRFNASLGTYHDLLKIIKDKDFLDNEENEDILEDIVLTLTLFEDREMIEERLKTYAHLFDDKVMKQLKRRRYTGWGRLSRKLINGIRDKQSGKTILDFLKSDGFANRNFMQLIHDDSLTFKEDIQKAQVSGQGDSLHEHIANLAGSPAIKKGILQTVKVVDELVKVMGRHKPENIVIEMARENQTTQKGQKNSRERMKRIEEGIKELGSQILKEHPVENTQLQNEKLYLYYLQNGRDMYVDQELDINRLSDYDVDHIVPQSFLKDDSIDNKVLTRSDKARGKSDNVPSEEVVKKMKNYWRQLLNAKLITQRKFDNLTKAERGGLSELDKAGFIKRQLVETRQITKHVAQILDSRMNTKYDENDKLIREVKVITLKSKLVSDFRKDFQFYKVREINNYHHAHDAYLNAVVGTALIKKYPKLESEFVYGDYKVYDVRKMIAKSEQEIGKATAKYFFYSNIMNFFKTEITLANGEIRKRPLIETNGETGEIVWDKGRDFATVRKVLSMPQVNIVKKTEVQTGGFSKESILPKRNSDKLIARKKDWDPKKYGGFDSPTVAYSVLVVAKVEKGKSKKLKSVKELLGITIMERSSFEKNPIDFLEAKGYKEVKKDLIIKLPKYSLFELENGRKRMLASAGELQKGNELALPSKYVNFLYLASHYEKLKGSPEDNEQKQLFVEQHKHYLDEIIEQISEFSKRVILADANLDKVLSAYNKHRDKPIREQAENIIHLFTLTNLGAPAAFKYFDTTIDRKRYTSTKEVLDATLIHQSITGLYETRIDLSQLGGDGGGGGGSGGGGSGGGGSGGVPWLTQQPLQLTILVPLQEYQEKILSKTALPEDQKQQLKTLFVKYDNLWQHWENQVGHRKIRPHNIATGDYPPRPQKQYPINPKAKPSIQIVIDDLLKQGVLTPQNSTMNTPVYPVPKPDGRWRMVLDYREVNKTIPLTAAQNQHSAGILATIVRQKYKTTLDLANGFWAHPITPESYWLTAFTWQGKQYCWTRLPQGFLNSPALFNADVVDLLKEIPNVQVYVDDIYLSHDDPKEHVQQLEKVFQILLQAGYVVSLKKSEIGQKTVEFLGFNITKEGRGLTDTFKTKLLNITPPKDLKQLQSILGLLNFARNFIPNFAELVQPLYNLIAPAKGKYIEWSEENTKQLNMVIEALNTASNLEERLPEQRLVIKVNTSPSAGYVRYYNETGKKPIMYLNYVFSKAELKFSMLEKLLTTMHKALIKAMDLAMGQEILVYSPIVSMTKIQKTPLPERKALPIRWITWMTYLEDPRIQFHYDKTLPELKHIPDVYTSSQSPVKHPSQYEGVFYTDGSAIKSPDPTKSNNAGMGIVHATYKPEYQVLNQWSIPLGNHTAQMAEIAAVEFACKKALKIPGPVLVITDSFYVAESANKELPYWKSNGFVNNKKKPLKHISKWKSIAECLSMKPDITIQHEKGISLQIPVFILKGNALADKLATQGSYVVNAGKRTADGSEFEKRTADGSEFESPKKKAKVE

SEQ ID NO: 6133 - protein, 2222 aa, synthetic construct
MPAAKRVKLDGGDKKYSIGLDIGTNSVGWAVITDEYKVPSKKFKVLGNTDRHSIKKNLIGALLFDSGETAEATRLKRTARRRYTRRKNRICYLQEIFSNEMAKVDDSFFHRLEESFLVEEDKKHERHPIFGNIVDEVAYHEKYPTIYHLRKKLVDSTDKADLRLIYLALAHMIKFRGHFLIEGDLNPDNSDVDKLFIQLVQTYNQLFEENPINASGVDAKAILSARLSKSRRLENLIAQLPGEKKNGLFGNLIALSLGLTPNFKSNFDLAEDAKLQLSKDTYDDDLDNLLAQIGDQYADLFLAAKNLSDAILLSDILRVNTEITKAPLSASMIKRYDEHHQDLTLLKALVRQQLPEKYKEIFFDQSKNGYAGYIDGGASQEEFYKFIKPILEKMDGTEELLVKLNREDLLRKQRTFDNGSIPHQIHLGELHAILRRQEDFYPFLKDNREKIEKILTFRIPYYVGPLARGNSRFAWMTRKSEETITPWNFEEVVDKGASAQSFIERMTNFDKNLPNEKVLPKHSLLYEYFTVYNELTKVKYVTEGMRKPAFLSGEQKKAIVDLLFKTNRKVTVKQLKEDYFKKIECFDSVEISGVEDRFNASLGTYHDLLKIIKDKDFLDNEENEDILEDIVLTLTLFEDREMIEERLKTYAHLFDDKVMKQLKRRRYTGWGRLSRKLINGIRDKQSGKTILDFLKSDGFANRNFMQLIHDDSLTFKEDIQKAQVSGQGDSLHEHIANLAGSPAIKKGILQTVKVVDELVKVMGRHKPENIVIEMARENQTTQKGQKNSRERMKRIEEGIKELGSQILKEHPVENTQLQNEKLYLYYLQNGRDMYVDQELDINRLSDYDVDHIVPQSFLKDDSIDNKVLTRSDKARGKSDNVPSEEVVKKMKNYWRQLLNAKLITQRKFDNLTKAERGGLSELDKAGFIKRQLVETRQITKHVAQILDSRMNTKYDENDKLIREVKVITLKSKLVSDFRKDFQFYKVREINNYHHAHDAYLNAVVGTALIKKYPKLESEFVYGDYKVYDVRKMIAKSEQEIGKATAKYFFYSNIMNFFKTEITLANGEIRKRPLIETNGETGEIVWDKGRDFATVRKVLSMPQVNIVKKTEVQTGGFSKESILPKRNSDKLIARKKDWDPKKYGGFDSPTVAYSVLVVAKVEKGKSKKLKSVKELLGITIMERSSFEKNPIDFLEAKGYKEVKKDLIIKLPKYSLFELENGRKRMLASAGELQKGNELALPSKYVNFLYLASHYEKLKGSPEDNEQKQLFVEQHKHYLDEIIEQISEFSKRVILADANLDKVLSAYNKHRDKPIREQAENIIHLFTLTNLGAPAAFKYFDTTIDRKRYTSTKEVLDATLIHQSITGLYETRIDLSQLGGDGGGGGGSGGGGSGGGGSGGTLGDQGSRGSDPLPEPRVTLTVEGIPTEFLVNTGAEHSVLTKPMGKMGSKRTVVAGATGSKVYPWTTKRLLKIGQKQVTHSFLVIPECPAPLLGRDLLTKLKAQIQFSTEGPQVTWEDRPAMCLVLNLEEEYRLHEKPVPPSIDPSWLQLFPMVWAEKAGMGLANQVPPVVVELKSDASPVAVRQYPMSKEAREGIRPHIQRFLDLGILVPCQSPWNTPLLPVKKPGTNDYRPVQDLREVNKRVQDIHPTVPNPYNLLSSLPPSHTWYSVLDLKDAFFCLKLHPNSQPLFAFEWRDPEKGNTGQLTWTRLPQGFKNSPTLFNEALHRDLASFRALNPQVVMLQYVDDLLVAAPTYRDCKEGTRRLLQELSKLGYRVSAKKAQLCREEVTYLGYLLKGGKRWLTPARKATVMKIPTPTTPRQVREFLGKAGFCRLFIPGFASLAAPLYPLTRPKVPFTWTEAHQEAFGRIKEALLSAPALALPDLTKPFALYVDEKEGVARGVLTQTLGPWRRPVAYLSKKLDPVASGWPTCLKAIAAVALLLKDADKLTLGQNVLVIAPHNLESIVRQPPDRWMTNARMTHYQSLLLNERVSFAPPAILNPATLLPVESDDTPIHICSEILAEETGTRPDLRDQPLPGVPAWYTDGSSFIMDGRRQAGAAIVDNKRTVWASNLPEGTSAQKAELIALTQALRLAEGKSINIYTDSRYAFATAHVHGAIYKQRGWLTSAGKDIKNKEEILALLEAIHLPKRVAIIHCPGHQRGTDPVATGNRKADEAAKQAAQSTRILTETTKNAGKRTADGSEFEKRTADGSEFESPKKKAKVE

SEQ ID NO: 6134 - protein, 2100 aa, synthetic construct
MPAAKRVKLDGGDKKYSIGLDIGTNSVGWAVITDEYKVPSKKFKVLGNTDRHSIKKNLIGALLFDSGETAEATRLKRTARRRYTRRKNRICYLQEIFSNEMAKVDDSFFHRLEESFLVEEDKKHERHPIFGNIVDEVAYHEKYPTIYHLRKKLVDSTDKADLRLIYLALAHMIKFRGHFLIEGDLNPDNSDVDKLFIQLVQTYNQLFEENPINASGVDAKAILSARLSKSRRLENLIAQLPGEKKNGLFGNLIALSLGLTPNFKSNFDLAEDAKLQLSKDTYDDDLDNLLAQIGDQYADLFLAAKNLSDAILLSDILRVNTEITKAPLSASMIKRYDEHHQDLTLLKALVRQQLPEKYKEIFFDQSKNGYAGYIDGGASQEEFYKFIKPILEKMDGTEELLVKLNREDLLRKQRTFDNGSIPHQIHLGELHAILRRQEDFYPFLKDNREKIEKILTFRIPYYVGPLARGNSRFAWMTRKSEETITPWNFEEVVDKGASAQSFIERMTNFDKNLPNEKVLPKHSLLYEYFTVYNELTKVKYVTEGMRKPAFLSGEQKKAIVDLLFKTNRKVTVKQLKEDYFKKIECFDSVEISGVEDRFNASLGTYHDLLKIIKDKDFLDNEENEDILEDIVLTLTLFEDREMIEERLKTYAHLFDDKVMKQLKRRRYTGWGRLSRKLINGIRDKQSGKTILDFLKSDGFANRNFMQLIHDDSLTFKEDIQKAQVSGQGDSLHEHIANLAGSPAIKKGILQTVKVVDELVKVMGRHKPENIVIEMARENQTTQKGQKNSRERMKRIEEGIKELGSQILKEHPVENTQLQNEKLYLYYLQNGRDMYVDQELDINRLSDYDVDHIVPQSFLKDDSIDNKVLTRSDKARGKSDNVPSEEVVKKMKNYWRQLLNAKLITQRKFDNLTKAERGGLSELDKAGFIKRQLVETRQITKHVAQILDSRMNTKYDENDKLIREVKVITLKSKLVSDFRKDFQFYKVREINNYHHAHDAYLNAVVGTALIKKYPKLESEFVYGDYKVYDVRKMIAKSEQEIGKATAKYFFYSNIMNFFKTEITLANGEIRKRPLIETNGETGEIVWDKGRDFATVRKVLSMPQVNIVKKTEVQTGGFSKESILPKRNSDKLIARKKDWDPKKYGGFDSPTVAYSVLVVAKVEKGKSKKLKSVKELLGITIMERSSFEKNPIDFLEAKGYKEVKKDLIIKLPKYSLFELENGRKRMLASAGELQKGNELALPSKYVNFLYLASHYEKLKGSPEDNEQKQLFVEQHKHYLDEIIEQISEFSKRVILADANLDKVLSAYNKHRDKPIREQAENIIHLFTLTNLGAPAAFKYFDTTIDRKRYTSTKEVLDATLIHQSITGLYETRIDLSQLGGDGGGGGGSGGGGSGGGGSGGTLNLEDEYRLYETSAEPEVSPGSTWLSDFPQAWAETGGMGLAVRQAPLIIPLKATSTPVSIKQYPMSQEAKLGIKPHIQRLLDQGILVPCQSPWNTPLLPVKKPGTNDYRPVQDLREVNKRVEDIHPTVPNPYNLLSGLPPSHRWYTVLDLKDAFFCLRLHPTSQPLFAFEWRDPGMGISGQLTWTRLPQGFKNSPTLFNEALHRDLADFRIQHPDLILLQYVDDILLAATSELDCQQGTRALLLTLGNLGYRASAKKAQLCQKQVKYLGYLLKEGQRWLTEARKETVMGQPTPKTPRQLREFLGTAGFCRLWIPGFAEMAAPLYPLTKPGTLFNWGPDQQKAYQEIKQALLTAPALGLPDLTKPFELFVDEKQGYAKGVLTQKLGPWRRPVAYLSKKLDPVAAGWPPCLRMVAAIAVLRKDAGKLTMGQPLVILAPHAVEALVKQPPDRWLSNARMTHYQAMLLDTDRVQFGPVVALNPATLLPLPEEGAPHDCLEILAETHGTRPDLTDQPIPDADHTWYTDGSSFLQEGQRKAGAAVTTETEVIWARALPAGTSAQRAELIALTQALKMAEGKRLNVYTDSRYAFATAHIHGEIYRRRGWLTSEGREIKNKSEILALLKALFLPKRLSIIHCLGHQKGDSAEARGNRLADQAAREAAIKTPPDTSTLLAGKRTADGSEFEKRTADGSEFESPKKKAKVE

SEQ ID NO: 6135 - protein, 2100 aa, synthetic construct
MPAAKRVKLDGGDKKYSIGLDIGTNSVGWAVITDEYKVPSKKFKVLGNTDRHSIKKNLIGALLFDSGETAEATRLKRTARRRYTRRKNRICYLQEIFSNEMAKVDDSFFHRLEESFLVEEDKKHERHPIFGNIVDEVAYHEKYPTIYHLRKKLVDSTDKADLRLIYLALAHMIKFRGHFLIEGDLNPDNSDVDKLFIQLVQTYNQLFEENPINASGVDAKAILSARLSKSRRLENLIAQLPGEKKNGLFGNLIALSLGLTPNFKSNFDLAEDAKLQLSKDTYDDDLDNLLAQIGDQYADLFLAAKNLSDAILLSDILRVNTEITKAPLSASMIKRYDEHHQDLTLLKALVRQQLPEKYKEIFFDQSKNGYAGYIDGGASQEEFYKFIKPILEKMDGTEELLVKLNREDLLRKQRTFDNGSIPHQIHLGELHAILRRQEDFYPFLKDNREKIEKILTFRIPYYVGPLARGNSRFAWMTRKSEETITPWNFEEVVDKGASAQSFIERMTNFDKNLPNEKVLPKHSLLYEYFTVYNELTKVKYVTEGMRKPAFLSGEQKKAIVDLLFKTNRKVTVKQLKEDYFKKIECFDSVEISGVEDRFNASLGTYHDLLKIIKDKDFLDNEENEDILEDIVLTLTLFEDREMIEERLKTYAHLFDDKVMKQLKRRRYTGWGRLSRKLINGIRDKQSGKTILDFLKSDGFANRNFMQLIHDDSLTFKEDIQKAQVSGQGDSLHEHIANLAGSPAIKKGILQTVKVVDELVKVMGRHKPENIVIEMARENQTTQKGQKNSRERMKRIEEGIKELGSQILKEHPVENTQLQNEKLYLYYLQNGRDMYVDQELDINRLSDYDVDHIVPQSFLKDDSIDNKVLTRSDKARGKSDNVPSEEVVKKMKNYWRQLLNAKLITQRKFDNLTKAERGGLSELDKAGFIKRQLVETRQITKHVAQILDSRMNTKYDENDKLIREVKVITLKSKLVSDFRKDFQFYKVREINNYHHAHDAYLNAVVGTALIKKYPKLESEFVYGDYKVYDVRKMIAKSEQEIGKATAKYFFYSNIMNFFKTEITLANGEIRKRPLIETNGETGEIVWDKGRDFATVRKVLSMPQVNIVKKTEVQTGGFSKESILPKRNSDKLIARKKDWDPKKYGGFDSPTVAYSVLVVAKVEKGKSKKLKSVKELLGITIMERSSFEKNPIDFLEAKGYKEVKKDLIIKLPKYSLFELENGRKRMLASAGELQKGNELALPSKYVNFLYLASHYEKLKGSPEDNEQKQLFVEQHKHYLDEIIEQISEFSKRVILADANLDKVLSAYNKHRDKPIREQAENIIHLFTLTNLGAPAAFKYFDTTIDRKRYTSTKEVLDATLIHQSITGLYETRIDLSQLGGDGGGGGGSGGGGSGGGGSGGTLNIEDEYRLHETSKEPDVSLGSTWLSDFPQAWAETGGMGLAVRQAPLIIPLKATSTPVSIKQYPMSQEARLGIKPHIQRLLDQGILVPCQSPWNTPLLPVKKPGTNDYRPVQDLREVNKRVEDIHPTVPNPYNLLSGLPPSHQWYTVLDLKDAFFCLRLHPTSQPLFAFEWRDPEMGISGQLTWTRLPQGFKNSPTLFDEALHRDLAGFRIQHPDLILLQYVDDLLLAATSELDCQQGTRALLQTLGDLGYRASAKKAQICQKQVKYLGYLLKEGQRWLTEARKETVMGQPIPKTPRQLREFLGTAGFCRLWIPGFAEMAAPLYPLTKTGTLFNWGPDQQKAFQEIKQALLTAPALGLPDLTKPFELFVDEKQGYAKGVLTQKLGPWRRPVAYLSKKLDPVAAGWPPCLRMVAAIAVLTKDAGKLTMGQPLVILAPHAVEALVKQPPDRWLSNARMTHYQALLLDTDRVQFGPVVALNPATLLPLPEEGLQHDCLDILAEAHGTRSDLMDQPLPDADHTWYTDGSSFLQEGQRKAGAAVTTETEVIWARALPAGTSAQRAELIALTQALKMAEGKKLNVYTDSRYAFATAHIHGEIYRRRGLLTSEGKEIKNKDEILALLKALFLPKRLSIIHCPGHQKGNSAEARGNRMADQAAREVATRETPETSTLLAGKRTADGSEFEKRTADGSEFESPKKKAKVE

SEQ ID NO: 6136 - protein, 2100 aa, synthetic construct
MPAAKRVKLDGGDKKYSIGLDIGTNSVGWAVITDEYKVPSKKFKVLGNTDRHSIKKNLIGALLFDSGETAEATRLKRTARRRYTRRKNRICYLQEIFSNEMAKVDDSFFHRLEESFLVEEDKKHERHPIFGNIVDEVAYHEKYPTIYHLRKKLVDSTDKADLRLIYLALAHMIKFRGHFLIEGDLNPDNSDVDKLFIQLVQTYNQLFEENPINASGVDAKAILSARLSKSRRLENLIAQLPGEKKNGLFGNLIALSLGLTPNFKSNFDLAEDAKLQLSKDTYDDDLDNLLAQIGDQYADLFLAAKNLSDAILLSDILRVNTEITKAPLSASMIKRYDEHHQDLTLLKALVRQQLPEKYKEIFFDQSKNGYAGYIDGGASQEEFYKFIKPILEKMDGTEELLVKLNREDLLRKQRTFDNGSIPHQIHLGELHAILRRQEDFYPFLKDNREKIEKILTFRIPYYVGPLARGNSRFAWMTRKSEETITPWNFEEVVDKGASAQSFIERMTNFDKNLPNEKVLPKHSLLYEYFTVYNELTKVKYVTEGMRKPAFLSGEQKKAIVDLLFKTNRKVTVKQLKEDYFKKIECFDSVEISGVEDRFNASLGTYHDLLKIIKDKDFLDNEENEDILEDIVLTLTLFEDREMIEERLKTYAHLFDDKVMKQLKRRRYTGWGRLSRKLINGIRDKQSGKTILDFLKSDGFANRNFMQLIHDDSLTFKEDIQKAQVSGQGDSLHEHIANLAGSPAIKKGILQTVKVVDELVKVMGRHKPENIVIEMARENQTTQKGQKNSRERMKRIEEGIKELGSQILKEHPVENTQLQNEKLYLYYLQNGRDMYVDQELDINRLSDYDVDHIVPQSFLKDDSIDNKVLTRSDKARGKSDNVPSEEVVKKMKNYWRQLLNAKLITQRKFDNLTKAERGGLSELDKAGFIKRQLVETRQITKHVAQILDSRMNTKYDENDKLIREVKVITLKSKLVSDFRKDFQFYKVREINNYHHAHDAYLNAVVGTALIKKYPKLESEFVYGDYKVYDVRKMIAKSEQEIGKATAKYFFYSNIMNFFKTEITLANGEIRKRPLIETNGETGEIVWDKGRDFATVRKVLSMPQVNIVKKTEVQTGGFSKESILPKRNSDKLIARKKDWDPKKYGGFDSPTVAYSVLVVAKVEKGKSKKLKSVKELLGITIMERSSFEKNPIDFLEAKGYKEVKKDLIIKLPKYSLFELENGRKRMLASAGELQKGNELALPSKYVNFLYLASHYEKLKGSPEDNEQKQLFVEQHKHYLDEIIEQISEFSKRVILADANLDKVLSAYNKHRDKPIREQAENIIHLFTLTNLGAPAAFKYFDTTIDRKRYTSTKEVLDATLIHQSITGLYETRIDLSQLGGDGGGGGGSGGGGSGGGGSGGTLNIEDEHRLHETSKEPDVSLGSTWLSDFPQAWAETGGMGLAVRQAPLIIPLKATSTPVSIKQYPMSQEARLGIKPHIQRLLDQGILVPCQSPWNTPLLPVKKPGTNDYRPVQDLREVNKRVEDIHPTVPNPYNLLSGLPPSHQWYTVLDLKDAFFCLRLHPTSQPLFAFEWRDPEMGISGQLTWTRLPQGFKNSPTLFDEALHRDLADFRIQHPDLILLQYVDDLLLAATSELDCQQGTRALLQTLGNLGYRASAKKAQICQKQVKYLGYLLKEGQRWLTEARKETVMGQPTPKTPRQLREFLGTAGFCRLWIPGFAEMAAPLYPLTKTGTLFNWGPDQQKAYQEIKQALLTAPALGLPDLTKPFELFVDEKQGYAKGVLTQKLGPWRRPVAYLSKKLDPVAAGWPPCLRMVAAIAVLTKDAGKLTMGQPLVILAPHAVEALVKQPPDRWLSNARMTHYQALLLDTDRVQFGPVVALNPATLLPLPEEGLQHNCLDILAEAHGTRPDLTDQPLPDADHTWYTDGSSLLQEGQRKAGAAVTTETEVIWAKALPAGTSAQRAELIALTQALKMAEGKKLNVYTDSRYAFATAHIHGEIYRRRGLLTSEGKEIKNKDEILALLKALFLPKRLSIIHCPGHQKGHSAEARGNRMADQAARKAAITETPDTSTLLAGKRTADGSEFEKRTADGSEFESPKKKAKVE

SEQ ID NO: 6137 - protein, 2180 aa, synthetic construct
MPAAKRVKLDGGDKKYSIGLDIGTNSVGWAVITDEYKVPSKKFKVLGNTDRHSIKKNLIGALLFDSGETAEATRLKRTARRRYTRRKNRICYLQEIFSNEMAKVDDSFFHRLEESFLVEEDKKHERHPIFGNIVDEVAYHEKYPTIYHLRKKLVDSTDKADLRLIYLALAHMIKFRGHFLIEGDLNPDNSDVDKLFIQLVQTYNQLFEENPINASGVDAKAILSARLSKSRRLENLIAQLPGEKKNGLFGNLIALSLGLTPNFKSNFDLAEDAKLQLSKDTYDDDLDNLLAQIGDQYADLFLAAKNLSDAILLSDILRVNTEITKAPLSASMIKRYDEHHQDLTLLKALVRQQLPEKYKEIFFDQSKNGYAGYIDGGASQEEFYKFIKPILEKMDGTEELLVKLNREDLLRKQRTFDNGSIPHQIHLGELHAILRRQEDFYPFLKDNREKIEKILTFRIPYYVGPLARGNSRFAWMTRKSEETITPWNFEEVVDKGASAQSFIERMTNFDKNLPNEKVLPKHSLLYEYFTVYNELTKVKYVTEGMRKPAFLSGEQKKAIVDLLFKTNRKVTVKQLKEDYFKKIECFDSVEISGVEDRFNASLGTYHDLLKIIKDKDFLDNEENEDILEDIVLTLTLFEDREMIEERLKTYAHLFDDKVMKQLKRRRYTGWGRLSRKLINGIRDKQSGKTILDFLKSDGFANRNFMQLIHDDSLTFKEDIQKAQVSGQGDSLHEHIANLAGSPAIKKGILQTVKVVDELVKVMGRHKPENIVIEMARENQTTQKGQKNSRERMKRIEEGIKELGSQILKEHPVENTQLQNEKLYLYYLQNGRDMYVDQELDINRLSDYDVDHIVPQSFLKDDSIDNKVLTRSDKARGKSDNVPSEEVVKKMKNYWRQLLNAKLITQRKFDNLTKAERGGLSELDKAGFIKRQLVETRQITKHVAQILDSRMNTKYDENDKLIREVKVITLKSKLVSDFRKDFQFYKVREINNYHHAHDAYLNAVVGTALIKKYPKLESEFVYGDYKVYDVRKMIAKSEQEIGKATAKYFFYSNIMNFFKTEITLANGEIRKRPLIETNGETGEIVWDKGRDFATVRKVLSMPQVNIVKKTEVQTGGFSKESILPKRNSDKLIARKKDWDPKKYGGFDSPTVAYSVLVVAKVEKGKSKKLKSVKELLGITIMERSSFEKNPIDFLEAKGYKEVKKDLIIKLPKYSLFELENGRKRMLASAGELQKGNELALPSKYVNFLYLASHYEKLKGSPEDNEQKQLFVEQHKHYLDEIIEQISEFSKRVILADANLDKVLSAYNKHRDKPIREQAENIIHLFTLTNLGAPAAFKYFDTTIDRKRYTSTKEVLDATLIHQSITGLYETRIDLSQLGGDGGGGGGSGGGGSGGGGSGGMDPLQLLQPLEAEIKGTKLKAHWNSGATITCVPEAFLEDERPIQTMLIKTIHGEKQQDVYYLTFKVQGRKVEAEVLASPYDYILLNPSDVPWLMKKPLQLTVLVPLHEYQERLLQQTALPKEQKELLQKLFLKYDALWQHWENQVGHRRIKPHNIATGTLAPRPQKQYPINPKAKPSIQIVIDDLLKQGVLIQQNSTMNTPVYPVPKPDGKWRMVLDYREVNKTIPLIAAQNQHSAGILSSIYRGKYKTTLDLTNGFWAHPITPESYWLTAFTWQGKQYCWTRLPQGFLNSPALFNADVVDLLKEIPNVQAYVDDIYISHDDPQEHLEQLEKIFSILLNAGYVVSLKKSEIAQREVEFLGFNITKEGRGLTDTFKQKLLNITPPKDLKQLQSILGLLNFARNFIPNYSELVKPLYTIVAPANGKFISWTEDNSNQLQHIISVLNQADNLEERNPETRLIIKVNSSPSAGYIRYYNEGSKRPIMYVNYIFSKAEAKFTQTEKLLTTMHKGLIKAMDLAMGQEILVYSPIVSMTKIQRTPLPERKALPVRWITWMTYLEDPRIQFHYDKSLPELQQIPNVTEDVIAKTKHPSEFAMVFYTDGSAIKHPDVNKSHSAGMGIAQVQFIPEYKIVHQWSIPLGDHTAQLAEIAAVEFACKKALKISGPVLIVTDSFYVAESANKELPYWKSNGFLNNKKKPLRHVSKWKSIAECLQLKPDIIIMHEKGHQQPMTTLHTEGNNLADKLATQGSYVVHAGKRTADGSEFEKRTADGSEFESPKKKAKVE

SEQ ID NO: 6138 - protein, 2091 aa, synthetic construct
MPAAKRVKLDGGDKKYSIGLDIGTNSVGWAVITDEYKVPSKKFKVLGNTDRHSIKKNLIGALLFDSGETAEATRLKRTARRRYTRRKNRICYLQEIFSNEMAKVDDSFFHRLEESFLVEEDKKHERHPIFGNIVDEVAYHEKYPTIYHLRKKLVDSTDKADLRLIYLALAHMIKFRGHFLIEGDLNPDNSDVDKLFIQLVQTYNQLFEENPINASGVDAKAILSARLSKSRRLENLIAQLPGEKKNGLFGNLIALSLGLTPNFKSNFDLAEDAKLQLSKDTYDDDLDNLLAQIGDQYADLFLAAKNLSDAILLSDILRVNTEITKAPLSASMIKRYDEHHQDLTLLKALVRQQLPEKYKEIFFDQSKNGYAGYIDGGASQEEFYKFIKPILEKMDGTEELLVKLNREDLLRKQRTFDNGSIPHQIHLGELHAILRRQEDFYPFLKDNREKIEKILTFRIPYYVGPLARGNSRFAWMTRKSEETITPWNFEEVVDKGASAQSFIERMTNFDKNLPNEKVLPKHSLLYEYFTVYNELTKVKYVTEGMRKPAFLSGEQKKAIVDLLFKTNRKVTVKQLKEDYFKKIECFDSVEISGVEDRFNASLGTYHDLLKIIKDKDFLDNEENEDILEDIVLTLTLFEDREMIEERLKTYAHLFDDKVMKQLKRRRYTGWGRLSRKLINGIRDKQSGKTILDFLKSDGFANRNFMQLIHDDSLTFKEDIQKAQVSGQGDSLHEHIANLAGSPAIKKGILQTVKVVDELVKVMGRHKPENIVIEMARENQTTQKGQKNSRERMKRIEEGIKELGSQILKEHPVENTQLQNEKLYLYYLQNGRDMYVDQELDINRLSDYDVDHIVPQSFLKDDSIDNKVLTRSDKARGKSDNVPSEEVVKKMKNYWRQLLNAKLITQRKFDNLTKAERGGLSELDKAGFIKRQLVETRQITKHVAQILDSRMNTKYDENDKLIREVKVITLKSKLVSDFRKDFQFYKVREINNYHHAHDAYLNAVVGTALIKKYPKLESEFVYGDYKVYDVRKMIAKSEQEIGKATAKYFFYSNIMNFFKTEITLANGEIRKRPLIETNGETGEIVWDKGRDFATVRKVLSMPQVNIVKKTEVQTGGFSKESILPKRNSDKLIARKKDWDPKKYGGFDSPTVAYSVLVVAKVEKGKSKKLKSVKELLGITIMERSSFEKNPIDFLEAKGYKEVKKDLIIKLPKYSLFELENGRKRMLASAGELQKGNELALPSKYVNFLYLASHYEKLKGSPEDNEQKQLFVEQHKHYLDEIIEQISEFSKRVILADANLDKVLSAYNKHRDKPIREQAENIIHLFTLTNLGAPAAFKYFDTTIDRKRYTSTKEVLDATLIHQSITGLYETRIDLSQLGGDGGGGGGSGGGGSGGGGSGGIPWLMKKPLQLTTLVPLQEYEERLLKQTMLTGSYKEKLQSLFLKYDALWQHWENQVGHRRIKPHHIATGTVNPRPQKQYPINPKAKASIQTVINDLLKQGVLIQQNSIMNTPVYPVPKPDGKWRMVLDYREVNKTIPLIAAQNQHSAGILSSIFRGKYKTTLDLSNGFWAHSITPESYWLTAFTWLGQQYCWTRLPQGFLNSPALFNADVVDLLKEVPNVQVYVDDIYISHDDPREHLEQLEKVFSLLLNAGYVVSLKKSEIAQHEVEFLGFNITKEGRGLTETFKQKLLNITPPRDLKQLQSILGLLNFARNFIPNFSELVKPLYNIIATAPGKYITWTTDNSQQLQNIISMLNSAENLEERNPEVRLIMKVNTSPSAGYIRFYNEFAKRPIMYLNYVYTKAEVKFTNTEKLLTTIHKGLIKALDLGMGQEILVYSPIVSMTKIQKTPLPERKALPIRWITWMSYLEDPRIQFHYDKTLPELQQVPTVTDDIIAKIKHPSEFSMVFYTDGSAIKHPNVNKSHNAGMGIAQVQFKPEFTVINTWSIPLGDHTAQLAEVAAVEFACKKALKIDGPVLIVTDSFYVAESVNKELPYWQSNGFFNNKKKPLKHVSKWKSIADCIQLKPDIIIIHEKGHQPTASTFHTEGNNLADKLATQGSYVVNAGKRTADGSEFEKRTADGSEFESPKKKAKVE

SEQ ID NO: 6139 - protein, 2091 aa, synthetic construct
MPAAKRVKLDGGDKKYSIGLDIGTNSVGWAVITDEYKVPSKKFKVLGNTDRHSIKKNLIGALLFDSGETAEATRLKRTARRRYTRRKNRICYLQEIFSNEMAKVDDSFFHRLEESFLVEEDKKHERHPIFGNIVDEVAYHEKYPTIYHLRKKLVDSTDKADLRLIYLALAHMIKFRGHFLIEGDLNPDNSDVDKLFIQLVQTYNQLFEENPINASGVDAKAILSARLSKSRRLENLIAQLPGEKKNGLFGNLIALSLGLTPNFKSNFDLAEDAKLQLSKDTYDDDLDNLLAQIGDQYADLFLAAKNLSDAILLSDILRVNTEITKAPLSASMIKRYDEHHQDLTLLKALVRQQLPEKYKEIFFDQSKNGYAGYIDGGASQEEFYKFIKPILEKMDGTEELLVKLNREDLLRKQRTFDNGSIPHQIHLGELHAILRRQEDFYPFLKDNREKIEKILTFRIPYYVGPLARGNSRFAWMTRKSEETITPWNFEEVVDKGASAQSFIERMTNFDKNLPNEKVLPKHSLLYEYFTVYNELTKVKYVTEGMRKPAFLSGEQKKAIVDLLFKTNRKVTVKQLKEDYFKKIECFDSVEISGVEDRFNASLGTYHDLLKIIKDKDFLDNEENEDILEDIVLTLTLFEDREMIEERLKTYAHLFDDKVMKQLKRRRYTGWGRLSRKLINGIRDKQSGKTILDFLKSDGFANRNFMQLIHDDSLTFKEDIQKAQVSGQGDSLHEHIANLAGSPAIKKGILQTVKVVDELVKVMGRHKPENIVIEMARENQTTQKGQKNSRERMKRIEEGIKELGSQILKEHPVENTQLQNEKLYLYYLQNGRDMYVDQELDINRLSDYDVDHIVPQSFLKDDSIDNKVLTRSDKARGKSDNVPSEEVVKKMKNYWRQLLNAKLITQRKFDNLTKAERGGLSELDKAGFIKRQLVETRQITKHVAQILDSRMNTKYDENDKLIREVKVITLKSKLVSDFRKDFQFYKVREINNYHHAHDAYLNAVVGTALIKKYPKLESEFVYGDYKVYDVRKMIAKSEQEIGKATAKYFFYSNIMNFFKTEITLANGEIRKRPLIETNGETGEIVWDKGRDFATVRKVLSMPQVNIVKKTEVQTGGFSKESILPKRNSDKLIARKKDWDPKKYGGFDSPTVAYSVLVVAKVEKGKSKKLKSVKELLGITIMERSSFEKNPIDFLEAKGYKEVKKDLIIKLPKYSLFELENGRKRMLASAGELQKGNELALPSKYVNFLYLASHYEKLKGSPEDNEQKQLFVEQHKHYLDEIIEQISEFSKRVILADANLDKVLSAYNKHRDKPIREQAENIIHLFTLTNLGAPAAFKYFDTTIDRKRYTSTKEVLDATLIHQSITGLYETRIDLSQLGGDGGGGGGSGGGGSGGGGSGGIPWLMKKPLQLTTLVPLQEYEERLLKQTMLTGSYKEKLQSLFLKYDALWQHWENQVGHRRIKPHHIATGTVNPRPQKQYPINPKAKASIQTVINDLLKQGVLIQQNSIMNTPVYPVPKPDGKWRMVLDYREVNKTIPLIAAQNQHSAGILSSIFRGKYKTTLDLSNGFWAHSITPESYWLTAFTWLGQQYCWTRLPQGFLNSPALFNADVVDLLKEVPNVQVYVDDIYISHDDPREHLEQLEKVFSLLLNAGYVVSLKKSEIAQHEVEFLGFNITKEGRGLTETFKQKLLNITPPRDLKQLQSILGKLNFARNFIPNFSELVKPLYNIIATAPGKYITWTTDNSQQLQNIISMLNSAENLEERNPEVRLIMKVNTSPSAGYIRFYNEFAKRPIMYLNYVYTKAEVKFTNTEKLLTTIHKGLIKALDLGMGQEILVYSPIVSMTKIQKTPLPERKALPIRWITWMSYLEDPRIQFHYDKTLPELQQVPTVTDDIIAKIKHPSEFSMVFYTDGSAIKHPNVNKSHNAGMGIAQVQFKPEFTVINTWSIPLGDHTAQLAEVAAVEFACKKALKIDGPVLIVTDSFYVAESVNKELPYWQSNGFFNNKKKPLKHVSKWKSIADCIQLKPDIIIIHEKGHQPTASTFHTEGNNLADKLATQGSYVVNAGKRTADGSEFEKRTADGSEFESPKKKAKVE

SEQ ID NO: 6140 - protein, 2098 aa, synthetic construct
MPAAKRVKLDGGDKKYSIGLDIGTNSVGWAVITDEYKVPSKKFKVLGNTDRHSIKKNLIGALLFDSGETAEATRLKRTARRRYTRRKNRICYLQEIFSNEMAKVDDSFFHRLEESFLVEEDKKHERHPIFGNIVDEVAYHEKYPTIYHLRKKLVDSTDKADLRLIYLALAHMIKFRGHFLIEGDLNPDNSDVDKLFIQLVQTYNQLFEENPINASGVDAKAILSARLSKSRRLENLIAQLPGEKKNGLFGNLIALSLGLTPNFKSNFDLAEDAKLQLSKDTYDDDLDNLLAQIGDQYADLFLAAKNLSDAILLSDILRVNTEITKAPLSASMIKRYDEHHQDLTLLKALVRQQLPEKYKEIFFDQSKNGYAGYIDGGASQEEFYKFIKPILEKMDGTEELLVKLNREDLLRKQRTFDNGSIPHQIHLGELHAILRRQEDFYPFLKDNREKIEKILTFRIPYYVGPLARGNSRFAWMTRKSEETITPWNFEEVVDKGASAQSFIERMTNFDKNLPNEKVLPKHSLLYEYFTVYNELTKVKYVTEGMRKPAFLSGEQKKAIVDLLFKTNRKVTVKQLKEDYFKKIECFDSVEISGVEDRFNASLGTYHDLLKIIKDKDFLDNEENEDILEDIVLTLTLFEDREMIEERLKTYAHLFDDKVMKQLKRRRYTGWGRLSRKLINGIRDKQSGKTILDFLKSDGFANRNFMQLIHDDSLTFKEDIQKAQVSGQGDSLHEHIANLAGSPAIKKGILQTVKVVDELVKVMGRHKPENIVIEMARENQTTQKGQKNSRERMKRIEEGIKELGSQILKEHPVENTQLQNEKLYLYYLQNGRDMYVDQELDINRLSDYDVDHIVPQSFLKDDSIDNKVLTRSDKARGKSDNVPSEEVVKKMKNYWRQLLNAKLITQRKFDNLTKAERGGLSELDKAGFIKRQLVETRQITKHVAQILDSRMNTKYDENDKLIREVKVITLKSKLVSDFRKDFQFYKVREINNYHHAHDAYLNAVVGTALIKKYPKLESEFVYGDYKVYDVRKMIAKSEQEIGKATAKYFFYSNIMNFFKTEITLANGEIRKRPLIETNGETGEIVWDKGRDFATVRKVLSMPQVNIVKKTEVQTGGFSKESILPKRNSDKLIARKKDWDPKKYGGFDSPTVAYSVLVVAKVEKGKSKKLKSVKELLGITIMERSSFEKNPIDFLEAKGYKEVKKDLIIKLPKYSLFELENGRKRMLASAGELQKGNELALPSKYVNFLYLASHYEKLKGSPEDNEQKQLFVEQHKHYLDEIIEQISEFSKRVILADANLDKVLSAYNKHRDKPIREQAENIIHLFTLTNLGAPAAFKYFDTTIDRKRYTSTKEVLDATLIHQSITGLYETRIDLSQLGGDGGGGGGSGGGGSGGGGSGGVLNLEEEYRLHEKPVPSSIDPSWLQLFPTVWAERAGMGLANQVPPVVVELRSGASPVAVRQYPMSKEAREGIRPHIQRFLDLGVLVPCQSPWNTPLLPVKKPGTNDYRPVQDLREINKRVQDIHPTVPNPYNLLSSLPPSHTWYSVLDLKDAFFCLKLHPNSQPLFAFEWRDPEKGNTGQLTWTRLPQGFKNSPTLFNEALHRDLAPFRALNPQVVLLQYVDDLLVAAPTYRDCKEGTQKLLQELSKLGYRVSAKKAQLCQKEVTYLGYLLKEGKRWLTPARKATVMKIPPPTTPRQVREFLGTAGFCRLWIPGFASLAAPLYPLTKPSIPFIWTEEHQKAFDRIKEALLSAPALALPDLTKPFTLYVDERAGVARGVLTQTLGPWRRPVAYLSKKLDPVASGWPTCLKAVAAVALLLKDADKLTLGQNVTVIASHSLESIVRQPPDRWMTNARMTHYQSLLLNERVSFAPPAVLNPATLLPVESEATPVHRCSEILAEETGTRRDLKDQPLPGVPAWYTDGSSFIAEGKRRAGAAIVDGKRTVWASSLPEGTSAQKAELVALTQALRLAEGKDINIYTDSRYAFATAHIHGAIYKQRGWLTSAGKDIKNKEEILALLEAIHLPKRVAIIHCPGHQKGNDPVATGNRRADEAAKQAALSTRVLAETTKPAGKRTADGSEFEKRTADGSEFESPKKKAKVE

SEQ ID NO: 6141 - protein, 2098 aa, synthetic construct
MPAAKRVKLDGGDKKYSIGLDIGTNSVGWAVITDEYKVPSKKFKVLGNTDRHSIKKNLIGALLFDSGETAEATRLKRTARRRYTRRKNRICYLQEIFSNEMAKVDDSFFHRLEESFLVEEDKKHERHPIFGNIVDEVAYHEKYPTIYHLRKKLVDSTDKADLRLIYLALAHMIKFRGHFLIEGDLNPDNSDVDKLFIQLVQTYNQLFEENPINASGVDAKAILSARLSKSRRLENLIAQLPGEKKNGLFGNLIALSLGLTPNFKSNFDLAEDAKLQLSKDTYDDDLDNLLAQIGDQYADLFLAAKNLSDAILLSDILRVNTEITKAPLSASMIKRYDEHHQDLTLLKALVRQQLPEKYKEIFFDQSKNGYAGYIDGGASQEEFYKFIKPILEKMDGTEELLVKLNREDLLRKQRTFDNGSIPHQIHLGELHAILRRQEDFYPFLKDNREKIEKILTFRIPYYVGPLARGNSRFAWMTRKSEETITPWNFEEVVDKGASAQSFIERMTNFDKNLPNEKVLPKHSLLYEYFTVYNELTKVKYVTEGMRKPAFLSGEQKKAIVDLLFKTNRKVTVKQLKEDYFKKIECFDSVEISGVEDRFNASLGTYHDLLKIIKDKDFLDNEENEDILEDIVLTLTLFEDREMIEERLKTYAHLFDDKVMKQLKRRRYTGWGRLSRKLINGIRDKQSGKTILDFLKSDGFANRNFMQLIHDDSLTFKEDIQKAQVSGQGDSLHEHIANLAGSPAIKKGILQTVKVVDELVKVMGRHKPENIVIEMARENQTTQKGQKNSRERMKRIEEGIKELGSQILKEHPVENTQLQNEKLYLYYLQNGRDMYVDQELDINRLSDYDVDHIVPQSFLKDDSIDNKVLTRSDKARGKSDNVPSEEVVKKMKNYWRQLLNAKLITQRKFDNLTKAERGGLSELDKAGFIKRQLVETRQITKHVAQILDSRMNTKYDENDKLIREVKVITLKSKLVSDFRKDFQFYKVREINNYHHAHDAYLNAVVGTALIKKYPKLESEFVYGDYKVYDVRKMIAKSEQEIGKATAKYFFYSNIMNFFKTEITLANGEIRKRPLIETNGETGEIVWDKGRDFATVRKVLSMPQVNIVKKTEVQTGGFSKESILPKRNSDKLIARKKDWDPKKYGGFDSPTVAYSVLVVAKVEKGKSKKLKSVKELLGITIMERSSFEKNPIDFLEAKGYKEVKKDLIIKLPKYSLFELENGRKRMLASAGELQKGNELALPSKYVNFLYLASHYEKLKGSPEDNEQKQLFVEQHKHYLDEIIEQISEFSKRVILADANLDKVLSAYNKHRDKPIREQAENIIHLFTLTNLGAPAAFKYFDTTIDRKRYTSTKEVLDATLIHQSITGLYETRIDLSQLGGDGGGGGGSGGGGSGGGGSGGVLNLEEEYRLHEKPVPSSIDPSWLQLFPTVWAERAGMGLANQVPPVVVELRSGASPVAVRQYPMSKEAREGIRPHIQRFLDLGVLVPCQSPWNTPLLPVKKPGTNDYRPVQDLREINKRVQDIHPTVPNPYNLLSSLPPSHTWYSVLDLKDAFFCLKLHPNSQPLFAFEWRDPEKGNTGQLTWTRLPQGFKNSPTLFNEALHRDLAPFRALNPQVVLLQYVDDLLVAAPTYRDCKEGTQKLLQELSKLGYRVSAKKAQLCQKEVTYLGYLLKEGKRWLTPARKATVMKIPPPTTPRQVREFLGKAGFCRLFIPGFASLAAPLYPLTKPSIPFIWTEEHQKAFDRIKEALLSAPALALPDLTKPFTLYVDERAGVARGVLTQTLGPWRRPVAYLSKKLDPVASGWPTCLKAVAAVALLLKDADKLTLGQNVTVIASHSLESIVRQPPDRWMTNARMTHYQSLLLNERVSFAPPAVLNPATLLPVESEATPVHRCSEILAEETGTRRDLKDQPLPGVPAWYTDGSSFIAEGKRRAGAAIVDGKRTVWASSLPEGTSAQKAELVALTQALRLAEGKDINIYTDSRYAFATAHIHGAIYKQRGWLTSAGKDIKNKEEILALLEAIHLPKRVAIIHCPGHQKGNDPVATGNRRADEAAKQAALSTRVLAETTKPAGKRTADGSEFEKRTADGSEFESPKKKAKVE

SEQ ID NO: 6142 - protein, 2100 aa, synthetic construct
MPAAKRVKLDGGDKKYSIGLDIGTNSVGWAVITDEYKVPSKKFKVLGNTDRHSIKKNLIGALLFDSGETAEATRLKRTARRRYTRRKNRICYLQEIFSNEMAKVDDSFFHRLEESFLVEEDKKHERHPIFGNIVDEVAYHEKYPTIYHLRKKLVDSTDKADLRLIYLALAHMIKFRGHFLIEGDLNPDNSDVDKLFIQLVQTYNQLFEENPINASGVDAKAILSARLSKSRRLENLIAQLPGEKKNGLFGNLIALSLGLTPNFKSNFDLAEDAKLQLSKDTYDDDLDNLLAQIGDQYADLFLAAKNLSDAILLSDILRVNTEITKAPLSASMIKRYDEHHQDLTLLKALVRQQLPEKYKEIFFDQSKNGYAGYIDGGASQEEFYKFIKPILEKMDGTEELLVKLNREDLLRKQRTFDNGSIPHQIHLGELHAILRRQEDFYPFLKDNREKIEKILTFRIPYYVGPLARGNSRFAWMTRKSEETITPWNFEEVVDKGASAQSFIERMTNFDKNLPNEKVLPKHSLLYEYFTVYNELTKVKYVTEGMRKPAFLSGEQKKAIVDLLFKTNRKVTVKQLKEDYFKKIECFDSVEISGVEDRFNASLGTYHDLLKIIKDKDFLDNEENEDILEDIVLTLTLFEDREMIEERLKTYAHLFDDKVMKQLKRRRYTGWGRLSRKLINGIRDKQSGKTILDFLKSDGFANRNFMQLIHDDSLTFKEDIQKAQVSGQGDSLHEHIANLAGSPAIKKGILQTVKVVDELVKVMGRHKPENIVIEMARENQTTQKGQKNSRERMKRIEEGIKELGSQILKEHPVENTQLQNEKLYLYYLQNGRDMYVDQELDINRLSDYDVDHIVPQSFLKDDSIDNKVLTRSDKARGKSDNVPSEEVVKKMKNYWRQLLNAKLITQRKFDNLTKAERGGLSELDKAGFIKRQLVETRQITKHVAQILDSRMNTKYDENDKLIREVKVITLKSKLVSDFRKDFQFYKVREINNYHHAHDAYLNAVVGTALIKKYPKLESEFVYGDYKVYDVRKMIAKSEQEIGKATAKYFFYSNIMNFFKTEITLANGEIRKRPLIETNGETGEIVWDKGRDFATVRKVLSMPQVNIVKKTEVQTGGFSKESILPKRNSDKLIARKKDWDPKKYGGFDSPTVAYSVLVVAKVEKGKSKKLKSVKELLGITIMERSSFEKNPIDFLEAKGYKEVKKDLIIKLPKYSLFELENGRKRMLASAGELQKGNELALPSKYVNFLYLASHYEKLKGSPEDNEQKQLFVEQHKHYLDEIIEQISEFSKRVILADANLDKVLSAYNKHRDKPIREQAENIIHLFTLTNLGAPAAFKYFDTTIDRKRYTSTKEVLDATLIHQSITGLYETRIDLSQLGGDGGGGGGSGGGGSGGGGSGGTLNIEDEYRLHETSKEPDVPLGSTWLSDFPQAWAETGGMGLAVRQAPLIIPLKATSTPVSIKQYPMSQEARLGIKPHIQRLLDQGILVPCQSPWNTPLLPVKKPGTNDYRPVQDLREVNKRVEDIHPTVPNPYNLLSGLPPSHQWYTVLDLKDAFFCLRLHPTSQPLFAFEWRDPEMGISGQLTWTRLPQGFKNSPTLFNEALHRDLADFRIQHPDLILLQYVDDLLLAATSEQDCQRGTRALLQTLGNLGYRASAKKAQICQKQVKYLGYLLKEGQRWLTEARKETVMGQPTPKTPRQLREFLGTAGFCRLWIPGFAEMAAPLYPLTKPGTLFNWGPDQQKAYQEIKQALLTAPALGLPDLTKPFELFVDEKQGYAKGVLTQKLGPWRRPVAYLSKKLDPVAAGWPPCLRMVAAIAVLTKDAGKLTMGQPLVILAPHAVEALVKQPPDRWLSNARMTHYQAMLLDTDRVQFGPVVALNPATLLPLPEKEAPHDCLEILAETHGTRPDLTDQPIPDADYTWYTDGSSFLQEGQRRAGAAVTTETEVIWARALPAGTSAQRAELIALTQALKMAEGKKLNVYTDSRYAFATAHVHGEIYRRRGWLTSEGREIKNKNEILALLKALFLPKRLSIIHCPGHQKGNSAEARGNRMADQAAREAAMKAVLETSTLLAGKRTADGSEFEKRTADGSEFESPKKKAKVE

SEQ ID NO: 6143 - protein, 2107 aa, synthetic construct
MPAAKRVKLDGGDKKYSIGLDIGTNSVGWAVITDEYKVPSKKFKVLGNTDRHSIKKNLIGALLFDSGETAEATRLKRTARRRYTRRKNRICYLQEIFSNEMAKVDDSFFHRLEESFLVEEDKKHERHPIFGNIVDEVAYHEKYPTIYHLRKKLVDSTDKADLRLIYLALAHMIKFRGHFLIEGDLNPDNSDVDKLFIQLVQTYNQLFEENPINASGVDAKAILSARLSKSRRLENLIAQLPGEKKNGLFGNLIALSLGLTPNFKSNFDLAEDAKLQLSKDTYDDDLDNLLAQIGDQYADLFLAAKNLSDAILLSDILRVNTEITKAPLSASMIKRYDEHHQDLTLLKALVRQQLPEKYKEIFFDQSKNGYAGYIDGGASQEEFYKFIKPILEKMDGTEELLVKLNREDLLRKQRTFDNGSIPHQIHLGELHAILRRQEDFYPFLKDNREKIEKILTFRIPYYVGPLARGNSRFAWMTRKSEETITPWNFEEVVDKGASAQSFIERMTNFDKNLPNEKVLPKHSLLYEYFTVYNELTKVKYVTEGMRKPAFLSGEQKKAIVDLLFKTNRKVTVKQLKEDYFKKIECFDSVEISGVEDRFNASLGTYHDLLKIIKDKDFLDNEENEDILEDIVLTLTLFEDREMIEERLKTYAHLFDDKVMKQLKRRRYTGWGRLSRKLINGIRDKQSGKTILDFLKSDGFANRNFMQLIHDDSLTFKEDIQKAQVSGQGDSLHEHIANLAGSPAIKKGILQTVKVVDELVKVMGRHKPENIVIEMARENQTTQKGQKNSRERMKRIEEGIKELGSQILKEHPVENTQLQNEKLYLYYLQNGRDMYVDQELDINRLSDYDVDHIVPQSFLKDDSIDNKVLTRSDKARGKSDNVPSEEVVKKMKNYWRQLLNAKLITQRKFDNLTKAERGGLSELDKAGFIKRQLVETRQITKHVAQILDSRMNTKYDENDKLIREVKVITLKSKLVSDFRKDFQFYKVREINNYHHAHDAYLNAVVGTALIKKYPKLESEFVYGDYKVYDVRKMIAKSEQEIGKATAKYFFYSNIMNFFKTEITLANGEIRKRPLIETNGETGEIVWDKGRDFATVRKVLSMPQVNIVKKTEVQTGGFSKESILPKRNSDKLIARKKDWDPKKYGGFDSPTVAYSVLVVAKVEKGKSKKLKSVKELLGITIMERSSFEKNPIDFLEAKGYKEVKKDLIIKLPKYSLFELENGRKRMLASAGELQKGNELALPSKYVNFLYLASHYEKLKGSPEDNEQKQLFVEQHKHYLDEIIEQISEFSKRVILADANLDKVLSAYNKHRDKPIREQAENIIHLFTLTNLGAPAAFKYFDTTIDRKRYTSTKEVLDATLIHQSITGLYETRIDLSQLGGDGGGGGGSGGGGSGGGGSGGGGSGGTAPLEEEYRLFLEAPIQNVTLLEQWKREIPKVWAEINPPGLASTQAPIHVQLLSTALPVRVRQYPITLEAKRSLRETIRKFRAAGILRPVHSPWNTPLLPVRKSGTSEYRMVQDLREVNKRVETIHPTVPNPYTLLSLLPPDRIWYSVLDLKDAFFCIPLAPESQLIFAFEWADAEEGESGQLTWTRLPQGFKNSPTLFDEALNRDLQGFRLDHPSVSLLQYVDDLLIAADTQAACLSATRDLLMTLAELGYRVSGKKAQLCQEEVTYLGFKIHKGSRSLSNSRTQAILQIPVPKTKRQVREFLGTIGYCRLWIPGFAELAQPLYAATRGGNDPLVWGEKEEEAFQSLKLALTQPPALALPSLDKPFQLFVEETSGAAKGVLTQALGPWKRPVAYLSKRLDPVAAGWPRCLRAIAAAALLTREASKLTFGQDIEITSSHNLESLLRSPPDKWLTNARITQYQVLLLDPPRVRFKQTAALNPATLLPETDDTLPIHHCLDTLDSLTSTRPDLTDQPLAQAEATLFTDGSSYIRDGKRYAGAAVVTLDSVIWAEPLPIGTSAQKAELIALTKALEWSKDKSVNIYTDSRYAFATLHVHGMIYRERGLLTAGGKAIKNAPEILALLTAVWLPKRVAVMHCKGHQKDDAPTSTGNRRADEVAREVAIRPLSTQATISAGKRTADGSEFEKRTADGSEFESPKKKAKVE

SEQ ID NO: 6144 - protein, 2107 aa, synthetic construct
MPAAKRVKLDGGDKKYSIGLDIGTNSVGWAVITDEYKVPSKKFKVLGNTDRHSIKKNLIGALLFDSGETAEATRLKRTARRRYTRRKNRICYLQEIFSNEMAKVDDSFFHRLEESFLVEEDKKHERHPIFGNIVDEVAYHEKYPTIYHLRKKLVDSTDKADLRLIYLALAHMIKFRGHFLIEGDLNPDNSDVDKLFIQLVQTYNQLFEENPINASGVDAKAILSARLSKSRRLENLIAQLPGEKKNGLFGNLIALSLGLTPNFKSNFDLAEDAKLQLSKDTYDDDLDNLLAQIGDQYADLFLAAKNLSDAILLSDILRVNTEITKAPLSASMIKRYDEHHQDLTLLKALVRQQLPEKYKEIFFDQSKNGYAGYIDGGASQEEFYKFIKPILEKMDGTEELLVKLNREDLLRKQRTFDNGSIPHQIHLGELHAILRRQEDFYPFLKDNREKIEKILTFRIPYYVGPLARGNSRFAWMTRKSEETITPWNFEEVVDKGASAQSFIERMTNFDKNLPNEKVLPKHSLLYEYFTVYNELTKVKYVTEGMRKPAFLSGEQKKAIVDLLFKTNRKVTVKQLKEDYFKKIECFDSVEISGVEDRFNASLGTYHDLLKIIKDKDFLDNEENEDILEDIVLTLTLFEDREMIEERLKTYAHLFDDKVMKQLKRRRYTGWGRLSRKLINGIRDKQSGKTILDFLKSDGFANRNFMQLIHDDSLTFKEDIQKAQVSGQGDSLHEHIANLAGSPAIKKGILQTVKVVDELVKVMGRHKPENIVIEMARENQTTQKGQKNSRERMKRIEEGIKELGSQILKEHPVENTQLQNEKLYLYYLQNGRDMYVDQELDINRLSDYDVDHIVPQSFLKDDSIDNKVLTRSDKARGKSDNVPSEEVVKKMKNYWRQLLNAKLITQRKFDNLTKAERGGLSELDKAGFIKRQLVETRQITKHVAQILDSRMNTKYDENDKLIREVKVITLKSKLVSDFRKDFQFYKVREINNYHHAHDAYLNAVVGTALIKKYPKLESEFVYGDYKVYDVRKMIAKSEQEIGKATAKYFFYSNIMNFFKTEITLANGEIRKRPLIETNGETGEIVWDKGRDFATVRKVLSMPQVNIVKKTEVQTGGFSKESILPKRNSDKLIARKKDWDPKKYGGFDSPTVAYSVLVVAKVEKGKSKKLKSVKELLGITIMERSSFEKNPIDFLEAKGYKEVKKDLIIKLPKYSLFELENGRKRMLASAGELQKGNELALPSKYVNFLYLASHYEKLKGSPEDNEQKQLFVEQHKHYLDEIIEQISEFSKRVILADANLDKVLSAYNKHRDKPIREQAENIIHLFTLTNLGAPAAFKYFDTTIDRKRYTSTKEVLDATLIHQSITGLYETRIDLSQLGGDGGGGGGSGGGGSGGGGSGGGGSGGTAPLEEEYRLFLEAPIQNVTLLEQWKREIPKVWAEINPPGLASTQAPIHVQLLSTALPVRVRQYPITLEAKRSLRETIRKFRAAGILRPVHSPWNTPLLPVRKSGTSEYRMVQDLREVNKRVETIHPTVPNPYTLLSLLPPDRIWYSVLDLKDAFFCIPLAPESQLIFAFEWADAEEGESGQLTWTRLPQGFKNSPTLFNEALNRDLQGFRLDHPSVSLLQYVDDLLIAADTQAACLSATRDLLMTLAELGYRVSGKKAQLCQEEVTYLGFKIHKGSRSLSNSRTQAILQIPVPKTKRQVREFLGTIGYCRLWIPGFAELAQPLYAATRPGNDPLVWGEKEEEAFQSLKLALTQPPALALPSLDKPFQLFVEETSGAAKGVLTQALGPWKRPVAYLSKRLDPVAAGWPRCLRAIAAAALLTREASKLTFGQDIEITSSHNLESLLRSPPDKWLTNARITQYQVLLLDPPRVRFKQTAALNPATLLPETDDTLPIHHCLDTLDSLTSTRPDLTDQPLAQAEATLFTDGSSYIRDGKRYAGAAVVTLDSVIWAEPLPIGTSAQKAELIALTKALEWSKDKSVNIYTDSRYAFATLHVHGMIYRERGWLTAGGKAIKNAPEILALLTAVWLPKRVAVMHCKGHQKDDAPTSTGNRRADEVAREVAIRPLSTQATISAGKRTADGSEFEKRTADGSEFESPKKKAKVE

SEQ ID NO: 6145 - protein, 2096 aa, synthetic construct
MPAAKRVKLDGGDKKYSIGLDIGTNSVGWAVITDEYKVPSKKFKVLGNTDRHSIKKNLIGALLFDSGETAEATRLKRTARRRYTRRKNRICYLQEIFSNEMAKVDDSFFHRLEESFLVEEDKKHERHPIFGNIVDEVAYHEKYPTIYHLRKKLVDSTDKADLRLIYLALAHMIKFRGHFLIEGDLNPDNSDVDKLFIQLVQTYNQLFEENPINASGVDAKAILSARLSKSRRLENLIAQLPGEKKNGLFGNLIALSLGLTPNFKSNFDLAEDAKLQLSKDTYDDDLDNLLAQIGDQYADLFLAAKNLSDAILLSDILRVNTEITKAPLSASMIKRYDEHHQDLTLLKALVRQQLPEKYKEIFFDQSKNGYAGYIDGGASQEEFYKFIKPILEKMDGTEELLVKLNREDLLRKQRTFDNGSIPHQIHLGELHAILRRQEDFYPFLKDNREKIEKILTFRIPYYVGPLARGNSRFAWMTRKSEETITPWNFEEVVDKGASAQSFIERMTNFDKNLPNEKVLPKHSLLYEYFTVYNELTKVKYVTEGMRKPAFLSGEQKKAIVDLLFKTNRKVTVKQLKEDYFKKIECFDSVEISGVEDRFNASLGTYHDLLKIIKDKDFLDNEENEDILEDIVLTLTLFEDREMIEERLKTYAHLFDDKVMKQLKRRRYTGWGRLSRKLINGIRDKQSGKTILDFLKSDGFANRNFMQLIHDDSLTFKEDIQKAQVSGQGDSLHEHIANLAGSPAIKKGILQTVKVVDELVKVMGRHKPENIVIEMARENQTTQKGQKNSRERMKRIEEGIKELGSQILKEHPVENTQLQNEKLYLYYLQNGRDMYVDQELDINRLSDYDVDHIVPQSFLKDDSIDNKVLTRSDKARGKSDNVPSEEVVKKMKNYWRQLLNAKLITQRKFDNLTKAERGGLSELDKAGFIKRQLVETRQITKHVAQILDSRMNTKYDENDKLIREVKVITLKSKLVSDFRKDFQFYKVREINNYHHAHDAYLNAVVGTALIKKYPKLESEFVYGDYKVYDVRKMIAKSEQEIGKATAKYFFYSNIMNFFKTEITLANGEIRKRPLIETNGETGEIVWDKGRDFATVRKVLSMPQVNIVKKTEVQTGGFSKESILPKRNSDKLIARKKDWDPKKYGGFDSPTVAYSVLVVAKVEKGKSKKLKSVKELLGITIMERSSFEKNPIDFLEAKGYKEVKKDLIIKLPKYSLFELENGRKRMLASAGELQKGNELALPSKYVNFLYLASHYEKLKGSPEDNEQKQLFVEQHKHYLDEIIEQISEFSKRVILADANLDKVLSAYNKHRDKPIREQAENIIHLFTLTNLGAPAAFKYFDTTIDRKRYTSTKEVLDATLIHQSITGLYETRIDLSQLGGDGGGGGGSGGGGSGGGGSGGGGSGGVPWILKKPLELTIKLDLEEQQGTLLNNSILSKKGKEELKQLFEKYSALWQSWENQVGHRRIRPHKIATGTVKPTPQKQYHINPKAKPDIQIVINDLLKQGVLIQKESTMNTPVYPVPKPNGRWRMVLDYRAVNKVTPLIAVQNQHSYGILGSLFKGRYKTTIDLSNGFWAHPIVPEDYWITAFTWQGKQYCWTVLPQGFLNSPGLFNGDVVDLLQGIPNVEVYVDDVYISHDSEKEHLEYLDILFNRLKEAGYIISLKKSNIANSIVDFLGFQITNEGRGLTDTFKEKLENITAPTTLKQLQSILGLLNFARNFIPDFTELIAPLYALIPKSPKNYVPWQIEHSTTLETLITKLNGAEYLQGRKGDKTLIMKVNASYTTGYIRYYNEGEKKPISYVSIVFSKTELKFTELEKLLTTVHKGLLKALDLSMGQNIHVYSPIVSMQNIQKTPQTAKKALASRWLSWLSYLEDPRIRFFYDPQMPALKDLPAVDTGKDNKKHPSNFQHIFYTDGSAITSPTKEGHLNAGMGIVYFINKDGNLQKQQEWSISLGNHTAQFAEIAAFEFALKKCLPLGGNILVVTDSNYVAKAYNEELDVWASNGFVNNRKKPLKHISKWKSVADLKRLRPDVVVTHEPGHQKLDSSPHAYGNNLADQLATQASFKVHAGKRTADGSEFEKRTADGSEFESPKKKAKVE

SEQ ID NO: 6146 - protein, 2104 aa, synthetic construct
MPAAKRVKLDGGDKKYSIGLDIGTNSVGWAVITDEYKVPSKKFKVLGNTDRHSIKKNLIGALLFDSGETAEATRLKRTARRRYTRRKNRICYLQEIFSNEMAKVDDSFFHRLEESFLVEEDKKHERHPIFGNIVDEVAYHEKYPTIYHLRKKLVDSTDKADLRLIYLALAHMIKFRGHFLIEGDLNPDNSDVDKLFIQLVQTYNQLFEENPINASGVDAKAILSARLSKSRRLENLIAQLPGEKKNGLFGNLIALSLGLTPNFKSNFDLAEDAKLQLSKDTYDDDLDNLLAQIGDQYADLFLAAKNLSDAILLSDILRVNTEITKAPLSASMIKRYDEHHQDLTLLKALVRQQLPEKYKEIFFDQSKNGYAGYIDGGASQEEFYKFIKPILEKMDGTEELLVKLNREDLLRKQRTFDNGSIPHQIHLGELHAILRRQEDFYPFLKDNREKIEKILTFRIPYYVGPLARGNSRFAWMTRKSEETITPWNFEEVVDKGASAQSFIERMTNFDKNLPNEKVLPKHSLLYEYFTVYNELTKVKYVTEGMRKPAFLSGEQKKAIVDLLFKTNRKVTVKQLKEDYFKKIECFDSVEISGVEDRFNASLGTYHDLLKIIKDKDFLDNEENEDILEDIVLTLTLFEDREMIEERLKTYAHLFDDKVMKQLKRRRYTGWGRLSRKLINGIRDKQSGKTILDFLKSDGFANRNFMQLIHDDSLTFKEDIQKAQVSGQGDSLHEHIANLAGSPAIKKGILQTVKVVDELVKVMGRHKPENIVIEMARENQTTQKGQKNSRERMKRIEEGIKELGSQILKEHPVENTQLQNEKLYLYYLQNGRDMYVDQELDINRLSDYDVDHIVPQSFLKDDSIDNKVLTRSDKARGKSDNVPSEEVVKKMKNYWRQLLNAKLITQRKFDNLTKAERGGLSELDKAGFIKRQLVETRQITKHVAQILDSRMNTKYDENDKLIREVKVITLKSKLVSDFRKDFQFYKVREINNYHHAHDAYLNAVVGTALIKKYPKLESEFVYGDYKVYDVRKMIAKSEQEIGKATAKYFFYSNIMNFFKTEITLANGEIRKRPLIETNGETGEIVWDKGRDFATVRKVLSMPQVNIVKKTEVQTGGFSKESILPKRNSDKLIARKKDWDPKKYGGFDSPTVAYSVLVVAKVEKGKSKKLKSVKELLGITIMERSSFEKNPIDFLEAKGYKEVKKDLIIKLPKYSLFELENGRKRMLASAGELQKGNELALPSKYVNFLYLASHYEKLKGSPEDNEQKQLFVEQHKHYLDEIIEQISEFSKRVILADANLDKVLSAYNKHRDKPIREQAENIIHLFTLTNLGAPAAFKYFDTTIDRKRYTSTKEVLDATLIHQSITGLYETRIDLSQLGGDGGGGGGSGGGGSGGGGSGGGGSGGTLQLEEEYRLFEPESTQKQEMDIWLKNFPQAWAETGGMGTAHCQAPVLIQLKATATPISIRQYPMPHEAYQGIKPHIRRMLDQGILKPCQSPWNTPLLPVKKPGTEDYRPVQDLREVNKRVEDIHPTVPNPYNLLSTLPPSHPWYTVLDLKDAFFCLRLHSESQLLFAFEWRDPEIGLSGQLTWTRLPQGFKNSPTLFDEALHSDLADFRVRYPALVLLQYVDDLLLAAATRTECLEGTKALLETLGNKGYRASAKKAQICLQEVTYLGYSLKDGQRWLTKARKEAILSIPVPKNSRQVREFLGTAGYCRLWIPGFAELAAPLYPLTRPGTLFQWGTEQQLAFEDIKKALLSSPALGLPDITKPFELFIDENSGFAKGVLVQKLGPWKRPVAYLSKKLDTVASGWPPCLRMVAAIAILVKDAGKLTLGQPLTILTSHPVEALVRQPPNKWLSNARMTHYQAMLLDAERVHFGPTVSLNPATLLPLPSGGNHHDCLQILAETHGTRPDLTDQPLPDADLTWYTDGSSFIRNGEREAGAAVTTESEVIWAAPLPPGTSAQRAELIALTQALKMAEGKKLTVYTDSRYAFATTHVHGEIYRRRGLLTSEGKEIKNKNEILALLEALFLPKRLSIIHCPGHQKGDSPQAKGNRLADDTAKKAATETHSSLTVLPAGKRTADGSEFEKRTADGSEFESPKKKAKVE

SEQ ID NO: 6147 - protein, 2104 aa, synthetic construct
MPAAKRVKLDGGDKKYSIGLDIGTNSVGWAVITDEYKVPSKKFKVLGNTDRHSIKKNLIGALLFDSGETAEATRLKRTARRRYTRRKNRICYLQEIFSNEMAKVDDSFFHRLEESFLVEEDKKHERHPIFGNIVDEVAYHEKYPTIYHLRKKLVDSTDKADLRLIYLALAHMIKFRGHFLIEGDLNPDNSDVDKLFIQLVQTYNQLFEENPINASGVDAKAILSARLSKSRRLENLIAQLPGEKKNGLFGNLIALSLGLTPNFKSNFDLAEDAKLQLSKDTYDDDLDNLLAQIGDQYADLFLAAKNLSDAILLSDILRVNTEITKAPLSASMIKRYDEHHQDLTLLKALVRQQLPEKYKEIFFDQSKNGYAGYIDGGASQEEFYKFIKPILEKMDGTEELLVKLNREDLLRKQRTFDNGSIPHQIHLGELHAILRRQEDFYPFLKDNREKIEKILTFRIPYYVGPLARGNSRFAWMTRKSEETITPWNFEEVVDKGASAQSFIERMTNFDKNLPNEKVLPKHSLLYEYFTVYNELTKVKYVTEGMRKPAFLSGEQKKAIVDLLFKTNRKVTVKQLKEDYFKKIECFDSVEISGVEDRFNASLGTYHDLLKIIKDKDFLDNEENEDILEDIVLTLTLFEDREMIEERLKTYAHLFDDKVMKQLKRRRYTGWGRLSRKLINGIRDKQSGKTILDFLKSDGFANRNFMQLIHDDSLTFKEDIQKAQVSGQGDSLHEHIANLAGSPAIKKGILQTVKVVDELVKVMGRHKPENIVIEMARENQTTQKGQKNSRERMKRIEEGIKELGSQILKEHPVENTQLQNEKLYLYYLQNGRDMYVDQELDINRLSDYDVDHIVPQSFLKDDSIDNKVLTRSDKARGKSDNVPSEEVVKKMKNYWRQLLNAKLITQRKFDNLTKAERGGLSELDKAGFIKRQLVETRQITKHVAQILDSRMNTKYDENDKLIREVKVITLKSKLVSDFRKDFQFYKVREINNYHHAHDAYLNAVVGTALIKKYPKLESEFVYGDYKVYDVRKMIAKSEQEIGKATAKYFFYSNIMNFFKTEITLANGEIRKRPLIETNGETGEIVWDKGRDFATVRKVLSMPQVNIVKKTEVQTGGFSKESILPKRNSDKLIARKKDWDPKKYGGFDSPTVAYSVLVVAKVEKGKSKKLKSVKELLGITIMERSSFEKNPIDFLEAKGYKEVKKDLIIKLPKYSLFELENGRKRMLASAGELQKGNELALPSKYVNFLYLASHYEKLKGSPEDNEQKQLFVEQHKHYLDEIIEQISEFSKRVILADANLDKVLSAYNKHRDKPIREQAENIIHLFTLTNLGAPAAFKYFDTTIDRKRYTSTKEVLDATLIHQSITGLYETRIDLSQLGGDGGGGGGSGGGGSGGGGSGGGGSGGTLQLEEEYRLFEPESTQKQEMDIWLKNFPQAWAETGGMGTAHCQAPVLIQLKATATPISIRQYPMPHEAYQGIKPHIRRMLDQGILKPCQSPWNTPLLPVKKPGTEDYRPVQDLREVNKRVEDIHPTVPNPYNLLSTLPPSHPWYTVLDLKDAFFCLRLHSESQLLFAFEWRDPEIGLSGQLTWTRLPQGFKNSPTLFNEALHSDLADFRVRYPALVLLQYVDDLLLAAATRTECLEGTKALLETLGNKGYRASAKKAQICLQEVTYLGYSLKDGQRWLTKARKEAILSIPVPKNSRQVREFLGTAGYCRLWIPGFAELAAPLYPLTRPGTLFQWGTEQQLAFEDIKKALLSSPALGLPDITKPFELFIDENSGFAKGVLVQKLGPWKRPVAYLSKKLDTVASGWPPCLRMVAAIAILVKDAGKLTLGQPLTILTSHPVEALVRQPPNKWLSNARMTHYQAMLLDAERVHFGPTVSLNPATLLPLPSGGNHHDCLQILAETHGTRPDLTDQPLPDADLTWYTDGSSFIRNGEREAGAAVTTESEVIWAAPLPPGTSAQRAELIALTQALKMAEGKKLTVYTDSRYAFATTHVHGEIYRRRGWLTSEGKEIKNKNEILALLEALFLPKRLSIIHCPGHQKGDSPQAKGNRLADDTAKKAATETHSSLTVLPAGKRTADGSEFEKRTADGSEFESPKKKAKVE

SEQ ID NO: 6148 - protein, 2104 aa, synthetic construct
MPAAKRVKLDGGDKKYSIGLDIGTNSVGWAVITDEYKVPSKKFKVLGNTDRHSIKKNLIGALLFDSGETAEATRLKRTARRRYTRRKNRICYLQEIFSNEMAKVDDSFFHRLEESFLVEEDKKHERHPIFGNIVDEVAYHEKYPTIYHLRKKLVDSTDKADLRLIYLALAHMIKFRGHFLIEGDLNPDNSDVDKLFIQLVQTYNQLFEENPINASGVDAKAILSARLSKSRRLENLIAQLPGEKKNGLFGNLIALSLGLTPNFKSNFDLAEDAKLQLSKDTYDDDLDNLLAQIGDQYADLFLAAKNLSDAILLSDILRVNTEITKAPLSASMIKRYDEHHQDLTLLKALVRQQLPEKYKEIFFDQSKNGYAGYIDGGASQEEFYKFIKPILEKMDGTEELLVKLNREDLLRKQRTFDNGSIPHQIHLGELHAILRRQEDFYPFLKDNREKIEKILTFRIPYYVGPLARGNSRFAWMTRKSEETITPWNFEEVVDKGASAQSFIERMTNFDKNLPNEKVLPKHSLLYEYFTVYNELTKVKYVTEGMRKPAFLSGEQKKAIVDLLFKTNRKVTVKQLKEDYFKKIECFDSVEISGVEDRFNASLGTYHDLLKIIKDKDFLDNEENEDILEDIVLTLTLFEDREMIEERLKTYAHLFDDKVMKQLKRRRYTGWGRLSRKLINGIRDKQSGKTILDFLKSDGFANRNFMQLIHDDSLTFKEDIQKAQVSGQGDSLHEHIANLAGSPAIKKGILQTVKVVDELVKVMGRHKPENIVIEMARENQTTQKGQKNSRERMKRIEEGIKELGSQILKEHPVENTQLQNEKLYLYYLQNGRDMYVDQELDINRLSDYDVDHIVPQSFLKDDSIDNKVLTRSDKARGKSDNVPSEEVVKKMKNYWRQLLNAKLITQRKFDNLTKAERGGLSELDKAGFIKRQLVETRQITKHVAQILDSRMNTKYDENDKLIREVKVITLKSKLVSDFRKDFQFYKVREINNYHHAHDAYLNAVVGTALIKKYPKLESEFVYGDYKVYDVRKMIAKSEQEIGKATAKYFFYSNIMNFFKTEITLANGEIRKRPLIETNGETGEIVWDKGRDFATVRKVLSMPQVNIVKKTEVQTGGFSKESILPKRNSDKLIARKKDWDPKKYGGFDSPTVAYSVLVVAKVEKGKSKKLKSVKELLGITIMERSSFEKNPIDFLEAKGYKEVKKDLIIKLPKYSLFELENGRKRMLASAGELQKGNELALPSKYVNFLYLASHYEKLKGSPEDNEQKQLFVEQHKHYLDEIIEQISEFSKRVILADANLDKVLSAYNKHRDKPIREQAENIIHLFTLTNLGAPAAFKYFDTTIDRKRYTSTKEVLDATLIHQSITGLYETRIDLSQLGGDGGGGGGSGGGGSGGGGSGGGGSGGTLQLEEEYRLFEPESTQKQEMDIWLKNFPQAWAETGGMGTAHCQAPVLIQLKATATPISIRQYPMPHEAYQGIKPHIRRMLDQGILKPCQSPWNTPLLPVKKPGTEDYRPVQDLREVNKRVEDIHPTVPNPYNLLSTLPPSHPWYTVLDLKDAFFCLRLHSESQLLFAFEWRDPEIGLSGQLTWTRLPQGFKNSPTLFNEALHSDLADFRVRYPALVLLQYVDDLLLAAATRTECLEGTKALLETLGNKGYRASAKKAQICLQEVTYLGYSLKDGQRWLTKARKEAILSIPVPKNSRQVREFLGKAGYCRLFIPGFAELAAPLYPLTRPGTLFQWGTEQQLAFEDIKKALLSSPALGLPDITKPFELFIDENSGFAKGVLVQKLGPWKRPVAYLSKKLDTVASGWPPCLRMVAAIAILVKDAGKLTLGQPLTILTSHPVEALVRQPPNKWLSNARMTHYQAMLLDAERVHFGPTVSLNPATLLPLPSGGNHHDCLQILAETHGTRPDLTDQPLPDADLTWYTDGSSFIRNGEREAGAAVTTESEVIWAAPLPPGTSAQRAELIALTQALKMAEGKKLTVYTDSRYAFATTHVHGEIYRRRGWLTSEGKEIKNKNEILALLEALFLPKRLSIIHCPGHQKGDSPQAKGNRLADDTAKKAATETHSSLTVLPAGKRTADGSEFEKRTADGSEFESPKKKAKVE

SEQ ID NO: 6149 - protein, 2185 aa, synthetic construct
MPAAKRVKLDGGDKKYSIGLDIGTNSVGWAVITDEYKVPSKKFKVLGNTDRHSIKKNLIGALLFDSGETAEATRLKRTARRRYTRRKNRICYLQEIFSNEMAKVDDSFFHRLEESFLVEEDKKHERHPIFGNIVDEVAYHEKYPTIYHLRKKLVDSTDKADLRLIYLALAHMIKFRGHFLIEGDLNPDNSDVDKLFIQLVQTYNQLFEENPINASGVDAKAILSARLSKSRRLENLIAQLPGEKKNGLFGNLIALSLGLTPNFKSNFDLAEDAKLQLSKDTYDDDLDNLLAQIGDQYADLFLAAKNLSDAILLSDILRVNTEITKAPLSASMIKRYDEHHQDLTLLKALVRQQLPEKYKEIFFDQSKNGYAGYIDGGASQEEFYKFIKPILEKMDGTEELLVKLNREDLLRKQRTFDNGSIPHQIHLGELHAILRRQEDFYPFLKDNREKIEKILTFRIPYYVGPLARGNSRFAWMTRKSEETITPWNFEEVVDKGASAQSFIERMTNFDKNLPNEKVLPKHSLLYEYFTVYNELTKVKYVTEGMRKPAFLSGEQKKAIVDLLFKTNRKVTVKQLKEDYFKKIECFDSVEISGVEDRFNASLGTYHDLLKIIKDKDFLDNEENEDILEDIVLTLTLFEDREMIEERLKTYAHLFDDKVMKQLKRRRYTGWGRLSRKLINGIRDKQSGKTILDFLKSDGFANRNFMQLIHDDSLTFKEDIQKAQVSGQGDSLHEHIANLAGSPAIKKGILQTVKVVDELVKVMGRHKPENIVIEMARENQTTQKGQKNSRERMKRIEEGIKELGSQILKEHPVENTQLQNEKLYLYYLQNGRDMYVDQELDINRLSDYDVDHIVPQSFLKDDSIDNKVLTRSDKARGKSDNVPSEEVVKKMKNYWRQLLNAKLITQRKFDNLTKAERGGLSELDKAGFIKRQLVETRQITKHVAQILDSRMNTKYDENDKLIREVKVITLKSKLVSDFRKDFQFYKVREINNYHHAHDAYLNAVVGTALIKKYPKLESEFVYGDYKVYDVRKMIAKSEQEIGKATAKYFFYSNIMNFFKTEITLANGEIRKRPLIETNGETGEIVWDKGRDFATVRKVLSMPQVNIVKKTEVQTGGFSKESILPKRNSDKLIARKKDWDPKKYGGFDSPTVAYSVLVVAKVEKGKSKKLKSVKELLGITIMERSSFEKNPIDFLEAKGYKEVKKDLIIKLPKYSLFELENGRKRMLASAGELQKGNELALPSKYVNFLYLASHYEKLKGSPEDNEQKQLFVEQHKHYLDEIIEQISEFSKRVILADANLDKVLSAYNKHRDKPIREQAENIIHLFTLTNLGAPAAFKYFDTTIDRKRYTSTKEVLDATLIHQSITGLYETRIDLSQLGGDGGGGGGSGGGGSGGGGSGGGGSGGMNPLQLLQPLPAEIKGTKLLAHWNSGATITCIPESFLEDEQPIKKTLIKTIHGEKQQNVYYVTFKVKGRKVEAEVIASPYEYILLSPTDVPWLTQQPLQLTILVPLQEYQEKILSKTALPEDQKQQLKTLFVKYDNLWQHWENQVGHRKIRPHNIATGDYPPRPQKQYPINPKAKPSIQIVIDDLLKQGVLTPQNSTMNTPVYPVPKPDGRWRMVLDYREVNKTIPLTAAQNQHSAGILATIVRQKYKTTLDLANGFWAHPITPESYWLTAFTWQGKQYCWTRLPQGFLNSPALFNADVVDLLKEIPNVQVYVDDIYLSHDDPKEHVQQLEKVFQILLQAGYVVSLKKSEIGQKTVEFLGFNITKEGRGLTDTFKTKLLNITPPKDLKQLQSILGLLNFARNFIPNFAELVQPLYNLIAPAKGKYIEWSEENTKQLNMVIEALNTASNLEERLPEQRLVIKVNTSPSAGYVRYYNETGKKPIMYLNYVFSKAELKFSMLEKLLTTMHKALIKAMDLAMGQEILVYSPIVSMTKIQKTPLPERKALPIRWITWMTYLEDPRIQFHYDKTLPELKHIPDVYTSSQSPVKHPSQYEGVFYTDGSAIKSPDPTKSNNAGMGIVHATYKPEYQVLNQWSIPLGNHTAQMAEIAAVEFACKKALKIPGPVLVITDSFYVAESANKELPYWKSNGFVNNKKKPLKHISKWKSIAECLSMKPDITIQHEKGISLQIPVFILKGNALADKLATQGSYVVNAGKRTADGSEFEKRTADGSEFESPKKKAKVE

SEQ ID NO: 6150 - protein, 2185 aa, synthetic construct
MPAAKRVKLDGGDKKYSIGLDIGTNSVGWAVITDEYKVPSKKFKVLGNTDRHSIKKNLIGALLFDSGETAEATRLKRTARRRYTRRKNRICYLQEIFSNEMAKVDDSFFHRLEESFLVEEDKKHERHPIFGNIVDEVAYHEKYPTIYHLRKKLVDSTDKADLRLIYLALAHMIKFRGHFLIEGDLNPDNSDVDKLFIQLVQTYNQLFEENPINASGVDAKAILSARLSKSRRLENLIAQLPGEKKNGLFGNLIALSLGLTPNFKSNFDLAEDAKLQLSKDTYDDDLDNLLAQIGDQYADLFLAAKNLSDAILLSDILRVNTEITKAPLSASMIKRYDEHHQDLTLLKALVRQQLPEKYKEIFFDQSKNGYAGYIDGGASQEEFYKFIKPILEKMDGTEELLVKLNREDLLRKQRTFDNGSIPHQIHLGELHAILRRQEDFYPFLKDNREKIEKILTFRIPYYVGPLARGNSRFAWMTRKSEETITPWNFEEVVDKGASAQSFIERMTNFDKNLPNEKVLPKHSLLYEYFTVYNELTKVKYVTEGMRKPAFLSGEQKKAIVDLLFKTNRKVTVKQLKEDYFKKIECFDSVEISGVEDRFNASLGTYHDLLKIIKDKDFLDNEENEDILEDIVLTLTLFEDREMIEERLKTYAHLFDDKVMKQLKRRRYTGWGRLSRKLINGIRDKQSGKTILDFLKSDGFANRNFMQLIHDDSLTFKEDIQKAQVSGQGDSLHEHIANLAGSPAIKKGILQTVKVVDELVKVMGRHKPENIVIEMARENQTTQKGQKNSRERMKRIEEGIKELGSQILKEHPVENTQLQNEKLYLYYLQNGRDMYVDQELDINRLSDYDVDHIVPQSFLKDDSIDNKVLTRSDKARGKSDNVPSEEVVKKMKNYWRQLLNAKLITQRKFDNLTKAERGGLSELDKAGFIKRQLVETRQITKHVAQILDSRMNTKYDENDKLIREVKVITLKSKLVSDFRKDFQFYKVREINNYHHAHDAYLNAVVGTALIKKYPKLESEFVYGDYKVYDVRKMIAKSEQEIGKATAKYFFYSNIMNFFKTEITLANGEIRKRPLIETNGETGEIVWDKGRDFATVRKVLSMPQVNIVKKTEVQTGGFSKESILPKRNSDKLIARKKDWDPKKYGGFDSPTVAYSVLVVAKVEKGKSKKLKSVKELLGITIMERSSFEKNPIDFLEAKGYKEVKKDLIIKLPKYSLFELENGRKRMLASAGELQKGNELALPSKYVNFLYLASHYEKLKGSPEDNEQKQLFVEQHKHYLDEIIEQISEFSKRVILADANLDKVLSAYNKHRDKPIREQAENIIHLFTLTNLGAPAAFKYFDTTIDRKRYTSTKEVLDATLIHQSITGLYETRIDLSQLGGDGGGGGGSGGGGSGGGGSGGGGSGGMNPLQLLQPLPAEIKGTKLLAHWNSGATITCIPESFLEDEQPIKKTLIKTIHGEKQQNVYYVTFKVKGRKVEAEVIASPYEYILLSPTDVPWLTQQPLQLTILVPLQEYQEKILSKTALPEDQKQQLKTLFVKYDNLWQHWENQVGHRKIRPHNIATGDYPPRPQKQYPINPKAKPSIQIVIDDLLKQGVLTPQNSTMNTPVYPVPKPDGRWRMVLDYREVNKTIPLTAAQNQHSAGILATIVRQKYKTTLDLANGFWAHPITPESYWLTAFTWQGKQYCWTRLPQGFLNSPALFNADVVDLLKEIPNVQVYVDDIYLSHDDPKEHVQQLEKVFQILLQAGYVVSLKKSEIGQKTVEFLGFNITKEGRGLTDTFKTKLLNITPPKDLKQLQSILGKLNFARNFIPNFAELVQPLYNLIAPAKGKYIEWSEENTKQLNMVIEALNTASNLEERLPEQRLVIKVNTSPSAGYVRYYNETGKKPIMYLNYVFSKAELKFSMLEKLLTTMHKALIKAMDLAMGQEILVYSPIVSMTKIQKTPLPERKALPIRWITWMTYLEDPRIQFHYDKTLPELKHIPDVYTSSQSPVKHPSQYEGVFYTDGSAIKSPDPTKSNNAGMGIVHATYKPEYQVLNQWSIPLGNHTAQMAEIAAVEFACKKALKIPGPVLVITDSFYVAESANKELPYWKSNGFVNNKKKPLKHISKWKSIAECLSMKPDITIQHEKGISLQIPVFILKGNALADKLATQGSYVVNAGKRTADGSEFEKRTADGSEFESPKKKAKVE

SEQ ID NO: 6151 - protein, 2136 aa, synthetic construct
MPAAKRVKLDGGDKKYSIGLDIGTNSVGWAVITDEYKVPSKKFKVLGNTDRHSIKKNLIGALLFDSGETAEATRLKRTARRRYTRRKNRICYLQEIFSNEMAKVDDSFFHRLEESFLVEEDKKHERHPIFGNIVDEVAYHEKYPTIYHLRKKLVDSTDKADLRLIYLALAHMIKFRGHFLIEGDLNPDNSDVDKLFIQLVQTYNQLFEENPINASGVDAKAILSARLSKSRRLENLIAQLPGEKKNGLFGNLIALSLGLTPNFKSNFDLAEDAKLQLSKDTYDDDLDNLLAQIGDQYADLFLAAKNLSDAILLSDILRVNTEITKAPLSASMIKRYDEHHQDLTLLKALVRQQLPEKYKEIFFDQSKNGYAGYIDGGASQEEFYKFIKPILEKMDGTEELLVKLNREDLLRKQRTFDNGSIPHQIHLGELHAILRRQEDFYPFLKDNREKIEKILTFRIPYYVGPLARGNSRFAWMTRKSEETITPWNFEEVVDKGASAQSFIERMTNFDKNLPNEKVLPKHSLLYEYFTVYNELTKVKYVTEGMRKPAFLSGEQKKAIVDLLFKTNRKVTVKQLKEDYFKKIECFDSVEISGVEDRFNASLGTYHDLLKIIKDKDFLDNEENEDILEDIVLTLTLFEDREMIEERLKTYAHLFDDKVMKQLKRRRYTGWGRLSRKLINGIRDKQSGKTILDFLKSDGFANRNFMQLIHDDSLTFKEDIQKAQVSGQGDSLHEHIANLAGSPAIKKGILQTVKVVDELVKVMGRHKPENIVIEMARENQTTQKGQKNSRERMKRIEEGIKELGSQILKEHPVENTQLQNEKLYLYYLQNGRDMYVDQELDINRLSDYDVDHIVPQSFLKDDSIDNKVLTRSDKARGKSDNVPSEEVVKKMKNYWRQLLNAKLITQRKFDNLTKAERGGLSELDKAGFIKRQLVETRQITKHVAQILDSRMNTKYDENDKLIREVKVITLKSKLVSDFRKDFQFYKVREINNYHHAHDAYLNAVVGTALIKKYPKLESEFVYGDYKVYDVRKMIAKSEQEIGKATAKYFFYSNIMNFFKTEITLANGEIRKRPLIETNGETGEIVWDKGRDFATVRKVLSMPQVNIVKKTEVQTGGFSKESILPKRNSDKLIARKKDWDPKKYGGFDSPTVAYSVLVVAKVEKGKSKKLKSVKELLGITIMERSSFEKNPIDFLEAKGYKEVKKDLIIKLPKYSLFELENGRKRMLASAGELQKGNELALPSKYVNFLYLASHYEKLKGSPEDNEQKQLFVEQHKHYLDEIIEQISEFSKRVILADANLDKVLSAYNKHRDKPIREQAENIIHLFTLTNLGAPAAFKYFDTTIDRKRYTSTKEVLDATLIHQSITGLYETRIDLSQLGGDGGGGGGSGGGGSGGGGSGGGGSGGLLGRDLLTKLKAQIQFSTEGPQVTWEDRPAMCLVLNLEEEYRLHEKPVPPSIDPSWLQLFPMVWAEKAGMGLANQVPPVVVELKSDASPVAVRQYPMSKEAREGIRPHIQRFLDLGILVPCQSPWNTPLLPVKKPGTNDYRPVQDLREVNKRVQDIHPTVPNPYNLLSSLPPSHTWYSVLDLKDAFFCLKLHPNSQPLFAFEWRDPEKGNTGQLTWTRLPQGFKNSPTLFNEALHRDLASFRALNPQVVMLQYVDDLLVAAPTYRDCKEGTRRLLQELSKLGYRVSAKKAQLCREEVTYLGYLLKGGKRWLTPARKATVMKIPTPTTPRQVREFLGTAGFCRLWIPGFASLAAPLYPLTRPKVPFTWTEAHQEAFGRIKEALLSAPALALPDLTKPFALYVDEKEGVARGVLTQTLGPWRRPVAYLSKKLDPVASGWPTCLKAIAAVALLLKDADKLTLGQNVLVIAPHNLESIVRQPPDRWMTNARMTHYQSLLLNERVSFAPPAILNPATLLPVESDDTPIHICSEILAEETGTRPDLRDQPLPGVPAWYTDGSSFIMDGRRQAGAAIVDNKRTVWASNLPEGTSAQKAELIALTQALRLAEGKSINIYTDSRYAFATAHVHGAIYKQRGWLTSAGKDIKNKEEILALLEAIHLPKRVAIIHCPGHQRGTDPVATGNRKADEAAKQAAQSTRILTETTKNAGKRTADGSEFEKRTADGSEFESPKKKAKVE

SEQ ID NO: 6152 - protein, 2136 aa, synthetic construct
MPAAKRVKLDGGDKKYSIGLDIGTNSVGWAVITDEYKVPSKKFKVLGNTDRHSIKKNLIGALLFDSGETAEATRLKRTARRRYTRRKNRICYLQEIFSNEMAKVDDSFFHRLEESFLVEEDKKHERHPIFGNIVDEVAYHEKYPTIYHLRKKLVDSTDKADLRLIYLALAHMIKFRGHFLIEGDLNPDNSDVDKLFIQLVQTYNQLFEENPINASGVDAKAILSARLSKSRRLENLIAQLPGEKKNGLFGNLIALSLGLTPNFKSNFDLAEDAKLQLSKDTYDDDLDNLLAQIGDQYADLFLAAKNLSDAILLSDILRVNTEITKAPLSASMIKRYDEHHQDLTLLKALVRQQLPEKYKEIFFDQSKNGYAGYIDGGASQEEFYKFIKPILEKMDGTEELLVKLNREDLLRKQRTFDNGSIPHQIHLGELHAILRRQEDFYPFLKDNREKIEKILTFRIPYYVGPLARGNSRFAWMTRKSEETITPWNFEEVVDKGASAQSFIERMTNFDKNLPNEKVLPKHSLLYEYFTVYNELTKVKYVTEGMRKPAFLSGEQKKAIVDLLFKTNRKVTVKQLKEDYFKKIECFDSVEISGVEDRFNASLGTYHDLLKIIKDKDFLDNEENEDILEDIVLTLTLFEDREMIEERLKTYAHLFDDKVMKQLKRRRYTGWGRLSRKLINGIRDKQSGKTILDFLKSDGFANRNFMQLIHDDSLTFKEDIQKAQVSGQGDSLHEHIANLAGSPAIKKGILQTVKVVDELVKVMGRHKPENIVIEMARENQTTQKGQKNSRERMKRIEEGIKELGSQILKEHPVENTQLQNEKLYLYYLQNGRDMYVDQELDINRLSDYDVDHIVPQSFLKDDSIDNKVLTRSDKARGKSDNVPSEEVVKKMKNYWRQLLNAKLITQRKFDNLTKAERGGLSELDKAGFIKRQLVETRQITKHVAQILDSRMNTKYDENDKLIREVKVITLKSKLVSDFRKDFQFYKVREINNYHHAHDAYLNAVVGTALIKKYPKLESEFVYGDYKVYDVRKMIAKSEQEIGKATAKYFFYSNIMNFFKTEITLANGEIRKRPLIETNGETGEIVWDKGRDFATVRKVLSMPQVNIVKKTEVQTGGFSKESILPKRNSDKLIARKKDWDPKKYGGFDSPTVAYSVLVVAKVEKGKSKKLKSVKELLGITIMERSSFEKNPIDFLEAKGYKEVKKDLIIKLPKYSLFELENGRKRMLASAGELQKGNELALPSKYVNFLYLASHYEKLKGSPEDNEQKQLFVEQHKHYLDEIIEQISEFSKRVILADANLDKVLSAYNKHRDKPIREQAENIIHLFTLTNLGAPAAFKYFDTTIDRKRYTSTKEVLDATLIHQSITGLYETRIDLSQLGGDGGGGGGSGGGGSGGGGSGGGGSGGLLGRDLLTKLKAQIQFSTEGPQVTWEDRPAMCLVLNLEEEYRLHEKPVPPSIDPSWLQLFPMVWAEKAGMGLANQVPPVVVELKSDASPVAVRQYPMSKEAREGIRPHIQRFLDLGILVPCQSPWNTPLLPVKKPGTNDYRPVQDLREVNKRVQDIHPTVPNPYNLLSSLPPSHTWYSVLDLKDAFFCLKLHPNSQPLFAFEWRDPEKGNTGQLTWTRLPQGFKNSPTLFNEALHRDLASFRALNPQVVMLQYVDDLLVAAPTYRDCKEGTRRLLQELSKLGYRVSAKKAQLCREEVTYLGYLLKGGKRWLTPARKATVMKIPTPTTPRQVREFLGKAGFCRLFIPGFASLAAPLYPLTRPKVPFTWTEAHQEAFGRIKEALLSAPALALPDLTKPFALYVDEKEGVARGVLTQTLGPWRRPVAYLSKKLDPVASGWPTCLKAIAAVALLLKDADKLTLGQNVLVIAPHNLESIVRQPPDRWMTNARMTHYQSLLLNERVSFAPPAILNPATLLPVESDDTPIHICSEILAEETGTRPDLRDQPLPGVPAWYTDGSSFIMDGRRQAGAAIVDNKRTVWASNLPEGTSAQKAELIALTQALRLAEGKSINIYTDSRYAFATAHVHGAIYKQRGWLTSAGKDIKNKEEILALLEAIHLPKRVAIIHCPGHQRGTDPVATGNRKADEAAKQAAQSTRILTETTKNAGKRTADGSEFEKRTADGSEFESPKKKAKVE

SEQ ID NO: 6153 - protein, 2227 aa, synthetic construct
MPAAKRVKLDGGDKKYSIGLDIGTNSVGWAVITDEYKVPSKKFKVLGNTDRHSIKKNLIGALLFDSGETAEATRLKRTARRRYTRRKNRICYLQEIFSNEMAKVDDSFFHRLEESFLVEEDKKHERHPIFGNIVDEVAYHEKYPTIYHLRKKLVDSTDKADLRLIYLALAHMIKFRGHFLIEGDLNPDNSDVDKLFIQLVQTYNQLFEENPINASGVDAKAILSARLSKSRRLENLIAQLPGEKKNGLFGNLIALSLGLTPNFKSNFDLAEDAKLQLSKDTYDDDLDNLLAQIGDQYADLFLAAKNLSDAILLSDILRVNTEITKAPLSASMIKRYDEHHQDLTLLKALVRQQLPEKYKEIFFDQSKNGYAGYIDGGASQEEFYKFIKPILEKMDGTEELLVKLNREDLLRKQRTFDNGSIPHQIHLGELHAILRRQEDFYPFLKDNREKIEKILTFRIPYYVGPLARGNSRFAWMTRKSEETITPWNFEEVVDKGASAQSFIERMTNFDKNLPNEKVLPKHSLLYEYFTVYNELTKVKYVTEGMRKPAFLSGEQKKAIVDLLFKTNRKVTVKQLKEDYFKKIECFDSVEISGVEDRFNASLGTYHDLLKIIKDKDFLDNEENEDILEDIVLTLTLFEDREMIEERLKTYAHLFDDKVMKQLKRRRYTGWGRLSRKLINGIRDKQSGKTILDFLKSDGFANRNFMQLIHDDSLTFKEDIQKAQVSGQGDSLHEHIANLAGSPAIKKGILQTVKVVDELVKVMGRHKPENIVIEMARENQTTQKGQKNSRERMKRIEEGIKELGSQILKEHPVENTQLQNEKLYLYYLQNGRDMYVDQELDINRLSDYDVDHIVPQSFLKDDSIDNKVLTRSDKARGKSDNVPSEEVVKKMKNYWRQLLNAKLITQRKFDNLTKAERGGLSELDKAGFIKRQLVETRQITKHVAQILDSRMNTKYDENDKLIREVKVITLKSKLVSDFRKDFQFYKVREINNYHHAHDAYLNAVVGTALIKKYPKLESEFVYGDYKVYDVRKMIAKSEQEIGKATAKYFFYSNIMNFFKTEITLANGEIRKRPLIETNGETGEIVWDKGRDFATVRKVLSMPQVNIVKKTEVQTGGFSKESILPKRNSDKLIARKKDWDPKKYGGFDSPTVAYSVLVVAKVEKGKSKKLKSVKELLGITIMERSSFEKNPIDFLEAKGYKEVKKDLIIKLPKYSLFELENGRKRMLASAGELQKGNELALPSKYVNFLYLASHYEKLKGSPEDNEQKQLFVEQHKHYLDEIIEQISEFSKRVILADANLDKVLSAYNKHRDKPIREQAENIIHLFTLTNLGAPAAFKYFDTTIDRKRYTSTKEVLDATLIHQSITGLYETRIDLSQLGGDGGGGGGSGGGGSGGGGSGGGGSGGTLGDQGSRGSDPLPEPRVTLTVEGIPTEFLVNTGAEHSVLTKPMGKMGSKRTVVAGATGSKVYPWTTKRLLKIGQKQVTHSFLVIPECPAPLLGRDLLTKLKAQIQFSTEGPQVTWEDRPAMCLVLNLEEEYRLHEKPVPPSIDPSWLQLFPMVWAEKAGMGLANQVPPVVVELKSDASPVAVRQYPMSKEAREGIRPHIQRFLDLGILVPCQSPWNTPLLPVKKPGTNDYRPVQDLREVNKRVQDIHPTVPNPYNLLSSLPPSHTWYSVLDLKDAFFCLKLHPNSQPLFAFEWRDPEKGNTGQLTWTRLPQGFKNSPTLFNEALHRDLASFRALNPQVVMLQYVDDLLVAAPTYRDCKEGTRRLLQELSKLGYRVSAKKAQLCREEVTYLGYLLKGGKRWLTPARKATVMKIPTPTTPRQVREFLGTAGFCRLWIPGFASLAAPLYPLTRPKVPFTWTEAHQEAFGRIKEALLSAPALALPDLTKPFALYVDEKEGVARGVLTQTLGPWRRPVAYLSKKLDPVASGWPTCLKAIAAVALLLKDADKLTLGQNVLVIAPHNLESIVRQPPDRWMTNARMTHYQSLLLNERVSFAPPAILNPATLLPVESDDTPIHICSEILAEETGTRPDLRDQPLPGVPAWYTDGSSFIMDGRRQAGAAIVDNKRTVWASNLPEGTSAQKAELIALTQALRLAEGKSINIYTDSRYAFATAHVHGAIYKQRGWLTSAGKDIKNKEEILALLEAIHLPKRVAIIHCPGHQRGTDPVATGNRKADEAAKQAAQSTRILTETTKNAGKRTADGSEFEKRTADGSEFESPKKKAKVE

SEQ ID NO: 6154 - protein, 2105 aa, synthetic construct
MPAAKRVKLDGGDKKYSIGLDIGTNSVGWAVITDEYKVPSKKFKVLGNTDRHSIKKNLIGALLFDSGETAEATRLKRTARRRYTRRKNRICYLQEIFSNEMAKVDDSFFHRLEESFLVEEDKKHERHPIFGNIVDEVAYHEKYPTIYHLRKKLVDSTDKADLRLIYLALAHMIKFRGHFLIEGDLNPDNSDVDKLFIQLVQTYNQLFEENPINASGVDAKAILSARLSKSRRLENLIAQLPGEKKNGLFGNLIALSLGLTPNFKSNFDLAEDAKLQLSKDTYDDDLDNLLAQIGDQYADLFLAAKNLSDAILLSDILRVNTEITKAPLSASMIKRYDEHHQDLTLLKALVRQQLPEKYKEIFFDQSKNGYAGYIDGGASQEEFYKFIKPILEKMDGTEELLVKLNREDLLRKQRTFDNGSIPHQIHLGELHAILRRQEDFYPFLKDNREKIEKILTFRIPYYVGPLARGNSRFAWMTRKSEETITPWNFEEVVDKGASAQSFIERMTNFDKNLPNEKVLPKHSLLYEYFTVYNELTKVKYVTEGMRKPAFLSGEQKKAIVDLLFKTNRKVTVKQLKEDYFKKIECFDSVEISGVEDRFNASLGTYHDLLKIIKDKDFLDNEENEDILEDIVLTLTLFEDREMIEERLKTYAHLFDDKVMKQLKRRRYTGWGRLSRKLINGIRDKQSGKTILDFLKSDGFANRNFMQLIHDDSLTFKEDIQKAQVSGQGDSLHEHIANLAGSPAIKKGILQTVKVVDELVKVMGRHKPENIVIEMARENQTTQKGQKNSRERMKRIEEGIKELGSQILKEHPVENTQLQNEKLYLYYLQNGRDMYVDQELDINRLSDYDVDHIVPQSFLKDDSIDNKVLTRSDKARGKSDNVPSEEVVKKMKNYWRQLLNAKLITQRKFDNLTKAERGGLSELDKAGFIKRQLVETRQITKHVAQILDSRMNTKYDENDKLIREVKVITLKSKLVSDFRKDFQFYKVREINNYHHAHDAYLNAVVGTALIKKYPKLESEFVYGDYKVYDVRKMIAKSEQEIGKATAKYFFYSNIMNFFKTEITLANGEIRKRPLIETNGETGEIVWDKGRDFATVRKVLSMPQVNIVKKTEVQTGGFSKESILPKRNSDKLIARKKDWDPKKYGGFDSPTVAYSVLVVAKVEKGKSKKLKSVKELLGITIMERSSFEKNPIDFLEAKGYKEVKKDLIIKLPKYSLFELENGRKRMLASAGELQKGNELALPSKYVNFLYLASHYEKLKGSPEDNEQKQLFVEQHKHYLDEIIEQISEFSKRVILADANLDKVLSAYNKHRDKPIREQAENIIHLFTLTNLGAPAAFKYFDTTIDRKRYTSTKEVLDATLIHQSITGLYETRIDLSQLGGDGGGGGGSGGGGSGGGGSGGGGSGGTLNIEDEYRLHETSKEPDVSLGSTWLSDFPQAWAETGGMGLAVRQAPLIIPLKATSTPVSIKQYPMSQEARLGIKPHIQRLLDQGILVPCQSPWNTPLLPVKKPGTNDYRPVQDLREVNKRVEDIHPTVPNPYNLLSGLPPSHQWYTVLDLKDAFFCLRLHPTSQPLFAFEWRDPEMGISGQLTWTRLPQGFKNSPTLFNEALHRDLAGFRIQHPDLILLQYVDDLLLAATSELDCQQGTRALLQTLGDLGYRASAKKAQICQKQVKYLGYLLKEGQRWLTEARKETVMGQPIPKTPRQLREFLGTAGFCRLWIPGFAEMAAPLYPLTKPGTLFNWGPDQQKAFQEIKQALLTAPALGLPDLTKPFELFVDEKQGYAKGVLTQKLGPWRRPVAYLSKKLDPVAAGWPPCLRMVAAIAVLTKDAGKLTMGQPLVILAPHAVEALVKQPPDRWLSNARMTHYQALLLDTDRVQFGPVVALNPATLLPLPEEGLQHDCLDILAEAHGTRSDLMDQPLPDADHTWYTDGSSFLQEGQRKAGAAVTTETEVIWARALPAGTSAQRAELIALTQALKMAEGKKLNVYTDSRYAFATAHIHGEIYRRRGWLTSEGKEIKNKDEILALLKALFLPKRLSIIHCPGHQKGNSAEARGNRMADQAAREVATRETPETSTLLAGKRTADGSEFEKRTADGSEFESPKKKAKVE

SEQ ID NO: 6155 - protein, 2105 aa, synthetic construct
MPAAKRVKLDGGDKKYSIGLDIGTNSVGWAVITDEYKVPSKKFKVLGNTDRHSIKKNLIGALLFDSGETAEATRLKRTARRRYTRRKNRICYLQEIFSNEMAKVDDSFFHRLEESFLVEEDKKHERHPIFGNIVDEVAYHEKYPTIYHLRKKLVDSTDKADLRLIYLALAHMIKFRGHFLIEGDLNPDNSDVDKLFIQLVQTYNQLFEENPINASGVDAKAILSARLSKSRRLENLIAQLPGEKKNGLFGNLIALSLGLTPNFKSNFDLAEDAKLQLSKDTYDDDLDNLLAQIGDQYADLFLAAKNLSDAILLSDILRVNTEITKAPLSASMIKRYDEHHQDLTLLKALVRQQLPEKYKEIFFDQSKNGYAGYIDGGASQEEFYKFIKPILEKMDGTEELLVKLNREDLLRKQRTFDNGSIPHQIHLGELHAILRRQEDFYPFLKDNREKIEKILTFRIPYYVGPLARGNSRFAWMTRKSEETITPWNFEEVVDKGASAQSFIERMTNFDKNLPNEKVLPKHSLLYEYFTVYNELTKVKYVTEGMRKPAFLSGEQKKAIVDLLFKTNRKVTVKQLKEDYFKKIECFDSVEISGVEDRFNASLGTYHDLLKIIKDKDFLDNEENEDILEDIVLTLTLFEDREMIEERLKTYAHLFDDKVMKQLKRRRYTGWGRLSRKLINGIRDKQSGKTILDFLKSDGFANRNFMQLIHDDSLTFKEDIQKAQVSGQGDSLHEHIANLAGSPAIKKGILQTVKVVDELVKVMGRHKPENIVIEMARENQTTQKGQKNSRERMKRIEEGIKELGSQILKEHPVENTQLQNEKLYLYYLQNGRDMYVDQELDINRLSDYDVDHIVPQSFLKDDSIDNKVLTRSDKARGKSDNVPSEEVVKKMKNYWRQLLNAKLITQRKFDNLTKAERGGLSELDKAGFIKRQLVETRQITKHVAQILDSRMNTKYDENDKLIREVKVITLKSKLVSDFRKDFQFYKVREINNYHHAHDAYLNAVVGTALIKKYPKLESEFVYGDYKVYDVRKMIAKSEQEIGKATAKYFFYSNIMNFFKTEITLANGEIRKRPLIETNGETGEIVWDKGRDFATVRKVLSMPQVNIVKKTEVQTGGFSKESILPKRNSDKLIARKKDWDPKKYGGFDSPTVAYSVLVVAKVEKGKSKKLKSVKELLGITIMERSSFEKNPIDFLEAKGYKEVKKDLIIKLPKYSLFELENGRKRMLASAGELQKGNELALPSKYVNFLYLASHYEKLKGSPEDNEQKQLFVEQHKHYLDEIIEQISEFSKRVILADANLDKVLSAYNKHRDKPIREQAENIIHLFTLTNLGAPAAFKYFDTTIDRKRYTSTKEVLDATLIHQSITGLYETRIDLSQLGGDGGGGGGSGGGGSGGGGSGGGGSGGTLNIEDEYRLHETSKGPDVPLGSTWLSDFPQAWAETGGMGLAVRQAPLIIPLKATSTPVSIKQYPMSQEARLGIKPHIQRLLDQGILVPCQSPWNTPLLPVKKPGTNDYRPVQDLREVNKRVEDIHPTVPNPYNLLSGLPPSHQWYTVLDLKDAFFCLRLHPTSQSLFAFEWRDPEMGISGQLTWTRLPQGFKNSPTLFNEALHRDLADFRIQHPDLILLQYVDDLLLAATSELDCQQGTRALLQTLGDLGYRASAKKAQICQKQVKYLGYLLKEGQRWLTEARKETVMGQPTPKTPRQLREFLGKAGFCRLFIPGFAEMAAPLYPLTKPGTLFEWGPDQQKAYQEIKQALLTAPALGLPDLTKPFELFVDEKQGYAKGVLTQKLGPWRRPVAYLSKKLDPVAAGWPPCLRMVAAIAVLTKDAGKLTMGQPLVILAPHAVEALVKQPPDRWLSNARMTHYQALLLDTDRVQFGPIVALNPATLLPLPEEGLQHDCLDILAEAHGTRPDLTDQPLPDADHTWYTDGSSFLQEGQRKAGAAVTTETEVVWAKALPAGTSAQRAELIALTQALKMAEGKKLNVYTDSRYAFATAHIHGEIYRRRGWLTSEGKEIKNKDEILALLKALFLPKRLSIIHCPGHQKGNRAEARGNRMADQAAREVATRETPETSTLLAGKRTADGSEFEKRTADGSEFESPKKKAKVE

SEQ ID NO: 6156 - protein, 2105 aa, synthetic construct
MPAAKRVKLDGGDKKYSIGLDIGTNSVGWAVITDEYKVPSKKFKVLGNTDRHSIKKNLIGALLFDSGETAEATRLKRTARRRYTRRKNRICYLQEIFSNEMAKVDDSFFHRLEESFLVEEDKKHERHPIFGNIVDEVAYHEKYPTIYHLRKKLVDSTDKADLRLIYLALAHMIKFRGHFLIEGDLNPDNSDVDKLFIQLVQTYNQLFEENPINASGVDAKAILSARLSKSRRLENLIAQLPGEKKNGLFGNLIALSLGLTPNFKSNFDLAEDAKLQLSKDTYDDDLDNLLAQIGDQYADLFLAAKNLSDAILLSDILRVNTEITKAPLSASMIKRYDEHHQDLTLLKALVRQQLPEKYKEIFFDQSKNGYAGYIDGGASQEEFYKFIKPILEKMDGTEELLVKLNREDLLRKQRTFDNGSIPHQIHLGELHAILRRQEDFYPFLKDNREKIEKILTFRIPYYVGPLARGNSRFAWMTRKSEETITPWNFEEVVDKGASAQSFIERMTNFDKNLPNEKVLPKHSLLYEYFTVYNELTKVKYVTEGMRKPAFLSGEQKKAIVDLLFKTNRKVTVKQLKEDYFKKIECFDSVEISGVEDRFNASLGTYHDLLKIIKDKDFLDNEENEDILEDIVLTLTLFEDREMIEERLKTYAHLFDDKVMKQLKRRRYTGWGRLSRKLINGIRDKQSGKTILDFLKSDGFANRNFMQLIHDDSLTFKEDIQKAQVSGQGDSLHEHIANLAGSPAIKKGILQTVKVVDELVKVMGRHKPENIVIEMARENQTTQKGQKNSRERMKRIEEGIKELGSQILKEHPVENTQLQNEKLYLYYLQNGRDMYVDQELDINRLSDYDVDHIVPQSFLKDDSIDNKVLTRSDKARGKSDNVPSEEVVKKMKNYWRQLLNAKLITQRKFDNLTKAERGGLSELDKAGFIKRQLVETRQITKHVAQILDSRMNTKYDENDKLIREVKVITLKSKLVSDFRKDFQFYKVREINNYHHAHDAYLNAVVGTALIKKYPKLESEFVYGDYKVYDVRKMIAKSEQEIGKATAKYFFYSNIMNFFKTEITLANGEIRKRPLIETNGETGEIVWDKGRDFATVRKVLSMPQVNIVKKTEVQTGGFSKESILPKRNSDKLIARKKDWDPKKYGGFDSPTVAYSVLVVAKVEKGKSKKLKSVKELLGITIMERSSFEKNPIDFLEAKGYKEVKKDLIIKLPKYSLFELENGRKRMLASAGELQKGNELALPSKYVNFLYLASHYEKLKGSPEDNEQKQLFVEQHKHYLDEIIEQISEFSKRVILADANLDKVLSAYNKHRDKPIREQAENIIHLFTLTNLGAPAAFKYFDTTIDRKRYTSTKEVLDATLIHQSITGLYETRIDLSQLGGDGGGGGGSGGGGSGGGGSGGGGSGGTLNIEDEHRLHETSKEPDVSLGSTWLSDFPQAWAETGGMGLAVRQAPLIIPLKATSTPVSIKQYPMSQEARLGIKPHIQRLLDQGILVPCQSPWNTPLLPVKKPGTNDYRPVQDLREVNKRVEDIHPTVPNPYNLLSGLPPSHQWYTVLDLKDAFFCLRLHPTSQPLFAFEWRDPEMGISGQLTWTRLPQGFKNSPTLFDEALHRDLADFRIQHPDLILLQYVDDLLLAATSELDCQQGTRALLQTLGNLGYRASAKKAQICQKQVKYLGYLLKEGQRWLTEARKETVMGQPTPKTPRQLREFLGTAGFCRLWIPGFAEMAAPLYPLTKTGTLFNWGPDQQKAYQEIKQALLTAPALGLPDLTKPFELFVDEKQGYAKGVLTQKLGPWRRPVAYLSKKLDPVAAGWPPCLRMVAAIAVLTKDAGKLTMGQPLVILAPHAVEALVKQPPDRWLSNARMTHYQALLLDTDRVQFGPVVALNPATLLPLPEEGLQHNCLDILAEAHGTRPDLTDQPLPDADHTWYTDGSSLLQEGQRKAGAAVTTETEVIWAKALPAGTSAQRAELIALTQALKMAEGKKLNVYTDSRYAFATAHIHGEIYRRRGLLTSEGKEIKNKDEILALLKALFLPKRLSIIHCPGHQKGHSAEARGNRMADQAARKAAITETPDTSTLLAGKRTADGSEFEKRTADGSEFESPKKKAKVE

SEQ ID NO: 6157 - protein, 2033 aa, synthetic construct
MPAAKRVKLDGGDKKYSIGLDIGTNSVGWAVITDEYKVPSKKFKVLGNTDRHSIKKNLIGALLFDSGETAEATRLKRTARRRYTRRKNRICYLQEIFSNEMAKVDDSFFHRLEESFLVEEDKKHERHPIFGNIVDEVAYHEKYPTIYHLRKKLVDSTDKADLRLIYLALAHMIKFRGHFLIEGDLNPDNSDVDKLFIQLVQTYNQLFEENPINASGVDAKAILSARLSKSRRLENLIAQLPGEKKNGLFGNLIALSLGLTPNFKSNFDLAEDAKLQLSKDTYDDDLDNLLAQIGDQYADLFLAAKNLSDAILLSDILRVNTEITKAPLSASMIKRYDEHHQDLTLLKALVRQQLPEKYKEIFFDQSKNGYAGYIDGGASQEEFYKFIKPILEKMDGTEELLVKLNREDLLRKQRTFDNGSIPHQIHLGELHAILRRQEDFYPFLKDNREKIEKILTFRIPYYVGPLARGNSRFAWMTRKSEETITPWNFEEVVDKGASAQSFIERMTNFDKNLPNEKVLPKHSLLYEYFTVYNELTKVKYVTEGMRKPAFLSGEQKKAIVDLLFKTNRKVTVKQLKEDYFKKIECFDSVEISGVEDRFNASLGTYHDLLKIIKDKDFLDNEENEDILEDIVLTLTLFEDREMIEERLKTYAHLFDDKVMKQLKRRRYTGWGRLSRKLINGIRDKQSGKTILDFLKSDGFANRNFMQLIHDDSLTFKEDIQKAQVSGQGDSLHEHIANLAGSPAIKKGILQTVKVVDELVKVMGRHKPENIVIEMARENQTTQKGQKNSRERMKRIEEGIKELGSQILKEHPVENTQLQNEKLYLYYLQNGRDMYVDQELDINRLSDYDVDHIVPQSFLKDDSIDNKVLTRSDKARGKSDNVPSEEVVKKMKNYWRQLLNAKLITQRKFDNLTKAERGGLSELDKAGFIKRQLVETRQITKHVAQILDSRMNTKYDENDKLIREVKVITLKSKLVSDFRKDFQFYKVREINNYHHAHDAYLNAVVGTALIKKYPKLESEFVYGDYKVYDVRKMIAKSEQEIGKATAKYFFYSNIMNFFKTEITLANGEIRKRPLIETNGETGEIVWDKGRDFATVRKVLSMPQVNIVKKTEVQTGGFSKESILPKRNSDKLIARKKDWDPKKYGGFDSPTVAYSVLVVAKVEKGKSKKLKSVKELLGITIMERSSFEKNPIDFLEAKGYKEVKKDLIIKLPKYSLFELENGRKRMLASAGELQKGNELALPSKYVNFLYLASHYEKLKGSPEDNEQKQLFVEQHKHYLDEIIEQISEFSKRVILADANLDKVLSAYNKHRDKPIREQAENIIHLFTLTNLGAPAAFKYFDTTIDRKRYTSTKEVLDATLIHQSITGLYETRIDLSQLGGDGGGGGGSGGGGSGGGGSGGGGSGGGRDIMKDIKVRLMTDSPDDSQDLMIGAIESNLFADQISWKSDQPVWLNQWPLKQEKLQALQQLVTEQLQLGHLEESNSPWNTPVFVIKKKSGKWRLLQDLRAVNATMHDMGALQPGLPSPVAVPKGWEIIIIDLQDCFFNIKLHPEDCKRFAFSVPSPNFKRPYQRFQWKVLPQGMKNSPTLCQKFVDKAILTVRDKYQDSYIVHYMDDILLAHPSRSIVDEILTSMIQALNKHGLVVSTEKIQKYDNLKYLGTHIQGDSVSYQKLQIRTDKLRTLNDFQKLLGNINWIRPFLKLTTGELKPLFEILNGDSNPISTRKLTPEACKALQLMNERLSTARVKRLDLSQPWSLCILKTEYTPTACLWQDGVVEWIHLPHISPKVITPYDIFCTQLIIKGRHRSKELFSKDPDYIVVPYTKVQFDLLLQEKEDWPISLLGFLGEVHFHLPKDPLLTFTLQTAIIFPHMTSTTPLEKGIVIFTDGSANGRSVTYIQGREPIIKENTQNTAQQAEIVAVITAFEEVSQPFNLYTDSKYVTGLFPEIETATLSPRTKIYTELKHLQRLIHKRQEKFYIGHIRGHTGLPGPLAQGNAYADSLTRILTAGKRTADGSEFEKRTADGSEFESPKKKAKVE

SEQ ID NO: 6158 - protein, 2097 aa, synthetic construct
MPAAKRVKLDGGDKKYSIGLDIGTNSVGWAVITDEYKVPSKKFKVLGNTDRHSIKKNLIGALLFDSGETAEATRLKRTARRRYTRRKNRICYLQEIFSNEMAKVDDSFFHRLEESFLVEEDKKHERHPIFGNIVDEVAYHEKYPTIYHLRKKLVDSTDKADLRLIYLALAHMIKFRGHFLIEGDLNPDNSDVDKLFIQLVQTYNQLFEENPINASGVDAKAILSARLSKSRRLENLIAQLPGEKKNGLFGNLIALSLGLTPNFKSNFDLAEDAKLQLSKDTYDDDLDNLLAQIGDQYADLFLAAKNLSDAILLSDILRVNTEITKAPLSASMIKRYDEHHQDLTLLKALVRQQLPEKYKEIFFDQSKNGYAGYIDGGASQEEFYKFIKPILEKMDGTEELLVKLNREDLLRKQRTFDNGSIPHQIHLGELHAILRRQEDFYPFLKDNREKIEKILTFRIPYYVGPLARGNSRFAWMTRKSEETITPWNFEEVVDKGASAQSFIERMTNFDKNLPNEKVLPKHSLLYEYFTVYNELTKVKYVTEGMRKPAFLSGEQKKAIVDLLFKTNRKVTVKQLKEDYFKKIECFDSVEISGVEDRFNASLGTYHDLLKIIKDKDFLDNEENEDILEDIVLTLTLFEDREMIEERLKTYAHLFDDKVMKQLKRRRYTGWGRLSRKLINGIRDKQSGKTILDFLKSDGFANRNFMQLIHDDSLTFKEDIQKAQVSGQGDSLHEHIANLAGSPAIKKGILQTVKVVDELVKVMGRHKPENIVIEMARENQTTQKGQKNSRERMKRIEEGIKELGSQILKEHPVENTQLQNEKLYLYYLQNGRDMYVDQELDINRLSDYDVDHIVPQSFLKDDSIDNKVLTRSDKARGKSDNVPSEEVVKKMKNYWRQLLNAKLITQRKFDNLTKAERGGLSELDKAGFIKRQLVETRQITKHVAQILDSRMNTKYDENDKLIREVKVITLKSKLVSDFRKDFQFYKVREINNYHHAHDAYLNAVVGTALIKKYPKLESEFVYGDYKVYDVRKMIAKSEQEIGKATAKYFFYSNIMNFFKTEITLANGEIRKRPLIETNGETGEIVWDKGRDFATVRKVLSMPQVNIVKKTEVQTGGFSKESILPKRNSDKLIARKKDWDPKKYGGFDSPTVAYSVLVVAKVEKGKSKKLKSVKELLGITIMERSSFEKNPIDFLEAKGYKEVKKDLIIKLPKYSLFELENGRKRMLASAGELQKGNELALPSKYVNFLYLASHYEKLKGSPEDNEQKQLFVEQHKHYLDEIIEQISEFSKRVILADANLDKVLSAYNKHRDKPIREQAENIIHLFTLTNLGAPAAFKYFDTTIDRKRYTSTKEVLDATLIHQSITGLYETRIDLSQLGGDGGGGGGSGGGGSGGGGSGGGGSGGLDDEYRLYSPLVKPDQNIQFWLEQFPQAWAETAGMGLAKQVPPQVIQLKASATPVSVRQYPLSKEAQEGIRPHVQRLIQQGILVPVQSPWNTPLLPVRKPGTNDYRPVQDLREVNKRVQDIHPTVPNPYNLLCALPPQRSWYTVLDLKDAFFCLRLHPTSQPLFAFEWRDPGTGRTGQLTWTRLPQGFKNSPTIFNEALHRDLANFRIQHPQVTLLQYVDDLLLAGATKQDCLEGTKALLLELSDLGYRASAKKAQICRREVTYLGYSLRDGQRWLTEARKKTVVQIPAPTTAKQVREFLGKAGFCRLFIPGFATLAAPLYPLTKPKGEFSWAPEHQKAFDAIKKALLSAPALALPDVTKPFTLYVDERKGVARGVLTQTLGPWRRPVAYLSKKLDPVASGWPVCLKAIAAVAILVKDADKLTLGQNITVIAPHALENIVRQPPDRWMTNARMTHYQSLLLTERVTFAPPAALNPATLLPEETDEPVTHDCHQLLIEETGVRKDLTDIPLTGEVLTWFTDGSSYVVEGKRMAGAAVVDGTRTIWASSLPEGTSAQKAELMALTQALRLAEGKSINIYTDSRYAFATAHVHGAIYKQRGWLTSAGREIKNKEEILSLLEALHLPKRLAIIHCPGHQKAKDPISRGNQMADRVAKQAAQGVNLLPAGKRTADGSEFEKRTADGSEFESPKKKAKVE

SEQ ID NO: 6159 - protein, 2097 aa, synthetic construct; identical to SEQ ID NO: 6158

SEQ ID NO: 6160 - protein, 2096 aa, synthetic construct
MPAAKRVKLDGGDKKYSIGLDIGTNSVGWAVITDEYKVPSKKFKVLGNTDRHSIKKNLIGALLFDSGETAEATRLKRTARRRYTRRKNRICYLQEIFSNEMAKVDDSFFHRLEESFLVEEDKKHERHPIFGNIVDEVAYHEKYPTIYHLRKKLVDSTDKADLRLIYLALAHMIKFRGHFLIEGDLNPDNSDVDKLFIQLVQTYNQLFEENPINASGVDAKAILSARLSKSRRLENLIAQLPGEKKNGLFGNLIALSLGLTPNFKSNFDLAEDAKLQLSKDTYDDDLDNLLAQIGDQYADLFLAAKNLSDAILLSDILRVNTEITKAPLSASMIKRYDEHHQDLTLLKALVRQQLPEKYKEIFFDQSKNGYAGYIDGGASQEEFYKFIKPILEKMDGTEELLVKLNREDLLRKQRTFDNGSIPHQIHLGELHAILRRQEDFYPFLKDNREKIEKILTFRIPYYVGPLARGNSRFAWMTRKSEETITPWNFEEVVDKGASAQSFIERMTNFDKNLPNEKVLPKHSLLYEYFTVYNELTKVKYVTEGMRKPAFLSGEQKKAIVDLLFKTNRKVTVKQLKEDYFKKIECFDSVEISGVEDRFNASLGTYHDLLKIIKDKDFLDNEENEDILEDIVLTLTLFEDREMIEERLKTYAHLFDDKVMKQLKRRRYTGWGRLSRKLINGIRDKQSGKTILDFLKSDGFANRNFMQLIHDDSLTFKEDIQKAQVSGQGDSLHEHIANLAGSPAIKKGILQTVKVVDELVKVMGRHKPENIVIEMARENQTTQKGQKNSRERMKRIEEGIKELGSQILKEHPVENTQLQNEKLYLYYLQNGRDMYVDQELDINRLSDYDVDHIVPQSFLKDDSIDNKVLTRSDKARGKSDNVPSEEVVKKMKNYWRQLLNAKLITQRKFDNLTKAERGGLSELDKAGFIKRQLVETRQITKHVAQILDSRMNTKYDENDKLIREVKVITLKSKLVSDFRKDFQFYKVREINNYHHAHDAYLNAVVGTALIKKYPKLESEFVYGDYKVYDVRKMIAKSEQEIGKATAKYFFYSNIMNFFKTEITLANGEIRKRPLIETNGETGEIVWDKGRDFATVRKVLSMPQVNIVKKTEVQTGGFSKESILPKRNSDKLIARKKDWDPKKYGGFDSPTVAYSVLVVAKVEKGKSKKLKSVKELLGITIMERSSFEKNPIDFLEAKGYKEVKKDLIIKLPKYSLFELENGRKRMLASAGELQKGNELALPSKYVNFLYLASHYEKLKGSPEDNEQKQLFVEQHKHYLDEIIEQISEFSKRVILADANLDKVLSAYNKHRDKPIREQAENIIHLFTLTNLGAPAAFKYFDTTIDRKRYTSTKEVLDATLIHQSITGLYETRIDLSQLGGDGGGGGGSGGGGSGGGGSGGGGSGGVPWLMKKPLQLTVLVPLHEYQERLLQQTALPKEQKELLQKLFLKYDALWQHWENQVGHRRIKPHNIATGTLAPRPQKQYPINPKAKPSIQIVIDDLLKQGVLIQQNSTMNTPVYPVPKPDGKWRMVLDYREVNKTIPLIAAQNQHSAGILSSIYRGKYKTTLDLTNGFWAHPITPESYWLTAFTWQGKQYCWTRLPQGFLNSPALFTADVVDLLKEIPNVQAYVDDIYISHDDPQEHLEQLEKIFSILLNAGYVVSLKKSEIAQREVEFLGFNITKEGRGLTDTFKQKLLNITPPKDLKQLQSILGLLNFARNFIPNYSELVKPLYTIVANANGKFISWTEDNSNQLQHIISVLNQADNLEERNPETRLIIKVNSSPSAGYIRYYNEGSKRPIMYVNYIFSKAEAKFTQTEKLLTTMHKGLIKAMDLAMGQEILVYSPIVSMTKIQRTPLPERKALPVRWITWMTYLEDPRIQFHYDKSLPELQQIPNVTEDVIAKTKHPSEFAMVFYTDGSAIKHPDVNKSHSAGMGIAQVQFIPEYKIVHQWSIPLGDHTAQLAEIAAVEFACKKALKISGPVLIVTDSFYVAESANKELPYWKSNGFLNNKKKPLRHVSKWKSIAECLQLKPDIIIMHEKGHQQPMTTLHTEGNNLADKLATQGSYVVHAGKRTADGSEFEKRTADGSEFESPKKKAKVE

SEQ ID NO: 6161 - protein, 2185 aa, synthetic construct
MPAAKRVKLDGGDKKYSIGLDIGTNSVGWAVITDEYKVPSKKFKVLGNTDRHSIKKNLIGALLFDSGETAEATRLKRTARRRYTRRKNRICYLQEIFSNEMAKVDDSFFHRLEESFLVEEDKKHERHPIFGNIVDEVAYHEKYPTIYHLRKKLVDSTDKADLRLIYLALAHMIKFRGHFLIEGDLNPDNSDVDKLFIQLVQTYNQLFEENPINASGVDAKAILSARLSKSRRLENLIAQLPGEKKNGLFGNLIALSLGLTPNFKSNFDLAEDAKLQLSKDTYDDDLDNLLAQIGDQYADLFLAAKNLSDAILLSDILRVNTEITKAPLSASMIKRYDEHHQDLTLLKALVRQQLPEKYKEIFFDQSKNGYAGYIDGGASQEEFYKFIKPILEKMDGTEELLVKLNREDLLRKQRTFDNGSIPHQIHLGELHAILRRQEDFYPFLKDNREKIEKILTFRIPYYVGPLARGNSRFAWMTRKSEETITPWNFEEVVDKGASAQSFIERMTNFDKNLPNEKVLPKHSLLYEYFTVYNELTKVKYVTEGMRKPAFLSGEQKKAIVDLLFKTNRKVTVKQLKEDYFKKIECFDSVEISGVEDRFNASLGTYHDLLKIIKDKDFLDNEENEDILEDIVLTLTLFEDREMIEERLKTYAHLFDDKVMKQLKRRRYTGWGRLSRKLINGIRDKQSGKTILDFLKSDGFANRNFMQLIHDDSLTFKEDIQKAQVSGQGDSLHEHIANLAGSPAIKKGILQTVKVVDELVKVMGRHKPENIVIEMARENQTTQKGQKNSRERMKRIEEGIKELGSQILKEHPVENTQLQNEKLYLYYLQNGRDMYVDQELDINRLSDYDVDHIVPQSFLKDDSIDNKVLTRSDKARGKSDNVPSEEVVKKMKNYWRQLLNAKLITQRKFDNLTKAERGGLSELDKAGFIKRQLVETRQITKHVAQILDSRMNTKYDENDKLIREVKVITLKSKLVSDFRKDFQFYKVREINNYHHAHDAYLNAVVGTALIKKYPKLESEFVYGDYKVYDVRKMIAKSEQEIGKATAKYFFYSNIMNFFKTEITLANGEIRKRPLIETNGETGEIVWDKGRDFATVRKVLSMPQVNIVKKTEVQTGGFSKESILPKRNSDKLIARKKDWDPKKYGGFDSPTVAYSVLVVAKVEKGKSKKLKSVKELLGITIMERSSFEKNPIDFLEAKGYKEVKKDLIIKLPKYSLFELENGRKRMLASAGELQKGNELALPSKYVNFLYLASHYEKLKGSPEDNEQKQLFVEQHKHYLDEIIEQISEFSKRVILADANLDKVLSAYNKHRDKPIREQAENIIHLFTLTNLGAPAAFKYFDTTIDRKRYTSTKEVLDATLIHQSITGLYETRIDLSQLGGDGGGGGGSGGGGSGGGGSGGGGSGGMDPLQLLQPLEAEIKGTKLKAHWNSGATITCVPQAFLEEEVPIKNIWIKTIHGEKEQPVYYLTFKIQGRKVEAEVISSPYDYILVSPSDIPWLMKKPLQLTTLVPLQEYEERLLKQTMLTGSYKEKLQSLFLKYDALWQHWENQVGHRRIKPHHIATGTVNPRPQKQYPINPKAKASIQTVINDLLKQGVLIQQNSIMNTPVYPVPKPDGKWRMVLDYREVNKTIPLIAAQNQHSAGILSSIFRGKYKTTLDLSNGFWAHSITPESYWLTAFTWLGQQYCWTRLPQGFLNSPALFTADVVDLLKEVPNVQVYVDDIYISHDDPREHLEQLEKVFSLLLNAGYVVSLKKSEIAQHEVEFLGFNITKEGRGLTETFKQKLLNITPPRDLKQLQSILGLLNFARNFIPNFSELVKPLYNIIATANGKYITWTTDNSQQLQNIISMLNSAENLEERNPEVRLIMKVNTSPSAGYIRFYNEFAKRPIMYLNYVYTKAEVKFTNTEKLLTTIHKGLIKALDLGMGQEILVYSPIVSMTKIQKTPLPERKALPIRWITWMSYLEDPRIQFHYDKTLPELQQVPTVTDDIIAKIKHPSEFSMVFYTDGSAIKHPNVNKSHNAGMGIAQVQFKPEFTVINTWSIPLGDHTAQLAEVAAVEFACKKALKIDGPVLIVTDSFYVAESVNKELPYWQSNGFFNNKKKPLKHVSKWKSIADCIQLKPDIIIIHEKGHQPTASTFHTEGNNLADKLATQGSYVVNAGKRTADGSEFEKRTADGSEFESPKKKAKVE

SEQ ID NO: 6162 - protein, 2096 aa, synthetic construct
MPAAKRVKLDGGDKKYSIGLDIGTNSVGWAVITDEYKVPSKKFKVLGNTDRHSIKKNLIGALLFDSGETAEATRLKRTARRRYTRRKNRICYLQEIFSNEMAKVDDSFFHRLEESFLVEEDKKHERHPIFGNIVDEVAYHEKYPTIYHLRKKLVDSTDKADLRLIYLALAHMIKFRGHFLIEGDLNPDNSDVDKLFIQLVQTYNQLFEENPINASGVDAKAILSARLSKSRRLENLIAQLPGEKKNGLFGNLIALSLGLTPNFKSNFDLAEDAKLQLSKDTYDDDLDNLLAQIGDQYADLFLAAKNLSDAILLSDILRVNTEITKAPLSASMIKRYDEHHQDLTLLKALVRQQLPEKYKEIFFDQSKNGYAGYIDGGASQEEFYKFIKPILEKMDGTEELLVKLNREDLLRKQRTFDNGSIPHQIHLGELHAILRRQEDFYPFLKDNREKIEKILTFRIPYYVGPLARGNSRFAWMTRKSEETITPWNFEEVVDKGASAQSFIERMTNFDKNLPNEKVLPKHSLLYEYFTVYNELTKVKYVTEGMRKPAFLSGEQKKAIVDLLFKTNRKVTVKQLKEDYFKKIECFDSVEISGVEDRFNASLGTYHDLLKIIKDKDFLDNEENEDILEDIVLTLTLFEDREMIEERLKTYAHLFDDKVMKQLKRRRYTGWGRLSRKLINGIRDKQSGKTILDFLKSDGFANRNFMQLIHDDSLTFKEDIQKAQVSGQGDSLHEHIANLAGSPAIKKGILQTVKVVDELVKVMGRHKPENIVIEMARENQTTQKGQKNSRERMKRIEEGIKELGSQILKEHPVENTQLQNEKLYLYYLQNGRDMYVDQELDINRLSDYDVDHIVPQSFLKDDSIDNKVLTRSDKARGKSDNVPSEEVVKKMKNYWRQLLNAKLITQRKFDNLTKAERGGLSELDKAGFIKRQLVETRQITKHVAQILDSRMNTKYDENDKLIREVKVITLKSKLVSDFRKDFQFYKVREINNYHHAHDAYLNAVVGTALIKKYPKLESEFVYGDYKVYDVRKMIAKSEQEIGKATAKYFFYSNIMNFFKTEITLANGEIRKRPLIETNGETGEIVWDKGRDFATVRKVLSMPQVNIVKKTEVQTGGFSKESILPKRNSDKLIARKKDWDPKKYGGFDSPTVAYSVLVVAKVEKGKSKKLKSVKELLGITIMERSSFEKNPIDFLEAKGYKEVKKDLIIKLPKYSLFELENGRKRMLASAGELQKGNELALPSKYVNFLYLASHYEKLKGSPEDNEQKQLFVEQHKHYLDEIIEQISEFSKRVILADANLDKVLSAYNKHRDKPIREQAENIIHLFTLTNLGAPAAFKYFDTTIDRKRYTSTKEVLDATLIHQSITGLYETRIDLSQLGGDGGGGGGSGGGGSGGGGSGGGGSGGIPWLMKKPLQLTTLVPLQEYEERLLKQTMLTGSYKEKLQSLFLKYDALWQHWENQVGHRRIKPHHIATGTVNPRPQKQYPINPKAKASIQTVINDLLKQGVLIQQNSIMNTPVYPVPKPDGKWRMVLDYREVNKTIPLIAAQNQHSAGILSSIFRGKYKTTLDLSNGFWAHSITPESYWLTAFTWLGQQYCWTRLPQGFLNSPALFNADVVDLLKEVPNVQVYVDDIYISHDDPREHLEQLEKVFSLLLNAGYVVSLKKSEIAQHEVEFLGFNITKEGRGLTETFKQKLLNITPPRDLKQLQSILGKLNFARNFIPNFSELVKPLYNIIATAPGKYITWTTDNSQQLQNIISMLNSAENLEERNPEVRLIMKVNTSPSAGYIRFYNEFAKRPIMYLNYVYTKAEVKFTNTEKLLTTIHKGLIKALDLGMGQEILVYSPIVSMTKIQKTPLPERKALPIRWITWMSYLEDPRIQFHYDKTLPELQQVPTVTDDIIAKIKHPSEFSMVFYTDGSAIKHPNVNKSHNAGMGIAQVQFKPEFTVINTWSIPLGDHTAQLAEVAAVEFACKKALKIDGPVLIVTDSFYVAESVNKELPYWQSNGFFNNKKKPLKHVSKWKSIADCIQLKPDIIIIHEKGHQPTASTFHTEGNNLADKLATQGSYVVNAGKRTADGSEFEKRTADGSEFESPKKKAKVE

SEQ ID NO: 6163 - protein, 2103 aa, synthetic construct
MPAAKRVKLDGGDKKYSIGLDIGTNSVGWAVITDEYKVPSKKFKVLGNTDRHSIKKNLIGALLFDSGETAEATRLKRTARRRYTRRKNRICYLQEIFSNEMAKVDDSFFHRLEESFLVEEDKKHERHPIFGNIVDEVAYHEKYPTIYHLRKKLVDSTDKADLRLIYLALAHMIKFRGHFLIEGDLNPDNSDVDKLFIQLVQTYNQLFEENPINASGVDAKAILSARLSKSRRLENLIAQLPGEKKNGLFGNLIALSLGLTPNFKSNFDLAEDAKLQLSKDTYDDDLDNLLAQIGDQYADLFLAAKNLSDAILLSDILRVNTEITKAPLSASMIKRYDEHHQDLTLLKALVRQQLPEKYKEIFFDQSKNGYAGYIDGGASQEEFYKFIKPILEKMDGTEELLVKLNREDLLRKQRTFDNGSIPHQIHLGELHAILRRQEDFYPFLKDNREKIEKILTFRIPYYVGPLARGNSRFAWMTRKSEETITPWNFEEVVDKGASAQSFIERMTNFDKNLPNEKVLPKHSLLYEYFTVYNELTKVKYVTEGMRKPAFLSGEQKKAIVDLLFKTNRKVTVKQLKEDYFKKIECFDSVEISGVEDRFNASLGTYHDLLKIIKDKDFLDNEENEDILEDIVLTLTLFEDREMIEERLKTYAHLFDDKVMKQLKRRRYTGWGRLSRKLINGIRDKQSGKTILDFLKSDGFANRNFMQLIHDDSLTFKEDIQKAQVSGQGDSLHEHIANLAGSPAIKKGILQTVKVVDELVKVMGRHKPENIVIEMARENQTTQKGQKNSRERMKRIEEGIKELGSQILKEHPVENTQLQNEKLYLYYLQNGRDMYVDQELDINRLSDYDVDHIVPQSFLKDDSIDNKVLTRSDKARGKSDNVPSEEVVKKMKNYWRQLLNAKLITQRKFDNLTKAERGGLSELDKAGFIKRQLVETRQITKHVAQILDSRMNTKYDENDKLIREVKVITLKSKLVSDFRKDFQFYKVREINNYHHAHDAYLNAVVGTALIKKYPKLESEFVYGDYKVYDVRKMIAKSEQEIGKATAKYFFYSNIMNFFKTEITLANGEIRKRPLIETNGETGEIVWDKGRDFATVRKVLSMPQVNIVKKTEVQTGGFSKESILPKRNSDKLIARKKDWDPKKYGGFDSPTVAYSVLVVAKVEKGKSKKLKSVKELLGITIMERSSFEKNPIDFLEAKGYKEVKKDLIIKLPKYSLFELENGRKRMLASAGELQKGNELALPSKYVNFLYLASHYEKLKGSPEDNEQKQLFVEQHKHYLDEIIEQISEFSKRVILADANLDKVLSAYNKHRDKPIREQAENIIHLFTLTNLGAPAAFKYFDTTIDRKRYTSTKEVLDATLIHQSITGLYETRIDLSQLGGDGGGGGGSGGGGSGGGGSGGGGSGGVLNLEEEYRLHEKPVPSSIDPSWLQLFPTVWAERAGMGLANQVPPVVVELRSGASPVAVRQYPMSKEAREGIRPHIQRFLDLGVLVPCQSPWNTPLLPVKKPGTNDYRPVQDLREINKRVQDIHPTVPNPYNLLSSLPPSHTWYSVLDLKDAFFCLKLHPNSQPLFAFEWRDPEKGNTGQLTWTRLPQGFKNSPTLFNEALHRDLAPFRALNPQVVLLQYVDDLLVAAPTYRDCKEGTQKLLQELSKLGYRVSAKKAQLCQKEVTYLGYLLKEGKRWLTPARKATVMKIPPPTTPRQVREFLGKAGFCRLFIPGFASLAAPLYPLTKPSIPFIWTEEHQKAFDRIKEALLSAPALALPDLTKPFTLYVDERAGVARGVLTQTLGPWRRPVAYLSKKLDPVASGWPTCLKAVAAVALLLKDADKLTLGQNVTVIASHSLESIVRQPPDRWMTNARMTHYQSLLLNERVSFAPPAVLNPATLLPVESEATPVHRCSEILAEETGTRRDLKDQPLPGVPAWYTDGSSFIAEGKRRAGAAIVDGKRTVWASSLPEGTSAQKAELVALTQALRLAEGKDINIYTDSRYAFATAHIHGAIYKQRGWLTSAGKDIKNKEEILALLEAIHLPKRVAIIHCPGHQKGNDPVATGNRRADEAAKQAALSTRVLAETTKPAGKRTADGSEFEKRTADGSEFESPKKKAKVE

SEQ ID NO: 6164 - protein, 2112 aa, synthetic construct
MPAAKRVKLDGGDKKYSIGLDIGTNSVGWAVITDEYKVPSKKFKVLGNTDRHSIKKNLIGALLFDSGETAEATRLKRTARRRYTRRKNRICYLQEIFSNEMAKVDDSFFHRLEESFLVEEDKKHERHPIFGNIVDEVAYHEKYPTIYHLRKKLVDSTDKADLRLIYLALAHMIKFRGHFLIEGDLNPDNSDVDKLFIQLVQTYNQLFEENPINASGVDAKAILSARLSKSRRLENLIAQLPGEKKNGLFGNLIALSLGLTPNFKSNFDLAEDAKLQLSKDTYDDDLDNLLAQIGDQYADLFLAAKNLSDAILLSDILRVNTEITKAPLSASMIKRYDEHHQDLTLLKALVRQQLPEKYKEIFFDQSKNGYAGYIDGGASQEEFYKFIKPILEKMDGTEELLVKLNREDLLRKQRTFDNGSIPHQIHLGELHAILRRQEDFYPFLKDNREKIEKILTFRIPYYVGPLARGNSRFAWMTRKSEETITPWNFEEVVDKGASAQSFIERMTNFDKNLPNEKVLPKHSLLYEYFTVYNELTKVKYVTEGMRKPAFLSGEQKKAIVDLLFKTNRKVTVKQLKEDYFKKIECFDSVEISGVEDRFNASLGTYHDLLKIIKDKDFLDNEENEDILEDIVLTLTLFEDREMIEERLKTYAHLFDDKVMKQLKRRRYTGWGRLSRKLINGIRDKQSGKTILDFLKSDGFANRNFMQLIHDDSLTFKEDIQKAQVSGQGDSLHEHIANLAGSPAIKKGILQTVKVVDELVKVMGRHKPENIVIEMARENQTTQKGQKNSRERMKRIEEGIKELGSQILKEHPVENTQLQNEKLYLYYLQNGRDMYVDQELDINRLSDYDVDHIVPQSFLKDDSIDNKVLTRSDKARGKSDNVPSEEVVKKMKNYWRQLLNAKLITQRKFDNLTKAERGGLSELDKAGFIKRQLVETRQITKHVAQILDSRMNTKYDENDKLIREVKVITLKSKLVSDFRKDFQFYKVREINNYHHAHDAYLNAVVGTALIKKYPKLESEFVYGDYKVYDVRKMIAKSEQEIGKATAKYFFYSNIMNFFKTEITLANGEIRKRPLIETNGETGEIVWDKGRDFATVRKVLSMPQVNIVKKTEVQTGGFSKESILPKRNSDKLIARKKDWDPKKYGGFDSPTVAYSVLVVAKVEKGKSKKLKSVKELLGITIMERSSFEKNPIDFLEAKGYKEVKKDLIIKLPKYSLFELENGRKRMLASAGELQKGNELALPSKYVNFLYLASHYEKLKGSPEDNEQKQLFVEQHKHYLDEIIEQISEFSKRVILADANLDKVLSAYNKHRDKPIREQAENIIHLFTLTNLGAPAAFKYFDTTIDRKRYTSTKEVLDATLIHQSITGLYETRIDLSQLGGDGGGGGGSGGGGSGGGGSGGGGSGGGGSGGTAPLEEEYRLFLEAPIQNVTLLEQWKREIPKVWAEINPPGLASTQAPIHVQLLSTALPVRVRQYPITLEAKRSLRETIRKFRAAGILRPVHSPWNTPLLPVRKSGTSEYRMVQDLREVNKRVETIHPTVPNPYTLLSLLPPDRIWYSVLDLKDAFFCIPLAPESQLIFAFEWADAEEGESGQLTWTRLPQGFKNSPTLFNEALNRDLQGFRLDHPSVSLLQYVDDLLIAADTQAACLSATRDLLMTLAELGYRVSGKKAQLCQEEVTYLGFKIHKGSRSLSNSRTQAILQIPVPKTKRQVREFLGTIGYCRLWIPGFAELAQPLYAATRPGNDPLVWGEKEEEAFQSLKLALTQPPALALPSLDKPFQLFVEETSGAAKGVLTQALGPWKRPVAYLSKRLDPVAAGWPRCLRAIAAAALLTREASKLTFGQDIEITSSHNLESLLRSPPDKWLTNARITQYQVLLLDPPRVRFKQTAALNPATLLPETDDTLPIHHCLDTLDSLTSTRPDLTDQPLAQAEATLFTDGSSYIRDGKRYAGAAVVTLDSVIWAEPLPIGTSAQKAELIALTKALEWSKDKSVNIYTDSRYAFATLHVHGMIYRERGWLTAGGKAIKNAPEILALLTAVWLPKRVAVMHCKGHQKDDAPTSTGNRRADEVAREVAIRPLSTQATISAGKRTADGSEFEKRTADGSEFESPKKKAKVE

SEQ ID NO: 6165 - protein, 2112 aa, synthetic construct
MPAAKRVKLDGGDKKYSIGLDIGTNSVGWAVITDEYKVPSKKFKVLGNTDRHSIKKNLIGALLFDSGETAEATRLKRTARRRYTRRKNRICYLQEIFSNEMAKVDDSFFHRLEESFLVEEDKKHERHPIFGNIVDEVAYHEKYPTIYHLRKKLVDSTDKADLRLIYLALAHMIKFRGHFLIEGDLNPDNSDVDKLFIQLVQTYNQLFEENPINASGVDAKAILSARLSKSRRLENLIAQLPGEKKNGLFGNLIALSLGLTPNFKSNFDLAEDAKLQLSKDTYDDDLDNLLAQIGDQYADLFLAAKNLSDAILLSDILRVNTEITKAPLSASMIKRYDEHHQDLTLLKALVRQQLPEKYKEIFFDQSKNGYAGYIDGGASQEEFYKFIKPILEKMDGTEELLVKLNREDLLRKQRTFDNGSIPHQIHLGELHAILRRQEDFYPFLKDNREKIEKILTFRIPYYVGPLARGNSRFAWMTRKSEETITPWNFEEVVDKGASAQSFIERMTNFDKNLPNEKVLPKHSLLYEYFTVYNELTKVKYVTEGMRKPAFLSGEQKKAIVDLLFKTNRKVTVKQLKEDYFKKIECFDSVEISGVEDRFNASLGTYHDLLKIIKDKDFLDNEENEDILEDIVLTLTLFEDREMIEERLKTYAHLFDDKVMKQLKRRRYTGWGRLSRKLINGIRDKQSGKTILDFLKSDGFANRNFMQLIHDDSLTFKEDIQKAQVSGQGDSLHEHIANLAGSPAIKKGILQTVKVVDELVKVMGRHKPENIVIEMARENQTTQKGQKNSRERMKRIEEGIKELGSQILKEHPVENTQLQNEKLYLYYLQNGRDMYVDQELDINRLSDYDVDHIVPQSFLKDDSIDNKVLTRSDKARGKSDNVPSEEVVKKMKNYWRQLLNAKLITQRKFDNLTKAERGGLSELDKAGFIKRQLVETRQITKHVAQILDSRMNTKYDENDKLIREVKVITLKSKLVSDFRKDFQFYKVREINNYHHAHDAYLNAVVGTALIKKYPKLESEFVYGDYKVYDVRKMIAKSEQEIGKATAKYFFYSNIMNFFKTEITLANGEIRKRPLIETNGETGEIVWDKGRDFATVRKVLSMPQVNIVKKTEVQTGGFSKESILPKRNSDKLIARKKDWDPKKYGGFDSPTVAYSVLVVAKVEKGKSKKLKSVKELLGITIMERSSFEKNPIDFLEAKGYKEVKKDLIIKLPKYSLFELENGRKRMLASAGELQKGNELALPSKYVNFLYLASHYEKLKGSPEDNEQKQLFVEQHKHYLDEIIEQISEFSKRVILADANLDKVLSAYNKHRDKPIREQAENIIHLFTLTNLGAPAAFKYFDTTIDRKRYTSTKEVLDATLIHQSITGLYETRIDLSQLGGDGGGGGGSGGGGSGGGGSGGGGSGGGGSGGTAPLEEEYRLFLEAPIQNVTLLEQWKREIPKVWAEINPPGLASTQAPIHVQLLSTALPVRVRQYPITLEAKRSLRETIRKFRAAGILRPVHSPWNTPLLPVRKSGTSEYRMVQDLREVNKRVETIHPTVPNPYTLLSLLPPDRIWYSVLDLKDAFFCIPLAPESQLIFAFEWADAEEGESGQLTWTRLPQGFKNSPTLFNEALNRDLQGFRLDHPSVSLLQYVDDLLIAADTQAACLSATRDLLMTLAELGYRVSGKKAQLCQEEVTYLGFKIHKGSRSLSNSRTQAILQIPVPKTKRQVREFLGKIGYCRLFIPGFAELAQPLYAATRPGNDPLVWGEKEEEAFQSLKLALTQPPALALPSLDKPFQLFVEETSGAAKGVLTQALGPWKRPVAYLSKRLDPVAAGWPRCLRAIAAAALLTREASKLTFGQDIEITSSHNLESLLRSPPDKWLTNARITQYQVLLLDPPRVRFKQTAALNPATLLPETDDTLPIHHCLDTLDSLTSTRPDLTDQPLAQAEATLFTDGSSYIRDGKRYAGAAVVTLDSVIWAEPLPIGTSAQKAELIALTKALEWSKDKSVNIYTDSRYAFATLHVHGMIYRERGWLTAGGKAIKNAPEILALLTAVWLPKRVAVMHCKGHQKDDAPTSTGNRRADEVAREVAIRPLSTQATISAGKRTADGSEFEKRTADGSEFESPKKKAKVE

SEQ ID NO: 6166 - protein, 2116 aa, synthetic construct
MPAAKRVKLDGGDKKYSIGLDIGTNSVGWAVITDEYKVPSKKFKVLGNTDRHSIKKNLIGALLFDSGETAEATRLKRTARRRYTRRKNRICYLQEIFSNEMAKVDDSFFHRLEESFLVEEDKKHERHPIFGNIVDEVAYHEKYPTIYHLRKKLVDSTDKADLRLIYLALAHMIKFRGHFLIEGDLNPDNSDVDKLFIQLVQTYNQLFEENPINASGVDAKAILSARLSKSRRLENLIAQLPGEKKNGLFGNLIALSLGLTPNFKSNFDLAEDAKLQLSKDTYDDDLDNLLAQIGDQYADLFLAAKNLSDAILLSDILRVNTEITKAPLSASMIKRYDEHHQDLTLLKALVRQQLPEKYKEIFFDQSKNGYAGYIDGGASQEEFYKFIKPILEKMDGTEELLVKLNREDLLRKQRTFDNGSIPHQIHLGELHAILRRQEDFYPFLKDNREKIEKILTFRIPYYVGPLARGNSRFAWMTRKSEETITPWNFEEVVDKGASAQSFIERMTNFDKNLPNEKVLPKHSLLYEYFTVYNELTKVKYVTEGMRKPAFLSGEQKKAIVDLLFKTNRKVTVKQLKEDYFKKIECFDSVEISGVEDRFNASLGTYHDLLKIIKDKDFLDNEENEDILEDIVLTLTLFEDREMIEERLKTYAHLFDDKVMKQLKRRRYTGWGRLSRKLINGIRDKQSGKTILDFLKSDGFANRNFMQLIHDDSLTFKEDIQKAQVSGQGDSLHEHIANLAGSPAIKKGILQTVKVVDELVKVMGRHKPENIVIEMARENQTTQKGQKNSRERMKRIEEGIKELGSQILKEHPVENTQLQNEKLYLYYLQNGRDMYVDQELDINRLSDYDVDHIVPQSFLKDDSIDNKVLTRSDKARGKSDNVPSEEVVKKMKNYWRQLLNAKLITQRKFDNLTKAERGGLSELDKAGFIKRQLVETRQITKHVAQILDSRMNTKYDENDKLIREVKVITLKSKLVSDFRKDFQFYKVREINNYHHAHDAYLNAVVGTALIKKYPKLESEFVYGDYKVYDVRKMIAKSEQEIGKATAKYFFYSNIMNFFKTEITLANGEIRKRPLIETNGETGEIVWDKGRDFATVRKVLSMPQVNIVKKTEVQTGGFSKESILPKRNSDKLIARKKDWDPKKYGGFDSPTVAYSVLVVAKVEKGKSKKLKSVKELLGITIMERSSFEKNPIDFLEAKGYKEVKKDLIIKLPKYSLFELENGRKRMLASAGELQKGNELALPSKYVNFLYLASHYEKLKGSPEDNEQKQLFVEQHKHYLDEIIEQISEFSKRVILADANLDKVLSAYNKHRDKPIREQAENIIHLFTLTNLGAPAAFKYFDTTIDRKRYTSTKEVLDATLIHQSITGLYETRIDLSQLGGDGGGGGGSGGGGSGGGGSGGGGSGGGGSGGTVSLQDEHRLFDIPVTTSLPDVWLQDFPQAWAETGGLGRAKCQAPIIIDLKPTAVPVSIKQYPMSLEAHMGIRQHIIKFLELGVLRPCRSPWNTPLLPVKKPGTQDYRPVQDLREINKRTVDIHPTVPNPYNLLSTLKPDYSWYTVLDLKDAFFCLPLAPQSQELFAFEWKDPERGISGQLTWTRLPQGFKNSPTLFDEALHRDLTDFRTQHPEVTLLQYVDDLLLAAPTKKACTQGTRHLLQELGEKGYRASAKKAQICQTKVTYLGYILSEGKRWLTPGRIETVARIPPPRNPREVREFLGTAGFCRLWIPGFAELAAPLYALTKESTPFTWQTEHQLAFEALKKALLSAPALGLPDTSKPFTLFLDERQGIAKGVLTQKLGPWKRPVAYLSKKLDPVAAGWPPCLRIMAATAMLVKDSAKLTLGQPLTVITPHTLEAIVRQPPDRWITNARLTHYQALLLDTDRVQFGPPVTLNPATLLPVPENQPSPHDCRQVLAETHGTREDLKDQELPDADHTWYTDGSSYLDSGTRRAGAAVVDGHNTIWAQSLPPGTSAQKAELIALTKALELSKGKKANIYTDSRYAFATAHTHGSIYERRGLLTSEGKEIKNKAEIIALLKALFLPQEVAIIHCPGHQKGQDPVAVGNRQADRVARQAAMAEVLTLATEPDNTSHITAGKRTADGSEFEKRTADGSEFESPKKKAKVE

SEQ ID NO: 6167 - protein, 2015 aa, synthetic construct
MPAAKRVKLDGGDKKYSIGLDIGTNSVGWAVITDEYKVPSKKFKVLGNTDRHSIKKNLIGALLFDSGETAEATRLKRTARRRYTRRKNRICYLQEIFSNEMAKVDDSFFHRLEESFLVEEDKKHERHPIFGNIVDEVAYHEKYPTIYHLRKKLVDSTDKADLRLIYLALAHMIKFRGHFLIEGDLNPDNSDVDKLFIQLVQTYNQLFEENPINASGVDAKAILSARLSKSRRLENLIAQLPGEKKNGLFGNLIALSLGLTPNFKSNFDLAEDAKLQLSKDTYDDDLDNLLAQIGDQYADLFLAAKNLSDAILLSDILRVNTEITKAPLSASMIKRYDEHHQDLTLLKALVRQQLPEKYKEIFFDQSKNGYAGYIDGGASQEEFYKFIKPILEKMDGTEELLVKLNREDLLRKQRTFDNGSIPHQIHLGELHAILRRQEDFYPFLKDNREKIEKILTFRIPYYVGPLARGNSRFAWMTRKSEETITPWNFEEVVDKGASAQSFIERMTNFDKNLPNEKVLPKHSLLYEYFTVYNELTKVKYVTEGMRKPAFLSGEQKKAIVDLLFKTNRKVTVKQLKEDYFKKIECFDSVEISGVEDRFNASLGTYHDLLKIIKDKDFLDNEENEDILEDIVLTLTLFEDREMIEERLKTYAHLFDDKVMKQLKRRRYTGWGRLSRKLINGIRDKQSGKTILDFLKSDGFANRNFMQLIHDDSLTFKEDIQKAQVSGQGDSLHEHIANLAGSPAIKKGILQTVKVVDELVKVMGRHKPENIVIEMARENQTTQKGQKNSRERMKRIEEGIKELGSQILKEHPVENTQLQNEKLYLYYLQNGRDMYVDQELDINRLSDYDVDHIVPQSFLKDDSIDNKVLTRSDKARGKSDNVPSEEVVKKMKNYWRQLLNAKLITQRKFDNLTKAERGGLSELDKAGFIKRQLVETRQITKHVAQILDSRMNTKYDENDKLIREVKVITLKSKLVSDFRKDFQFYKVREINNYHHAHDAYLNAVVGTALIKKYPKLESEFVYGDYKVYDVRKMIAKSEQEIGKATAKYFFYSNIMNFFKTEITLANGEIRKRPLIETNGETGEIVWDKGRDFATVRKVLSMPQVNIVKKTEVQTGGFSKESILPKRNSDKLIARKKDWDPKKYGGFDSPTVAYSVLVVAKVEKGKSKKLKSVKELLGITIMERSSFEKNPIDFLEAKGYKEVKKDLIIKLPKYSLFELENGRKRMLASAGELQKGNELALPSKYVNFLYLASHYEKLKGSPEDNEQKQLFVEQHKHYLDEIIEQISEFSKRVILADANLDKVLSAYNKHRDKPIREQAENIIHLFTLTNLGAPAAFKYFDTTIDRKRYTSTKEVLDATLIHQSITGLYETRIDLSQLGGDGGGGGGSGGGGSGGGGSGGGGSGGGGSGGGVLDAPPSHIGLEHLPPPPEVPQFPLNLERLQALQDLVHRSLEAGYISPWDGPGNNPVFPVRKPNGAWRFVHDLRVTNALTKPIPALSPGPPDLTAIPTHLPHIICLDLKDAFFQIPVEDRFRSYFAFTLPTPGGLQPHRRFAWRVLPQGFINSPALFQRALQEPLRQVSAAFSQSLLVSYMDDILYVSPTEEQRLQCYQTMAAHLRDLGFQVASEKTRQTPSPVPFLGQMVHERMVTYQSLPTLQISSPISLHQLQTVLGDLQWVSRGTPTTRRPLQLLYSSLKPIDDPRAIIHLSPEQQQGIAELRQALSHNARSRYNEQEPLLAYVHLTRAGSTLVLFQKGAQFPLAYFQTPLTDNQASPWGLLLLLGCQYLQAQALSSYAKTILKYYHNLPKTSLDNWIQSSEDPRVQELLQLWPQISSQGIQPPGPWKTLVTRAEVFLTPQFSPEPIPAALCLFSDGAARRGAYCLWKDHLLDFQAVPAPESAQKGELAGLLAGLAAAPPEPLNIWVDSKYLYSLLRTLVLGAWLQPDPVPSYALLYKSLLRHPAIFVGHVRSHSSASHPIASLNNYVDQLAGKRTADGSEFEKRTADGSEFESPKKKAKVE

SEQ ID NO: 6168 - protein, 2187 aa, synthetic construct
MPAAKRVKLDGGDKKYSIGLDIGTNSVGWAVITDEYKVPSKKFKVLGNTDRHSIKKNLIGALLFDSGETAEATRLKRTARRRYTRRKNRICYLQEIFSNEMAKVDDSFFHRLEESFLVEEDKKHERHPIFGNIVDEVAYHEKYPTIYHLRKKLVDSTDKADLRLIYLALAHMIKFRGHFLIEGDLNPDNSDVDKLFIQLVQTYNQLFEENPINASGVDAKAILSARLSKSRRLENLIAQLPGEKKNGLFGNLIALSLGLTPNFKSNFDLAEDAKLQLSKDTYDDDLDNLLAQIGDQYADLFLAAKNLSDAILLSDILRVNTEITKAPLSASMIKRYDEHHQDLTLLKALVRQQLPEKYKEIFFDQSKNGYAGYIDGGASQEEFYKFIKPILEKMDGTEELLVKLNREDLLRKQRTFDNGSIPHQIHLGELHAILRRQEDFYPFLKDNREKIEKILTFRIPYYVGPLARGNSRFAWMTRKSEETITPWNFEEVVDKGASAQSFIERMTNFDKNLPNEKVLPKHSLLYEYFTVYNELTKVKYVTEGMRKPAFLSGEQKKAIVDLLFKTNRKVTVKQLKEDYFKKIECFDSVEISGVEDRFNASLGTYHDLLKIIKDKDFLDNEENEDILEDIVLTLTLFEDREMIEERLKTYAHLFDDKVMKQLKRRRYTGWGRLSRKLINGIRDKQSGKTILDFLKSDGFANRNFMQLIHDDSLTFKEDIQKAQVSGQGDSLHEHIANLAGSPAIKKGILQTVKVVDELVKVMGRHKPENIVIEMARENQTTQKGQKNSRERMKRIEEGIKELGSQILKEHPVENTQLQNEKLYLYYLQNGRDMYVDQELDINRLSDYDVDHIVPQSFLKDDSIDNKVLTRSDKARGKSDNVPSEEVVKKMKNYWRQLLNAKLITQRKFDNLTKAERGGLSELDKAGFIKRQLVETRQITKHVAQILDSRMNTKYDENDKLIREVKVITLKSKLVSDFRKDFQFYKVREINNYHHAHDAYLNAVVGTALIKKYPKLESEFVYGDYKVYDVRKMIAKSEQEIGKATAKYFFYSNIMNFFKTEITLANGEIRKRPLIETNGETGEIVWDKGRDFATVRKVLSMPQVNIVKKTEVQTGGFSKESILPKRNSDKLIARKKDWDPKKYGGFDSPTVAYSVLVVAKVEKGKSKKLKSVKELLGITIMERSSFEKNPIDFLEAKGYKEVKKDLIIKLPKYSLFELENGRKRMLASAGELQKGNELALPSKYVNFLYLASHYEKLKGSPEDNEQKQLFVEQHKHYLDEIIEQISEFSKRVILADANLDKVLSAYNKHRDKPIREQAENIIHLFTLTNLGAPAAFKYFDTTIDRKRYTSTKEVLDATLIHQSITGLYETRIDLSQLGGDGGGGGGSGGGGSGGGGSGGGGSGGGGSGGMDLLKPLTVERKGVKIKGYWNSQADITCVPKDLLQGEEPVRQQNVTTIHGTQEGDVYYVNLKIDGRRINTEVIGTTLDYAIITPGDVPWILKKPLELTIKLDLEEQQGTLLNNSILSKKGKEELKQLFEKYSALWQSWENQVGHRRIRPHKIATGTVKPTPQKQYHINPKAKPDIQIVINDLLKQGVLIQKESTMNTPVYPVPKPNGRWRMVLDYRAVNKVTPLIAVQNQHSYGILGSLFKGRYKTTIDLSNGFWAHPIVPEDYWITAFTWQGKQYCWTVLPQGFLNSPGLFTGDVVDLLQGIPNVEVYVDDVYISHDSEKEHLEYLDILFNRLKEAGYIISLKKSNIANSIVDFLGFQITNEGRGLTDTFKEKLENITAPTTLKQLQSILGLLNFARNFIPDFTELIAPLYALIPKSTKNYVPWQIEHSTTLETLITKLNGAEYLQGRKGDKTLIMKVNASYTTGYIRYYNEGEKKPISYVSIVFSKTELKFTELEKLLTTVHKGLLKALDLSMGQNIHVYSPIVSMQNIQKTPQTAKKALASRWLSWLSYLEDPRIRFFYDPQMPALKDLPAVDTGKDNKKHPSNFQHIFYTDGSAITSPTKEGHLNAGMGIVYFINKDGNLQKQQEWSISLGNHTAQFAEIAAFEFALKKCLPLGGNILVVTDSNYVAKAYNEELDVWASNGFVNNRKKPLKHISKWKSVADLKRLRPDVVVTHEPGHQKLDSSPHAYGNNLADQLATQASFKVHAGKRTADGSEFEKRTADGSEFESPKKKAKVE

SEQ ID NO: 6169 - protein, 2101 aa, synthetic construct
MPAAKRVKLDGGDKKYSIGLDIGTNSVGWAVITDEYKVPSKKFKVLGNTDRHSIKKNLIGALLFDSGETAEATRLKRTARRRYTRRKNRICYLQEIFSNEMAKVDDSFFHRLEESFLVEEDKKHERHPIFGNIVDEVAYHEKYPTIYHLRKKLVDSTDKADLRLIYLALAHMIKFRGHFLIEGDLNPDNSDVDKLFIQLVQTYNQLFEENPINASGVDAKAILSARLSKSRRLENLIAQLPGEKKNGLFGNLIALSLGLTPNFKSNFDLAEDAKLQLSKDTYDDDLDNLLAQIGDQYADLFLAAKNLSDAILLSDILRVNTEITKAPLSASMIKRYDEHHQDLTLLKALVRQQLPEKYKEIFFDQSKNGYAGYIDGGASQEEFYKFIKPILEKMDGTEELLVKLNREDLLRKQRTFDNGSIPHQIHLGELHAILRRQEDFYPFLKDNREKIEKILTFRIPYYVGPLARGNSRFAWMTRKSEETITPWNFEEVVDKGASAQSFIERMTNFDKNLPNEKVLPKHSLLYEYFTVYNELTKVKYVTEGMRKPAFLSGEQKKAIVDLLFKTNRKVTVKQLKEDYFKKIECFDSVEISGVEDRFNASLGTYHDLLKIIKDKDFLDNEENEDILEDIVLTLTLFEDREMIEERLKTYAHLFDDKVMKQLKRRRYTGWGRLSRKLINGIRDKQSGKTILDFLKSDGFANRNFMQLIHDDSLTFKEDIQKAQVSGQGDSLHEHIANLAGSPAIKKGILQTVKVVDELVKVMGRHKPENIVIEMARENQTTQKGQKNSRERMKRIEEGIKELGSQILKEHPVENTQLQNEKLYLYYLQNGRDMYVDQELDINRLSDYDVDHIVPQSFLKDDSIDNKVLTRSDKARGKSDNVPSEEVVKKMKNYWRQLLNAKLITQRKFDNLTKAERGGLSELDKAGFIKRQLVETRQITKHVAQILDSRMNTKYDENDKLIREVKVITLKSKLVSDFRKDFQFYKVREINNYHHAHDAYLNAVVGTALIKKYPKLESEFVYGDYKVYDVRKMIAKSEQEIGKATAKYFFYSNIMNFFKTEITLANGEIRKRPLIETNGETGEIVWDKGRDFATVRKVLSMPQVNIVKKTEVQTGGFSKESILPKRNSDKLIARKKDWDPKKYGGFDSPTVAYSVLVVAKVEKGKSKKLKSVKELLGITIMERSSFEKNPIDFLEAKGYKEVKKDLIIKLPKYSLFELENGRKRMLASAGELQKGNELALPSKYVNFLYLASHYEKLKGSPEDNEQKQLFVEQHKHYLDEIIEQISEFSKRVILADANLDKVLSAYNKHRDKPIREQAENIIHLFTLTNLGAPAAFKYFDTTIDRKRYTSTKEVLDATLIHQSITGLYETRIDLSQLGGDGGGGGGSGGGGSGGGGSGGGGSGGGGSGGVPWILKKPLELTIKLDLEEQQGTLLNNSILSKKGKEELKQLFEKYSALWQSWENQVGHRRIRPHKIATGTVKPTPQKQYHINPKAKPDIQIVINDLLKQGVLIQKESTMNTPVYPVPKPNGRWRMVLDYRAVNKVTPLIAVQNQHSYGILGSLFKGRYKTTIDLSNGFWAHPIVPEDYWITAFTWQGKQYCWTVLPQGFLNSPGLFTGDVVDLLQGIPNVEVYVDDVYISHDSEKEHLEYLDILFNRLKEAGYIISLKKSNIANSIVDFLGFQITNEGRGLTDTFKEKLENITAPTTLKQLQSILGLLNFARNFIPDFTELIAPLYALIPKSTKNYVPWQIEHSTTLETLITKLNGAEYLQGRKGDKTLIMKVNASYTTGYIRYYNEGEKKPISYVSIVFSKTELKFTELEKLLTTVHKGLLKALDLSMGQNIHVYSPIVSMQNIQKTPQTAKKALASRWLSWLSYLEDPRIRFFYDPQMPALKDLPAVDTGKDNKKHPSNFQHIFYTDGSAITSPTKEGHLNAGMGIVYFINKDGNLQKQQEWSISLGNHTAQFAEIAAFEFALKKCLPLGGNILVVTDSNYVAKAYNEELDVWASNGFVNNRKKPLKHISKWKSVADLKRLRPDVVVTHEPGHQKLDSSPHAYGNNLADQLATQASFKVHAGKRTADGSEFEKRTADGSEFESPKKKAKVE

SEQ ID NO: 6170 - protein, 2101 aa, synthetic construct
MPAAKRVKLDGGDKKYSIGLDIGTNSVGWAVITDEYKVPSKKFKVLGNTDRHSIKKNLIGALLFDSGETAEATRLKRTARRRYTRRKNRICYLQEIFSNEMAKVDDSFFHRLEESFLVEEDKKHERHPIFGNIVDEVAYHEKYPTIYHLRKKLVDSTDKADLRLIYLALAHMIKFRGHFLIEGDLNPDNSDVDKLFIQLVQTYNQLFEENPINASGVDAKAILSARLSKSRRLENLIAQLPGEKKNGLFGNLIALSLGLTPNFKSNFDLAEDAKLQLSKDTYDDDLDNLLAQIGDQYADLFLAAKNLSDAILLSDILRVNTEITKAPLSASMIKRYDEHHQDLTLLKALVRQQLPEKYKEIFFDQSKNGYAGYIDGGASQEEFYKFIKPILEKMDGTEELLVKLNREDLLRKQRTFDNGSIPHQIHLGELHAILRRQEDFYPFLKDNREKIEKILTFRIPYYVGPLARGNSRFAWMTRKSEETITPWNFEEVVDKGASAQSFIERMTNFDKNLPNEKVLPKHSLLYEYFTVYNELTKVKYVTEGMRKPAFLSGEQKKAIVDLLFKTNRKVTVKQLKEDYFKKIECFDSVEISGVEDRFNASLGTYHDLLKIIKDKDFLDNEENEDILEDIVLTLTLFEDREMIEERLKTYAHLFDDKVMKQLKRRRYTGWGRLSRKLINGIRDKQSGKTILDFLKSDGFANRNFMQLIHDDSLTFKEDIQKAQVSGQGDSLHEHIANLAGSPAIKKGILQTVKVVDELVKVMGRHKPENIVIEMARENQTTQKGQKNSRERMKRIEEGIKELGSQILKEHPVENTQLQNEKLYLYYLQNGRDMYVDQELDINRLSDYDVDHIVPQSFLKDDSIDNKVLTRSDKARGKSDNVPSEEVVKKMKNYWRQLLNAKLITQRKFDNLTKAERGGLSELDKAGFIKRQLVETRQITKHVAQILDSRMNTKYDENDKLIREVKVITLKSKLVSDFRKDFQFYKVREINNYHHAHDAYLNAVVGTALIKKYPKLESEFVYGDYKVYDVRKMIAKSEQEIGKATAKYFFYSNIMNFFKTEITLANGEIRKRPLIETNGETGEIVWDKGRDFATVRKVLSMPQVNIVKKTEVQTGGFSKESILPKRNSDKLIARKKDWDPKKYGGFDSPTVAYSVLVVAKVEKGKSKKLKSVKELLGITIMERSSFEKNPIDFLEAKGYKEVKKDLIIKLPKYSLFELENGRKRMLASAGELQKGNELALPSKYVNFLYLASHYEKLKGSPEDNEQKQLFVEQHKHYLDEIIEQISEFSKRVILADANLDKVLSAYNKHRDKPIREQAENIIHLFTLTNLGAPAAFKYFDTTIDRKRYTSTKEVLDATLIHQSITGLYETRIDLSQLGGDGGGGGGSGGGGSGGGGSGGGGSGGGGSGGVPWILKKPLELTIKLDLEEQQGTLLNNSILSKKGKEELKQLFEKYSALWQSWENQVGHRRIRPHKIATGTVKPTPQKQYHINPKAKPDIQIVINDLLKQGVLIQKESTMNTPVYPVPKPNGRWRMVLDYRAVNKVTPLIAVQNQHSYGILGSLFKGRYKTTIDLSNGFWAHPIVPEDYWITAFTWQGKQYCWTVLPQGFLNSPGLFNGDVVDLLQGIPNVEVYVDDVYISHDSEKEHLEYLDILFNRLKEAGYIISLKKSNIANSIVDFLGFQITNEGRGLTDTFKEKLENITAPTTLKQLQSILGLLNFARNFIPDFTELIAPLYALIPKSPKNYVPWQIEHSTTLETLITKLNGAEYLQGRKGDKTLIMKVNASYTTGYIRYYNEGEKKPISYVSIVFSKTELKFTELEKLLTTVHKGLLKALDLSMGQNIHVYSPIVSMQNIQKTPQTAKKALASRWLSWLSYLEDPRIRFFYDPQMPALKDLPAVDTGKDNKKHPSNFQHIFYTDGSAITSPTKEGHLNAGMGIVYFINKDGNLQKQQEWSISLGNHTAQFAEIAAFEFALKKCLPLGGNILVVTDSNYVAKAYNEELDVWASNGFVNNRKKPLKHISKWKSVADLKRLRPDVVVTHEPGHQKLDSSPHAYGNNLADQLATQASFKVHAGKRTADGSEFEKRTADGSEFESPKKKAKVE

SEQ ID NO: 6171 - protein, 2109 aa, synthetic construct
MPAAKRVKLDGGDKKYSIGLDIGTNSVGWAVITDEYKVPSKKFKVLGNTDRHSIKKNLIGALLFDSGETAEATRLKRTARRRYTRRKNRICYLQEIFSNEMAKVDDSFFHRLEESFLVEEDKKHERHPIFGNIVDEVAYHEKYPTIYHLRKKLVDSTDKADLRLIYLALAHMIKFRGHFLIEGDLNPDNSDVDKLFIQLVQTYNQLFEENPINASGVDAKAILSARLSKSRRLENLIAQLPGEKKNGLFGNLIALSLGLTPNFKSNFDLAEDAKLQLSKDTYDDDLDNLLAQIGDQYADLFLAAKNLSDAILLSDILRVNTEITKAPLSASMIKRYDEHHQDLTLLKALVRQQLPEKYKEIFFDQSKNGYAGYIDGGASQEEFYKFIKPILEKMDGTEELLVKLNREDLLRKQRTFDNGSIPHQIHLGELHAILRRQEDFYPFLKDNREKIEKILTFRIPYYVGPLARGNSRFAWMTRKSEETITPWNFEEVVDKGASAQSFIERMTNFDKNLPNEKVLPKHSLLYEYFTVYNELTKVKYVTEGMRKPAFLSGEQKKAIVDLLFKTNRKVTVKQLKEDYFKKIECFDSVEISGVEDRFNASLGTYHDLLKIIKDKDFLDNEENEDILEDIVLTLTLFEDREMIEERLKTYAHLFDDKVMKQLKRRRYTGWGRLSRKLINGIRDKQSGKTILDFLKSDGFANRNFMQLIHDDSLTFKEDIQKAQVSGQGDSLHEHIANLAGSPAIKKGILQTVKVVDELVKVMGRHKPENIVIEMARENQTTQKGQKNSRERMKRIEEGIKELGSQILKEHPVENTQLQNEKLYLYYLQNGRDMYVDQELDINRLSDYDVDHIVPQSFLKDDSIDNKVLTRSDKARGKSDNVPSEEVVKKMKNYWRQLLNAKLITQRKFDNLTKAERGGLSELDKAGFIKRQLVETRQITKHVAQILDSRMNTKYDENDKLIREVKVITLKSKLVSDFRKDFQFYKVREINNYHHAHDAYLNAVVGTALIKKYPKLESEFVYGDYKVYDVRKMIAKSEQEIGKATAKYFFYSNIMNFFKTEITLANGEIRKRPLIETNGETGEIVWDKGRDFATVRKVLSMPQVNIVKKTEVQTGGFSKESILPKRNSDKLIARKKDWDPKKYGGFDSPTVAYSVLVVAKVEKGKSKKLKSVKELLGITIMERSSFEKNPIDFLEAKGYKEVKKDLIIKLPKYSLFELENGRKRMLASAGELQKGNELALPSKYVNFLYLASHYEKLKGSPEDNEQKQLFVEQHKHYLDEIIEQISEFSKRVILADANLDKVLSAYNKHRDKPIREQAENIIHLFTLTNLGAPAAFKYFDTTIDRKRYTSTKEVLDATLIHQSITGLYETRIDLSQLGGDGGGGGGSGGGGSGGGGSGGGGSGGGGSGGTLQLEEEYRLFEPESTQKQEMDIWLKNFPQAWAETGGMGTAHCQAPVLIQLKATATPISIRQYPMPHEAYQGIKPHIRRMLDQGILKPCQSPWNTPLLPVKKPGTEDYRPVQDLREVNKRVEDIHPTVPNPYNLLSTLPPSHPWYTVLDLKDAFFCLRLHSESQLLFAFEWRDPEIGLSGQLTWTRLPQGFKNSPTLFNEALHSDLADFRVRYPALVLLQYVDDLLLAAATRTECLEGTKALLETLGNKGYRASAKKAQICLQEVTYLGYSLKDGQRWLTKARKEAILSIPVPKNSRQVREFLGTAGYCRLWIPGFAELAAPLYPLTRPGTLFQWGTEQQLAFEDIKKALLSSPALGLPDITKPFELFIDENSGFAKGVLVQKLGPWKRPVAYLSKKLDTVASGWPPCLRMVAAIAILVKDAGKLTLGQPLTILTSHPVEALVRQPPNKWLSNARMTHYQAMLLDAERVHFGPTVSLNPATLLPLPSGGNHHDCLQILAETHGTRPDLTDQPLPDADLTWYTDGSSFIRNGEREAGAAVTTESEVIWAAPLPPGTSAQRAELIALTQALKMAEGKKLTVYTDSRYAFATTHVHGEIYRRRGWLTSEGKEIKNKNEILALLEALFLPKRLSIIHCPGHQKGDSPQAKGNRLADDTAKKAATETHSSLTVLPAGKRTADGSEFEKRTADGSEFESPKKKAKVE

SEQ ID NO: 6172 - protein, 2108 aa, synthetic construct
MPAAKRVKLDGGDKKYSIGLDIGTNSVGWAVITDEYKVPSKKFKVLGNTDRHSIKKNLIGALLFDSGETAEATRLKRTARRRYTRRKNRICYLQEIFSNEMAKVDDSFFHRLEESFLVEEDKKHERHPIFGNIVDEVAYHEKYPTIYHLRKKLVDSTDKADLRLIYLALAHMIKFRGHFLIEGDLNPDNSDVDKLFIQLVQTYNQLFEENPINASGVDAKAILSARLSKSRRLENLIAQLPGEKKNGLFGNLIALSLGLTPNFKSNFDLAEDAKLQLSKDTYDDDLDNLLAQIGDQYADLFLAAKNLSDAILLSDILRVNTEITKAPLSASMIKRYDEHHQDLTLLKALVRQQLPEKYKEIFFDQSKNGYAGYIDGGASQEEFYKFIKPILEKMDGTEELLVKLNREDLLRKQRTFDNGSIPHQIHLGELHAILRRQEDFYPFLKDNREKIEKILTFRIPYYVGPLARGNSRFAWMTRKSEETITPWNFEEVVDKGASAQSFIERMTNFDKNLPNEKVLPKHSLLYEYFTVYNELTKVKYVTEGMRKPAFLSGEQKKAIVDLLFKTNRKVTVKQLKEDYFKKIECFDSVEISGVEDRFNASLGTYHDLLKIIKDKDFLDNEENEDILEDIVLTLTLFEDREMIEERLKTYAHLFDDKVMKQLKRRRYTGWGRLSRKLINGIRDKQSGKTILDFLKSDGFANRNFMQLIHDDSLTFKEDIQKAQVSGQGDSLHEHIANLAGSPAIKKGILQTVKVVDELVKVMGRHKPENIVIEMARENQTTQKGQKNSRERMKRIEEGIKELGSQILKEHPVENTQLQNEKLYLYYLQNGRDMYVDQELDINRLSDYDVDHIVPQSFLKDDSIDNKVLTRSDKARGKSDNVPSEEVVKKMKNYWRQLLNAKLITQRKFDNLTKAERGGLSELDKAGFIKRQLVETRQITKHVAQILDSRMNTKYDENDKLIREVKVITLKSKLVSDFRKDFQFYKVREINNYHHAHDAYLNAVVGTALIKKYPKLESEFVYGDYKVYDVRKMIAKSEQEIGKATAKYFFYSNIMNFFKTEITLANGEIRKRPLIETNGETGEIVWDKGRDFATVRKVLSMPQVNIVKKTEVQTGGFSKESILPKRNSDKLIARKKDWDPKKYGGFDSPTVAYSVLVVAKVEKGKSKKLKSVKELLGITIMERSSFEKNPIDFLEAKGYKEVKKDLIIKLPKYSLFELENGRKRMLASAGELQKGNELALPSKYVNFLYLASHYEKLKGSPEDNEQKQLFVEQHKHYLDEIIEQISEFSKRVILADANLDKVLSAYNKHRDKPIREQAENIIHLFTLTNLGAPAAFKYFDTTIDRKRYTSTKEVLDATLIHQSITGLYETRIDLSQLGGDGGGGGGSGGGGSGGGGSGGGGSGGGGSGGVLNLEEEYRLHEKPVPSSIDPSWLQLFPTVWAERAGMGLANQVPPVVVELRSGASPVAVRQYPMSKEAREGIRPHIQKFLDLGVLVPCRSPWNTPLLPVKKPGTNDYRPVQDLREINKRVQDIHPTVPNPYNLLSSLPPSYTWYSVLDLKDAFFCLRLHPNSQPLFAFEWKDPEKGNTGQLTWTRLPQGFKNSPTLFNEALHRDLAPFRALNPQVVLLQYVDDLLVAAPTYEDCKKGTQKLLQELSKLGYRVSAKKAQLCQREVTYLGYLLKEGKRWLTPARKATVMKIPVPTTPRQVREFLGKAGFCRLFIPGFASLAAPLYPLTKPSIPFIWTEEHQQAFDHIKKALLSAPALALPDLTKPFTLYIDERAGVARGVLTQTLGPWRRPVAYLSKKLDPVASGWPTCLKAVAAVALLLKDADKLTLGQNVTVIASHSLESIVRQPPDRWMTNARMTHYQSLLLNERVSFAPPAVLNPATLLPVESEATPVHRCSEILAEETGTRRDLEDQPLPGVPTWYTDGSSFITEGKRRAGAPIVDGKRTVWASSLPEGTSAQKAELVALTQALRLAEGKNINIYTDSRYAFATAHIHGAIYKQRGWLTSAGKDIKNKEEILALLEAIHLPRRVAIIHCPGHQRGSNPVATGNRRADEAAKQAALSTRVLAGTTKPAGKRTADGSEFEKRTADGSEFESPKKKAKVE

SEQ ID NO: 6173 - protein, 2232 aa, synthetic construct
MPAAKRVKLDGGDKKYSIGLDIGTNSVGWAVITDEYKVPSKKFKVLGNTDRHSIKKNLIGALLFDSGETAEATRLKRTARRRYTRRKNRICYLQEIFSNEMAKVDDSFFHRLEESFLVEEDKKHERHPIFGNIVDEVAYHEKYPTIYHLRKKLVDSTDKADLRLIYLALAHMIKFRGHFLIEGDLNPDNSDVDKLFIQLVQTYNQLFEENPINASGVDAKAILSARLSKSRRLENLIAQLPGEKKNGLFGNLIALSLGLTPNFKSNFDLAEDAKLQLSKDTYDDDLDNLLAQIGDQYADLFLAAKNLSDAILLSDILRVNTEITKAPLSASMIKRYDEHHQDLTLLKALVRQQLPEKYKEIFFDQSKNGYAGYIDGGASQEEFYKFIKPILEKMDGTEELLVKLNREDLLRKQRTFDNGSIPHQIHLGELHAILRRQEDFYPFLKDNREKIEKILTFRIPYYVGPLARGNSRFAWMTRKSEETITPWNFEEVVDKGASAQSFIERMTNFDKNLPNEKVLPKHSLLYEYFTVYNELTKVKYVTEGMRKPAFLSGEQKKAIVDLLFKTNRKVTVKQLKEDYFKKIECFDSVEISGVEDRFNASLGTYHDLLKIIKDKDFLDNEENEDILEDIVLTLTLFEDREMIEERLKTYAHLFDDKVMKQLKRRRYTGWGRLSRKLINGIRDKQSGKTILDFLKSDGFANRNFMQLIHDDSLTFKEDIQKAQVSGQGDSLHEHIANLAGSPAIKKGILQTVKVVDELVKVMGRHKPENIVIEMARENQTTQKGQKNSRERMKRIEEGIKELGSQILKEHPVENTQLQNEKLYLYYLQNGRDMYVDQELDINRLSDYDVDHIVPQSFLKDDSIDNKVLTRSDKARGKSDNVPSEEVVKKMKNYWRQLLNAKLITQRKFDNLTKAERGGLSELDKAGFIKRQLVETRQITKHVAQILDSRMNTKYDENDKLIREVKVITLKSKLVSDFRKDFQFYKVREINNYHHAHDAYLNAVVGTALIKKYPKLESEFVYGDYKVYDVRKMIAKSEQEIGKATAKYFFYSNIMNFFKTEITLANGEIRKRPLIETNGETGEIVWDKGRDFATVRKVLSMPQVNIVKKTEVQTGGFSKESILPKRNSDKLIARKKDWDPKKYGGFDSPTVAYSVLVVAKVEKGKSKKLKSVKELLGITIMERSSFEKNPIDFLEAKGYKEVKKDLIIKLPKYSLFELENGRKRMLASAGELQKGNELALPSKYVNFLYLASHYEKLKGSPEDNEQKQLFVEQHKHYLDEIIEQISEFSKRVILADANLDKVLSAYNKHRDKPIREQAENIIHLFTLTNLGAPAAFKYFDTTIDRKRYTSTKEVLDATLIHQSITGLYETRIDLSQLGGDGGGGGGSGGGGSGGGGSGGGGSGGGGSGGTLGDQGSRGSDPLPEPRVTLTVEGIPTEFLVNTGAEHSVLTKPMGKMGSKRTVVAGATGSKVYPWTTKRLLKIGQKQVTHSFLVIPECPAPLLGRDLLTKLKAQIQFSTEGPQVTWEDRPAMCLVLNLEEEYRLHEKPVPPSIDPSWLQLFPMVWAEKAGMGLANQVPPVVVELKSDASPVAVRQYPMSKEAREGIRPHIQRFLDLGILVPCQSPWNTPLLPVKKPGTNDYRPVQDLREVNKRVQDIHPTVPNPYNLLSSLPPSHTWYSVLDLKDAFFCLKLHPNSQPLFAFEWRDPEKGNTGQLTWTRLPQGFKNSPTLFDEALHRDLASFRALNPQVVMLQYVDDLLVAAPTYRDCKEGTRRLLQELSKLGYRVSAKKAQLCREEVTYLGYLLKGGKRWLTPARKATVMKIPTPTTPRQVREFLGTAGFCRLWIPGFASLAAPLYPLTREKVPFTWTEAHQEAFGRIKEALLSAPALALPDLTKPFALYVDEKEGVARGVLTQTLGPWRRPVAYLSKKLDPVASGWPTCLKAIAAVALLLKDADKLTLGQNVLVIAPHNLESIVRQPPDRWMTNARMTHYQSLLLNERVSFAPPAILNPATLLPVESDDTPIHICSEILAEETGTRPDLRDQPLPGVPAWYTDGSSFIMDGRRQAGAAIVDNKRTVWASNLPEGTSAQKAELIALTQALRLAEGKSINIYTDSRYAFATAHVHGAIYKQRGLLTSAGKDIKNKEEILALLEAIHLPKRVAIIHCPGHQRGTDPVATGNRKADEAAKQAAQSTRILTETTKNAGKRTADGSEFEKRTADGSEFESPKKKAKVE

SEQ ID NO: 6174 - protein, 2141 aa, synthetic construct
MPAAKRVKLDGGDKKYSIGLDIGTNSVGWAVITDEYKVPSKKFKVLGNTDRHSIKKNLIGALLFDSGETAEATRLKRTARRRYTRRKNRICYLQEIFSNEMAKVDDSFFHRLEESFLVEEDKKHERHPIFGNIVDEVAYHEKYPTIYHLRKKLVDSTDKADLRLIYLALAHMIKFRGHFLIEGDLNPDNSDVDKLFIQLVQTYNQLFEENPINASGVDAKAILSARLSKSRRLENLIAQLPGEKKNGLFGNLIALSLGLTPNFKSNFDLAEDAKLQLSKDTYDDDLDNLLAQIGDQYADLFLAAKNLSDAILLSDILRVNTEITKAPLSASMIKRYDEHHQDLTLLKALVRQQLPEKYKEIFFDQSKNGYAGYIDGGASQEEFYKFIKPILEKMDGTEELLVKLNREDLLRKQRTFDNGSIPHQIHLGELHAILRRQEDFYPFLKDNREKIEKILTFRIPYYVGPLARGNSRFAWMTRKSEETITPWNFEEVVDKGASAQSFIERMTNFDKNLPNEKVLPKHSLLYEYFTVYNELTKVKYVTEGMRKPAFLSGEQKKAIVDLLFKTNRKVTVKQLKEDYFKKIECFDSVEISGVEDRFNASLGTYHDLLKIIKDKDFLDNEENEDILEDIVLTLTLFEDREMIEERLKTYAHLFDDKVMKQLKRRRYTGWGRLSRKLINGIRDKQSGKTILDFLKSDGFANRNFMQLIHDDSLTFKEDIQKAQVSGQGDSLHEHIANLAGSPAIKKGILQTVKVVDELVKVMGRHKPENIVIEMARENQTTQKGQKNSRERMKRIEEGIKELGSQILKEHPVENTQLQNEKLYLYYLQNGRDMYVDQELDINRLSDYDVDHIVPQSFLKDDSIDNKVLTRSDKARGKSDNVPSEEVVKKMKNYWRQLLNAKLITQRKFDNLTKAERGGLSELDKAGFIKRQLVETRQITKHVAQILDSRMNTKYDENDKLIREVKVITLKSKLVSDFRKDFQFYKVREINNYHHAHDAYLNAVVGTALIKKYPKLESEFVYGDYKVYDVRKMIAKSEQEIGKATAKYFFYSNIMNFFKTEITLANGEIRKRPLIETNGETGEIVWDKGRDFATVRKVLSMPQVNIVKKTEVQTGGFSKESILPKRNSDKLIARKKDWDPKKYGGFDSPTVAYSVLVVAKVEKGKSKKLKSVKELLGITIMERSSFEKNPIDFLEAKGYKEVKKDLIIKLPKYSLFELENGRKRMLASAGELQKGNELALPSKYVNFLYLASHYEKLKGSPEDNEQKQLFVEQHKHYLDEIIEQISEFSKRVILADANLDKVLSAYNKHRDKPIREQAENIIHLFTLTNLGAPAAFKYFDTTIDRKRYTSTKEVLDATLIHQSITGLYETRIDLSQLGGDGGGGGGSGGGGSGGGGSGGGGSGGGGSGGLLGRDLLTKLKAQIQFSTEGPQVTWEDRPAMCLVLNLEEEYRLHEKPVPPSIDPSWLQLFPMVWAEKAGMGLANQVPPVVVELKSDASPVAVRQYPMSKEAREGIRPHIQRFLDLGILVPCQSPWNTPLLPVKKPGTNDYRPVQDLREVNKRVQDIHPTVPNPYNLLSSLPPSHTWYSVLDLKDAFFCLKLHPNSQPLFAFEWRDPEKGNTGQLTWTRLPQGFKNSPTLFDEALHRDLASFRALNPQVVMLQYVDDLLVAAPTYRDCKEGTRRLLQELSKLGYRVSAKKAQLCREEVTYLGYLLKGGKRWLTPARKATVMKIPTPTTPRQVREFLGTAGFCRLWIPGFASLAAPLYPLTREKVPFTWTEAHQEAFGRIKEALLSAPALALPDLTKPFALYVDEKEGVARGVLTQTLGPWRRPVAYLSKKLDPVASGWPTCLKAIAAVALLLKDADKLTLGQNVLVIAPHNLESIVRQPPDRWMTNARMTHYQSLLLNERVSFAPPAILNPATLLPVESDDTPIHICSEILAEETGTRPDLRDQPLPGVPAWYTDGSSFIMDGRRQAGAAIVDNKRTVWASNLPEGTSAQKAELIALTQALRLAEGKSINIYTDSRYAFATAHVHGAIYKQRGLLTSAGKDIKNKEEILALLEAIHLPKRVAIIHCPGHQRGTDPVATGNRKADEAAKQAAQSTRILTETTKNAGKRTADGSEFEKRTADGSEFESPKKKAKVE

SEQ ID NO: 6175 - protein, 2141 aa, synthetic construct
MPAAKRVKLDGGDKKYSIGLDIGTNSVGWAVITDEYKVPSKKFKVLGNTDRHSIKKNLIGALLFDSGETAEATRLKRTARRRYTRRKNRICYLQEIFSNEMAKVDDSFFHRLEESFLVEEDKKHERHPIFGNIVDEVAYHEKYPTIYHLRKKLVDSTDKADLRLIYLALAHMIKFRGHFLIEGDLNPDNSDVDKLFIQLVQTYNQLFEENPINASGVDAKAILSARLSKSRRLENLIAQLPGEKKNGLFGNLIALSLGLTPNFKSNFDLAEDAKLQLSKDTYDDDLDNLLAQIGDQYADLFLAAKNLSDAILLSDILRVNTEITKAPLSASMIKRYDEHHQDLTLLKALVRQQLPEKYKEIFFDQSKNGYAGYIDGGASQEEFYKFIKPILEKMDGTEELLVKLNREDLLRKQRTFDNGSIPHQIHLGELHAILRRQEDFYPFLKDNREKIEKILTFRIPYYVGPLARGNSRFAWMTRKSEETITPWNFEEVVDKGASAQSFIERMTNFDKNLPNEKVLPKHSLLYEYFTVYNELTKVKYVTEGMRKPAFLSGEQKKAIVDLLFKTNRKVTVKQLKEDYFKKIECFDSVEISGVEDRFNASLGTYHDLLKIIKDKDFLDNEENEDILEDIVLTLTLFEDREMIEERLKTYAHLFDDKVMKQLKRRRYTGWGRLSRKLINGIRDKQSGKTILDFLKSDGFANRNFMQLIHDDSLTFKEDIQKAQVSGQGDSLHEHIANLAGSPAIKKGILQTVKVVDELVKVMGRHKPENIVIEMARENQTTQKGQKNSRERMKRIEEGIKELGSQILKEHPVENTQLQNEKLYLYYLQNGRDMYVDQELDINRLSDYDVDHIVPQSFLKDDSIDNKVLTRSDKARGKSDNVPSEEVVKKMKNYWRQLLNAKLITQRKFDNLTKAERGGLSELDKAGFIKRQLVETRQITKHVAQILDSRMNTKYDENDKLIREVKVITLKSKLVSDFRKDFQFYKVREINNYHHAHDAYLNAVVGTALIKKYPKLESEFVYGDYKVYDVRKMIAKSEQEIGKATAKYFFYSNIMNFFKTEITLANGEIRKRPLIETNGETGEIVWDKGRDFATVRKVLSMPQVNIVKKTEVQTGGFSKESILPKRNSDKLIARKKDWDPKKYGGFDSPTVAYSVLVVAKVEKGKSKKLKSVKELLGITIMERSSFEKNPIDFLEAKGYKEVKKDLIIKLPKYSLFELENGRKRMLASAGELQKGNELALPSKYVNFLYLASHYEKLKGSPEDNEQKQLFVEQHKHYLDEIIEQISEFSKRVILADANLDKVLSAYNKHRDKPIREQAENIIHLFTLTNLGAPAAFKYFDTTIDRKRYTSTKEVLDATLIHQSITGLYETRIDLSQLGGDGGGGGGSGGGGSGGGGSGGGGSGGGGSGGLLGRDLLTKLKAQIQFSTEGPQVTWEDRPAMCLVLNLEEEYRLHEKPVPPSIDPSWLQLFPMVWAEKAGMGLANQVPPVVVELKSDASPVAVRQYPMSKEAREGIRPHIQRFLDLGILVPCQSPWNTPLLPVKKPGTNDYRPVQDLREVNKRVQDIHPTVPNPYNLLSSLPPSHTWYSVLDLKDAFFCLKLHPNSQPLFAFEWRDPEKGNTGQLTWTRLPQGFKNSPTLFNEALHRDLASFRALNPQVVMLQYVDDLLVAAPTYRDCKEGTRRLLQELSKLGYRVSAKKAQLCREEVTYLGYLLKGGKRWLTPARKATVMKIPTPTTPRQVREFLGTAGFCRLWIPGFASLAAPLYPLTRPKVPFTWTEAHQEAFGRIKEALLSAPALALPDLTKPFALYVDEKEGVARGVLTQTLGPWRRPVAYLSKKLDPVASGWPTCLKAIAAVALLLKDADKLTLGQNVLVIAPHNLESIVRQPPDRWMTNARMTHYQSLLLNERVSFAPPAILNPATLLPVESDDTPIHICSEILAEETGTRPDLRDQPLPGVPAWYTDGSSFIMDGRRQAGAAIVDNKRTVWASNLPEGTSAQKAELIALTQALRLAEGKSINIYTDSRYAFATAHVHGAIYKQRGWLTSAGKDIKNKEEILALLEAIHLPKRVAIIHCPGHQRGTDPVATGNRKADEAAKQAAQSTRILTETTKNAGKRTADGSEFEKRTADGSEFESPKKKAKVE

SEQ ID NO: 6176 - protein, 2141 aa, synthetic construct
MPAAKRVKLDGGDKKYSIGLDIGTNSVGWAVITDEYKVPSKKFKVLGNTDRHSIKKNLIGALLFDSGETAEATRLKRTARRRYTRRKNRICYLQEIFSNEMAKVDDSFFHRLEESFLVEEDKKHERHPIFGNIVDEVAYHEKYPTIYHLRKKLVDSTDKADLRLIYLALAHMIKFRGHFLIEGDLNPDNSDVDKLFIQLVQTYNQLFEENPINASGVDAKAILSARLSKSRRLENLIAQLPGEKKNGLFGNLIALSLGLTPNFKSNFDLAEDAKLQLSKDTYDDDLDNLLAQIGDQYADLFLAAKNLSDAILLSDILRVNTEITKAPLSASMIKRYDEHHQDLTLLKALVRQQLPEKYKEIFFDQSKNGYAGYIDGGASQEEFYKFIKPILEKMDGTEELLVKLNREDLLRKQRTFDNGSIPHQIHLGELHAILRRQEDFYPFLKDNREKIEKILTFRIPYYVGPLARGNSRFAWMTRKSEETITPWNFEEVVDKGASAQSFIERMTNFDKNLPNEKVLPKHSLLYEYFTVYNELTKVKYVTEGMRKPAFLSGEQKKAIVDLLFKTNRKVTVKQLKEDYFKKIECFDSVEISGVEDRFNASLGTYHDLLKIIKDKDFLDNEENEDILEDIVLTLTLFEDREMIEERLKTYAHLFDDKVMKQLKRRRYTGWGRLSRKLINGIRDKQSGKTILDFLKSDGFANRNFMQLIHDDSLTFKEDIQKAQVSGQGDSLHEHIANLAGSPAIKKGILQTVKVVDELVKVMGRHKPENIVIEMARENQTTQKGQKNSRERMKRIEEGIKELGSQILKEHPVENTQLQNEKLYLYYLQNGRDMYVDQELDINRLSDYDVDHIVPQSFLKDDSIDNKVLTRSDKARGKSDNVPSEEVVKKMKNYWRQLLNAKLITQRKFDNLTKAERGGLSELDKAGFIKRQLVETRQITKHVAQILDSRMNTKYDENDKLIREVKVITLKSKLVSDFRKDFQFYKVREINNYHHAHDAYLNAVVGTALIKKYPKLESEFVYGDYKVYDVRKMIAKSEQEIGKATAKYFFYSNIMNFFKTEITLANGEIRKRPLIETNGETGEIVWDKGRDFATVRKVLSMPQVNIVKKTEVQTGGFSKESILPKRNSDKLIARKKDWDPKKYGGFDSPTVAYSVLVVAKVEKGKSKKLKSVKELLGITIMERSSFEKNPIDFLEAKGYKEVKKDLIIKLPKYSLFELENGRKRMLASAGELQKGNELALPSKYVNFLYLASHYEKLKGSPEDNEQKQLFVEQHKHYLDEIIEQISEFSKRVILADANLDKVLSAYNKHRDKPIREQAENIIHLFTLTNLGAPAAFKYFDTTIDRKRYTSTKEVLDATLIHQSITGLYETRIDLSQLGGDGGGGGGSGGGGSGGGGSGGGGSGGGGSGGLLGRDLLTKLKAQIQFSTEGPQVTWEDRPAMCLVLNLEEEYRLHEKPVPPSIDPSWLQLFPMVWAEKAGMGLANQVPPVVVELKSDASPVAVRQYPMSKEAREGIRPHIQRFLDLGILVPCQSPWNTPLLPVKKPGTNDYRPVQDLREVNKRVQDIHPTVPNPYNLLSSLPPSHTWYSVLDLKDAFFCLKLHPNSQPLFAFEWRDPEKGNTGQLTWTRLPQGFKNSPTLFNEALHRDLASFRALNPQVVMLQYVDDLLVAAPTYRDCKEGTRRLLQELSKLGYRVSAKKAQLCREEVTYLGYLLKGGKRWLTPARKATVMKIPTPTTPRQVREFLGKAGFCRLFIPGFASLAAPLYPLTRPKVPFTWTEAHQEAFGRIKEALLSAPALALPDLTKPFALYVDEKEGVARGVLTQTLGPWRRPVAYLSKKLDPVASGWPTCLKAIAAVALLLKDADKLTLGQNVLVIAPHNLESIVRQPPDRWMTNARMTHYQSLLLNERVSFAPPAILNPATLLPVESDDTPIHICSEILAEETGTRPDLRDQPLPGVPAWYTDGSSFIMDGRRQAGAAIVDNKRTVWASNLPEGTSAQKAELIALTQALRLAEGKSINIYTDSRYAFATAHVHGAIYKQRGWLTSAGKDIKNKEEILALLEAIHLPKRVAIIHCPGHQRGTDPVATGNRKADEAAKQAAQSTRILTETTKNAGKRTADGSEFEKRTADGSEFESPKKKAKVE

SEQ ID NO: 6177 - protein, 2232 aa, synthetic construct
MPAAKRVKLDGGDKKYSIGLDIGTNSVGWAVITDEYKVPSKKFKVLGNTDRHSIKKNLIGALLFDSGETAEATRLKRTARRRYTRRKNRICYLQEIFSNEMAKVDDSFFHRLEESFLVEEDKKHERHPIFGNIVDEVAYHEKYPTIYHLRKKLVDSTDKADLRLIYLALAHMIKFRGHFLIEGDLNPDNSDVDKLFIQLVQTYNQLFEENPINASGVDAKAILSARLSKSRRLENLIAQLPGEKKNGLFGNLIALSLGLTPNFKSNFDLAEDAKLQLSKDTYDDDLDNLLAQIGDQYADLFLAAKNLSDAILLSDILRVNTEITKAPLSASMIKRYDEHHQDLTLLKALVRQQLPEKYKEIFFDQSKNGYAGYIDGGASQEEFYKFIKPILEKMDGTEELLVKLNREDLLRKQRTFDNGSIPHQIHLGELHAILRRQEDFYPFLKDNREKIEKILTFRIPYYVGPLARGNSRFAWMTRKSEETITPWNFEEVVDKGASAQSFIERMTNFDKNLPNEKVLPKHSLLYEYFTVYNELTKVKYVTEGMRKPAFLSGEQKKAIVDLLFKTNRKVTVKQLKEDYFKKIECFDSVEISGVEDRFNASLGTYHDLLKIIKDKDFLDNEENEDILEDIVLTLTLFEDREMIEERLKTYAHLFDDKVMKQLKRRRYTGWGRLSRKLINGIRDKQSGKTILDFLKSDGFANRNFMQLIHDDSLTFKEDIQKAQVSGQGDSLHEHIANLAGSPAIKKGILQTVKVVDELVKVMGRHKPENIVIEMARENQTTQKGQKNSRERMKRIEEGIKELGSQILKEHPVENTQLQNEKLYLYYLQNGRDMYVDQELDINRLSDYDVDHIVPQSFLKDDSIDNKVLTRSDKARGKSDNVPSEEVVKKMKNYWRQLLNAKLITQRKFDNLTKAERGGLSELDKAGFIKRQLVETRQITKHVAQILDSRMNTKYDENDKLIREVKVITLKSKLVSDFRKDFQFYKVREINNYHHAHDAYLNAVVGTALIKKYPKLESEFVYGDYKVYDVRKMIAKSEQEIGKATAKYFFYSNIMNFFKTEITLANGEIRKRPLIETNGETGEIVWDKGRDFATVRKVLSMPQVNIVKKTEVQTGGFSKESILPKRNSDKLIARKKDWDPKKYGGFDSPTVAYSVLVVAKVEKGKSKKLKSVKELLGITIMERSSFEKNPIDFLEAKGYKEVKKDLIIKLPKYSLFELENGRKRMLASAGELQKGNELALPSKYVNFLYLASHYEKLKGSPEDNEQKQLFVEQHKHYLDEIIEQISEFSKRVILADANLDKVLSAYNKHRDKPIREQAENIIHLFTLTNLGAPAAFKYFDTTIDRKRYTSTKEVLDATLIHQSITGLYETRIDLSQLGGDGGGGGGSGGGGSGGGGSGGGGSGGGGSGGTLGDQGSRGSDPLPEPRVTLTVEGIPTEFLVNTGAEHSVLTKPMGKMGSKRTVVAGATGSKVYPWTTKRLLKIGQKQVTHSFLVIPECPAPLLGRDLLTKLKAQIQFSTEGPQVTWEDRPAMCLVLNLEEEYRLHEKPVPPSIDPSWLQLFPMVWAEKAGMGLANQVPPVVVELKSDASPVAVRQYPMSKEAREGIRPHIQRFLDLGILVPCQSPWNTPLLPVKKPGTNDYRPVQDLREVNKRVQDIHPTVPNPYNLLSSLPPSHTWYSVLDLKDAFFCLKLHPNSQPLFAFEWRDPEKGNTGQLTWTRLPQGFKNSPTLFNEALHRDLASFRALNPQVVMLQYVDDLLVAAPTYRDCKEGTRRLLQELSKLGYRVSAKKAQLCREEVTYLGYLLKGGKRWLTPARKATVMKIPTPTTPRQVREFLGTAGFCRLWIPGFASLAAPLYPLTRPKVPFTWTEAHQEAFGRIKEALLSAPALALPDLTKPFALYVDEKEGVARGVLTQTLGPWRRPVAYLSKKLDPVASGWPTCLKAIAAVALLLKDADKLTLGQNVLVIAPHNLESIVRQPPDRWMTNARMTHYQSLLLNERVSFAPPAILNPATLLPVESDDTPIHICSEILAEETGTRPDLRDQPLPGVPAWYTDGSSFIMDGRRQAGAAIVDNKRTVWASNLPEGTSAQKAELIALTQALRLAEGKSINIYTDSRYAFATAHVHGAIYKQRGWLTSAGKDIKNKEEILALLEAIHLPKRVAIIHCPGHQRGTDPVATGNRKADEAAKQAAQSTRILTETTKNAGKRTADGSEFEKRTADGSEFESPKKKAKVE

SEQ ID NO: 6178 - protein, 2110 aa, synthetic construct
MPAAKRVKLDGGDKKYSIGLDIGTNSVGWAVITDEYKVPSKKFKVLGNTDRHSIKKNLIGALLFDSGETAEATRLKRTARRRYTRRKNRICYLQEIFSNEMAKVDDSFFHRLEESFLVEEDKKHERHPIFGNIVDEVAYHEKYPTIYHLRKKLVDSTDKADLRLIYLALAHMIKFRGHFLIEGDLNPDNSDVDKLFIQLVQTYNQLFEENPINASGVDAKAILSARLSKSRRLENLIAQLPGEKKNGLFGNLIALSLGLTPNFKSNFDLAEDAKLQLSKDTYDDDLDNLLAQIGDQYADLFLAAKNLSDAILLSDILRVNTEITKAPLSASMIKRYDEHHQDLTLLKALVRQQLPEKYKEIFFDQSKNGYAGYIDGGASQEEFYKFIKPILEKMDGTEELLVKLNREDLLRKQRTFDNGSIPHQIHLGELHAILRRQEDFYPFLKDNREKIEKILTFRIPYYVGPLARGNSRFAWMTRKSEETITPWNFEEVVDKGASAQSFIERMTNFDKNLPNEKVLPKHSLLYEYFTVYNELTKVKYVTEGMRKPAFLSGEQKKAIVDLLFKTNRKVTVKQLKEDYFKKIECFDSVEISGVEDRFNASLGTYHDLLKIIKDKDFLDNEENEDILEDIVLTLTLFEDREMIEERLKTYAHLFDDKVMKQLKRRRYTGWGRLSRKLINGIRDKQSGKTILDFLKSDGFANRNFMQLIHDDSLTFKEDIQKAQVSGQGDSLHEHIANLAGSPAIKKGILQTVKVVDELVKVMGRHKPENIVIEMARENQTTQKGQKNSRERMKRIEEGIKELGSQILKEHPVENTQLQNEKLYLYYLQNGRDMYVDQELDINRLSDYDVDHIVPQSFLKDDSIDNKVLTRSDKARGKSDNVPSEEVVKKMKNYWRQLLNAKLITQRKFDNLTKAERGGLSELDKAGFIKRQLVETRQITKHVAQILDSRMNTKYDENDKLIREVKVITLKSKLVSDFRKDFQFYKVREINNYHHAHDAYLNAVVGTALIKKYPKLESEFVYGDYKVYDVRKMIAKSEQEIGKATAKYFFYSNIMNFFKTEITLANGEIRKRPLIETNGETGEIVWDKGRDFATVRKVLSMPQVNIVKKTEVQTGGFSKESILPKRNSDKLIARKKDWDPKKYGGFDSPTVAYSVLVVAKVEKGKSKKLKSVKELLGITIMERSSFEKNPIDFLEAKGYKEVKKDLIIKLPKYSLFELENGRKRMLASAGELQKGNELALPSKYVNFLYLASHYEKLKGSPEDNEQKQLFVEQHKHYLDEIIEQISEFSKRVILADANLDKVLSAYNKHRDKPIREQAENIIHLFTLTNLGAPAAFKYFDTTIDRKRYTSTKEVLDATLIHQSITGLYETRIDLSQLGGDGGGGGGSGGGGSGGGGSGGGGSGGGGSGGTLNLEDEYRLYETSAEPEVSPGSTWLSDFPQAWAETGGMGLAVRQAPLIIPLKATSTPVSIKQYPMSQEAKLGIKPHIQRLLDQGILVPCQSPWNTPLLPVKKPGTNDYRPVQDLREVNKRVEDIHPTVPNPYNLLSGLPPSHRWYTVLDLKDAFFCLRLHPTSQPLFAFEWRDPGMGISGQLTWTRLPQGFKNSPTLFNEALHRDLADFRIQHPDLILLQYVDDILLAATSELDCQQGTRALLLTLGNLGYRASAKKAQLCQKQVKYLGYLLKEGQRWLTEARKETVMGQPTPKTPRQLREFLGKAGFCRLFIPGFAEMAAPLYPLTKPGTLFNWGPDQQKAYQEIKQALLTAPALGLPDLTKPFELFVDEKQGYAKGVLTQKLGPWRRPVAYLSKKLDPVAAGWPPCLRMVAAIAVLRKDAGKLTMGQPLVILAPHAVEALVKQPPDRWLSNARMTHYQAMLLDTDRVQFGPVVALNPATLLPLPEEGAPHDCLEILAETHGTRPDLTDQPIPDADHTWYTDGSSFLQEGQRKAGAAVTTETEVIWARALPAGTSAQRAELIALTQALKMAEGKRLNVYTDSRYAFATAHIHGEIYRRRGWLTSEGREIKNKSEILALLKALFLPKRLSIIHCLGHQKGDSAEARGNRLADQAAREAAIKTPPDTSTLLAGKRTADGSEFEKRTADGSEFESPKKKAKVE

SEQ ID NO: 6179 - protein, 2110 aa, synthetic construct
MPAAKRVKLDGGDKKYSIGLDIGTNSVGWAVITDEYKVPSKKFKVLGNTDRHSIKKNLIGALLFDSGETAEATRLKRTARRRYTRRKNRICYLQEIFSNEMAKVDDSFFHRLEESFLVEEDKKHERHPIFGNIVDEVAYHEKYPTIYHLRKKLVDSTDKADLRLIYLALAHMIKFRGHFLIEGDLNPDNSDVDKLFIQLVQTYNQLFEENPINASGVDAKAILSARLSKSRRLENLIAQLPGEKKNGLFGNLIALSLGLTPNFKSNFDLAEDAKLQLSKDTYDDDLDNLLAQIGDQYADLFLAAKNLSDAILLSDILRVNTEITKAPLSASMIKRYDEHHQDLTLLKALVRQQLPEKYKEIFFDQSKNGYAGYIDGGASQEEFYKFIKPILEKMDGTEELLVKLNREDLLRKQRTFDNGSIPHQIHLGELHAILRRQEDFYPFLKDNREKIEKILTFRIPYYVGPLARGNSRFAWMTRKSEETITPWNFEEVVDKGASAQSFIERMTNFDKNLPNEKVLPKHSLLYEYFTVYNELTKVKYVTEGMRKPAFLSGEQKKAIVDLLFKTNRKVTVKQLKEDYFKKIECFDSVEISGVEDRFNASLGTYHDLLKIIKDKDFLDNEENEDILEDIVLTLTLFEDREMIEERLKTYAHLFDDKVMKQLKRRRYTGWGRLSRKLINGIRDKQSGKTILDFLKSDGFANRNFMQLIHDDSLTFKEDIQKAQVSGQGDSLHEHIANLAGSPAIKKGILQTVKVVDELVKVMGRHKPENIVIEMARENQTTQKGQKNSRERMKRIEEGIKELGSQILKEHPVENTQLQNEKLYLYYLQNGRDMYVDQELDINRLSDYDVDHIVPQSFLKDDSIDNKVLTRSDKARGKSDNVPSEEVVKKMKNYWRQLLNAKLITQRKFDNLTKAERGGLSELDKAGFIKRQLVETRQITKHVAQILDSRMNTKYDENDKLIREVKVITLKSKLVSDFRKDFQFYKVREINNYHHAHDAYLNAVVGTALIKKYPKLESEFVYGDYKVYDVRKMIAKSEQEIGKATAKYFFYSNIMNFFKTEITLANGEIRKRPLIETNGETGEIVWDKGRDFATVRKVLSMPQVNIVKKTEVQTGGFSKESILPKRNSDKLIARKKDWDPKKYGGFDSPTVAYSVLVVAKVEKGKSKKLKSVKELLGITIMERSSFEKNPIDFLEAKGYKEVKKDLIIKLPKYSLFELENGRKRMLASAGELQKGNELALPSKYVNFLYLASHYEKLKGSPEDNEQKQLFVEQHKHYLDEIIEQISEFSKRVILADANLDKVLSAYNKHRDKPIREQAENIIHLFTLTNLGAPAAFKYFDTTIDRKRYTSTKEVLDATLIHQSITGLYETRIDLSQLGGDGGGGGGSGGGGSGGGGSGGGGSGGGGSGGTLNIEDEYRLHETSKGPDVPLGSTWLSDFPQAWAETGGMGLAFRQAPLIISLKATSTPVSIKQYPMSQEARLGIKPHIQRLLDQGILVPCQSPWNTPLLPVKKPGTNDYRPVQDLREVNKRVEDIHPTVPNPYNLLSGLPPSHQWYTVLDLKDAFFCLRLHPTSQSLFAFEWKDPEMGISGQLTWTRLPQGFKNSPTLFNEALHRDLADFRIQHPDLILLQYVDDLLLAATSELDCQQGTRALLQTLGDLGYRASAKKAQICQKQVKYLGYLLKEGQRWLTEARKETVMGQPTPKTPRQLREFLGTAGLCRLWIPGFAEMAAPLYPLTKPGTLFKWGPDQQKAYQEIKQALLTAPALGLPDLTKPFELFVDEKQGYAKGVLTQKLGPWRRPVAYLSKKLDPVAAGWPPCLRMVAAIAVLTKDVGKLTMGQPLVILAPHAVEALVKQPPDRWLSNARMTHYQALLLDTDRVQFGPIVALNPATLLPLPEEGLQHDCLDILAEAHGTRPDLTDQPLPDADHTWYTDGSSFLQEGQRRAGAAVTTETEVIWAKALPAGTSAQRAELIALTQALKMAAGKKLNVYTDSRYAFATAHIHGEIYRRRGWLTSEGKEIKNKDEILALLKALFLPKRLSIIHCPGHQKGNHAEARGNRMADQAAREVATRETPETSTLLAGKRTADGSEFEKRTADGSEFESPKKKAKVE

SEQ ID NO: 6180 - protein, 2110 aa, synthetic construct
MPAAKRVKLDGGDKKYSIGLDIGTNSVGWAVITDEYKVPSKKFKVLGNTDRHSIKKNLIGALLFDSGETAEATRLKRTARRRYTRRKNRICYLQEIFSNEMAKVDDSFFHRLEESFLVEEDKKHERHPIFGNIVDEVAYHEKYPTIYHLRKKLVDSTDKADLRLIYLALAHMIKFRGHFLIEGDLNPDNSDVDKLFIQLVQTYNQLFEENPINASGVDAKAILSARLSKSRRLENLIAQLPGEKKNGLFGNLIALSLGLTPNFKSNFDLAEDAKLQLSKDTYDDDLDNLLAQIGDQYADLFLAAKNLSDAILLSDILRVNTEITKAPLSASMIKRYDEHHQDLTLLKALVRQQLPEKYKEIFFDQSKNGYAGYIDGGASQEEFYKFIKPILEKMDGTEELLVKLNREDLLRKQRTFDNGSIPHQIHLGELHAILRRQEDFYPFLKDNREKIEKILTFRIPYYVGPLARGNSRFAWMTRKSEETITPWNFEEVVDKGASAQSFIERMTNFDKNLPNEKVLPKHSLLYEYFTVYNELTKVKYVTEGMRKPAFLSGEQKKAIVDLLFKTNRKVTVKQLKEDYFKKIECFDSVEISGVEDRFNASLGTYHDLLKIIKDKDFLDNEENEDILEDIVLTLTLFEDREMIEERLKTYAHLFDDKVMKQLKRRRYTGWGRLSRKLINGIRDKQSGKTILDFLKSDGFANRNFMQLIHDDSLTFKEDIQKAQVSGQGDSLHEHIANLAGSPAIKKGILQTVKVVDELVKVMGRHKPENIVIEMARENQTTQKGQKNSRERMKRIEEGIKELGSQILKEHPVENTQLQNEKLYLYYLQNGRDMYVDQELDINRLSDYDVDHIVPQSFLKDDSIDNKVLTRSDKARGKSDNVPSEEVVKKMKNYWRQLLNAKLITQRKFDNLTKAERGGLSELDKAGFIKRQLVETRQITKHVAQILDSRMNTKYDENDKLIREVKVITLKSKLVSDFRKDFQFYKVREINNYHHAHDAYLNAVVGTALIKKYPKLESEFVYGDYKVYDVRKMIAKSEQEIGKATAKYFFYSNIMNFFKTEITLANGEIRKRPLIETNGETGEIVWDKGRDFATVRKVLSMPQVNIVKKTEVQTGGFSKESILPKRNSDKLIARKKDWDPKKYGGFDSPTVAYSVLVVAKVEKGKSKKLKSVKELLGITIMERSSFEKNPIDFLEAKGYKEVKKDLIIKLPKYSLFELENGRKRMLASAGELQKGNELALPSKYVNFLYLASHYEKLKGSPEDNEQKQLFVEQHKHYLDEIIEQISEFSKRVILADANLDKVLSAYNKHRDKPIREQAENIIHLFTLTNLGAPAAFKYFDTTIDRKRYTSTKEVLDATLIHQSITGLYETRIDLSQLGGDGGGGGGSGGGGSGGGGSGGGGSGGGGSGGTLNIEDEHRLHETSKEPDVSLGSTWLSDFPQAWAETGGMGLAVRQAPLIIPLKATSTPVSIKQYPMSQEARLGIKPHIQRLLDQGILVPCQSPWNTPLLPVKKPGTNDYRPVQDLREVNKRVEDIHPTVPNPYNLLSGLPPSHQWYTVLDLKDAFFCLRLHPTSQPLFAFEWRDPEMGISGQLTWTRLPQGFKNSPTLFNEALHRDLADFRIQHPDLILLQYVDDLLLAATSELDCQQGTRALLQTLGNLGYRASAKKAQICQKQVKYLGYLLKEGQRWLTEARKETVMGQPTPKTPRQLREFLGTAGFCRLWIPGFAEMAAPLYPLTKPGTLFNWGPDQQKAYQEIKQALLTAPALGLPDLTKPFELFVDEKQGYAKGVLTQKLGPWRRPVAYLSKKLDPVAAGWPPCLRMVAAIAVLTKDAGKLTMGQPLVILAPHAVEALVKQPPDRWLSNARMTHYQALLLDTDRVQFGPVVALNPATLLPLPEEGLQHNCLDILAEAHGTRPDLTDQPLPDADHTWYTDGSSLLQEGQRKAGAAVTTETEVIWAKALPAGTSAQRAELIALTQALKMAEGKKLNVYTDSRYAFATAHIHGEIYRRRGWLTSEGKEIKNKDEILALLKALFLPKRLSIIHCPGHQKGHSAEARGNRMADQAARKAAITETPDTSTLLAGKRTADGSEFEKRTADGSEFESPKKKAKVE

SEQ ID NO: 6181 - protein, 2110 aa, synthetic construct; identical to SEQ ID NO: 4504

SEQ ID NO: 6182 - protein, 2110 aa, synthetic construct; identical to SEQ ID NO: 6180

SEQ ID NO: 6183 - protein, 2110 aa, synthetic construct; identical to SEQ ID NO: 4504

SEQ ID NO: 6184 - protein, 2130 aa, synthetic construct
MPAAKRVKLDGGDKKYSIGLDIGTNSVGWAVITDEYKVPSKKFKVLGNTDRHSIKKNLIGALLFDSGETAEATRLKRTARRRYTRRKNRICYLQEIFSNEMAKVDDSFFHRLEESFLVEEDKKHERHPIFGNIVDEVAYHEKYPTIYHLRKKLVDSTDKADLRLIYLALAHMIKFRGHFLIEGDLNPDNSDVDKLFIQLVQTYNQLFEENPINASGVDAKAILSARLSKSRRLENLIAQLPGEKKNGLFGNLIALSLGLTPNFKSNFDLAEDAKLQLSKDTYDDDLDNLLAQIGDQYADLFLAAKNLSDAILLSDILRVNTEITKAPLSASMIKRYDEHHQDLTLLKALVRQQLPEKYKEIFFDQSKNGYAGYIDGGASQEEFYKFIKPILEKMDGTEELLVKLNREDLLRKQRTFDNGSIPHQIHLGELHAILRRQEDFYPFLKDNREKIEKILTFRIPYYVGPLARGNSRFAWMTRKSEETITPWNFEEVVDKGASAQSFIERMTNFDKNLPNEKVLPKHSLLYEYFTVYNELTKVKYVTEGMRKPAFLSGEQKKAIVDLLFKTNRKVTVKQLKEDYFKKIECFDSVEISGVEDRFNASLGTYHDLLKIIKDKDFLDNEENEDILEDIVLTLTLFEDREMIEERLKTYAHLFDDKVMKQLKRRRYTGWGRLSRKLINGIRDKQSGKTILDFLKSDGFANRNFMQLIHDDSLTFKEDIQKAQVSGQGDSLHEHIANLAGSPAIKKGILQTVKVVDELVKVMGRHKPENIVIEMARENQTTQKGQKNSRERMKRIEEGIKELGSQILKEHPVENTQLQNEKLYLYYLQNGRDMYVDQELDINRLSDYDVDHIVPQSFLKDDSIDNKVLTRSDKARGKSDNVPSEEVVKKMKNYWRQLLNAKLITQRKFDNLTKAERGGLSELDKAGFIKRQLVETRQITKHVAQILDSRMNTKYDENDKLIREVKVITLKSKLVSDFRKDFQFYKVREINNYHHAHDAYLNAVVGTALIKKYPKLESEFVYGDYKVYDVRKMIAKSEQEIGKATAKYFFYSNIMNFFKTEITLANGEIRKRPLIETNGETGEIVWDKGRDFATVRKVLSMPQVNIVKKTEVQTGGFSKESILPKRNSDKLIARKKDWDPKKYGGFDSPTVAYSVLVVAKVEKGKSKKLKSVKELLGITIMERSSFEKNPIDFLEAKGYKEVKKDLIIKLPKYSLFELENGRKRMLASAGELQKGNELALPSKYVNFLYLASHYEKLKGSPEDNEQKQLFVEQHKHYLDEIIEQISEFSKRVILADANLDKVLSAYNKHRDKPIREQAENIIHLFTLTNLGAPAAFKYFDTTIDRKRYTSTKEVLDATLIHQSITGLYETRIDLSQLGGDGGGGGGSGGGGSGGGGSGGGGSGGGGSGGVQEISDSRPMLHIYLNGRRFLGLLDTGADKTCIAGRDWPANWPIHQTESSLQGLGMACGVARSSQPLRWQHEDKSGIIHPFVIPTLPFTLWGRDIMKDIKVRLMTDSPDDSQDLMIGAIESNLFADQISWKSDQPVWLNQWPLKQEKLQALQQLVTEQLQLGHLEESNSPWNTPVFVIKKKSGKWRLLQDLRAVNATMHDMGALQPGLPSPVAVPKGWEIIIIDLQDCFFNIKLHPEDCKRFAFSVPSPNFKRPYQRFQWKVLPQGMKNSPTLCQKFVDKAILTVRDKYQDSYIVHYMDDILLAHPSRSIVDEILTSMIQALNKHGLVVSTEKIQKYDNLKYLGTHIQGDSVSYQKLQIRTDKLRTLNDFQKLLGNINWIRPFLKLTTGELKPLFEILNGDSNPISTRKLTPEACKALQLMNERLSTARVKRLDLSQPWSLCILKTEYTPTACLWQDGVVEWIHLPHISPKVITPYDIFCTQLIIKGRHRSKELFSKDPDYIVVPYTKVQFDLLLQEKEDWPISLLGFLGEVHFHLPKDPLLTFTLQTAIIFPHMTSTTPLEKGIVIFTDGSANGRSVTYIQGREPIIKENTQNTAQQAEIVAVITAFEEVSQPFNLYTDSKYVTGLFPEIETATLSPRTKIYTELKHLQRLIHKRQEKFYIGHIRGHTGLPGPLAQGNAYADSLTRILTAAGKRTADGSEFEKRTADGSEFESPKKKAKVE

SEQ ID NO: 6185 - protein, 2130 aa, synthetic construct
MPAAKRVKLDGGDKKYSIGLDIGTNSVGWAVITDEYKVPSKKFKVLGNTDRHSIKKNLIGALLFDSGETAEATRLKRTARRRYTRRKNRICYLQEIFSNEMAKVDDSFFHRLEESFLVEEDKKHERHPIFGNIVDEVAYHEKYPTIYHLRKKLVDSTDKADLRLIYLALAHMIKFRGHFLIEGDLNPDNSDVDKLFIQLVQTYNQLFEENPINASGVDAKAILSARLSKSRRLENLIAQLPGEKKNGLFGNLIALSLGLTPNFKSNFDLAEDAKLQLSKDTYDDDLDNLLAQIGDQYADLFLAAKNLSDAILLSDILRVNTEITKAPLSASMIKRYDEHHQDLTLLKALVRQQLPEKYKEIFFDQSKNGYAGYIDGGASQEEFYKFIKPILEKMDGTEELLVKLNREDLLRKQRTFDNGSIPHQIHLGELHAILRRQEDFYPFLKDNREKIEKILTFRIPYYVGPLARGNSRFAWMTRKSEETITPWNFEEVVDKGASAQSFIERMTNFDKNLPNEKVLPKHSLLYEYFTVYNELTKVKYVTEGMRKPAFLSGEQKKAIVDLLFKTNRKVTVKQLKEDYFKKIECFDSVEISGVEDRFNASLGTYHDLLKIIKDKDFLDNEENEDILEDIVLTLTLFEDREMIEERLKTYAHLFDDKVMKQLKRRRYTGWGRLSRKLINGIRDKQSGKTILDFLKSDGFANRNFMQLIHDDSLTFKEDIQKAQVSGQGDSLHEHIANLAGSPAIKKGILQTVKVVDELVKVMGRHKPENIVIEMARENQTTQKGQKNSRERMKRIEEGIKELGSQILKEHPVENTQLQNEKLYLYYLQNGRDMYVDQELDINRLSDYDVDHIVPQSFLKDDSIDNKVLTRSDKARGKSDNVPSEEVVKKMKNYWRQLLNAKLITQRKFDNLTKAERGGLSELDKAGFIKRQLVETRQITKHVAQILDSRMNTKYDENDKLIREVKVITLKSKLVSDFRKDFQFYKVREINNYHHAHDAYLNAVVGTALIKKYPKLESEFVYGDYKVYDVRKMIAKSEQEIGKATAKYFFYSNIMNFFKTEITLANGEIRKRPLIETNGETGEIVWDKGRDFATVRKVLSMPQVNIVKKTEVQTGGFSKESILPKRNSDKLIARKKDWDPKKYGGFDSPTVAYSVLVVAKVEKGKSKKLKSVKELLGITIMERSSFEKNPIDFLEAKGYKEVKKDLIIKLPKYSLFELENGRKRMLASAGELQKGNELALPSKYVNFLYLASHYEKLKGSPEDNEQKQLFVEQHKHYLDEIIEQISEFSKRVILADANLDKVLSAYNKHRDKPIREQAENIIHLFTLTNLGAPAAFKYFDTTIDRKRYTSTKEVLDATLIHQSITGLYETRIDLSQLGGDGGGGGGSGGGGSGGGGSGGGGSGGGGSGGWVQEISDSRPMLHIYLNGRRFLGLLNTGADKTCIAGRDWPANWPIHQTESSLQGLGMACGVARSSQPLRWQHEDKSGIIHPFVIPTLPFTLWGRDIMKDIKVRLMTDSPDDSQDLMIGAIESNLFADQISWKSDQPVWLNQWPLKQEKLQALQQLVTEQLQLGHLEESNSPWNTPVFVIKKKSGKWRLLQDLRAVNATMHDMGALQPGLPSPVAVPKGWEIIIIDLQDCFFNIKLHPEDCKRFAFSVPSPNFKRPYQRFQWKVLPQGMKNSPTLCQKFVDKAILTVRDKYQDSYIVHYMDDILLAHPSRSIVDEILTSMIQALNKHGLVVSTEKIQKYDNLKYLGTHIQGDSVSYQKLQIRTDKLRTLNDFQKLLGNINWIRPFLKLTTGELKPLFEILNGDSNPISTRKLTPEACKALQLMNERLSTARVKRLDLSQPWSLCILKTEYTPTACLWQDGVVEWIHLPHISPKVITPYDIFCTQLIIKGRHRSKELFSKDPDYIVVPYTKVQFDLLLQEKEDWPISLLGFLGEVHFHLPKDPLLTFTLQTAIIFPHMTSTTPLEKGIVIFTDGSANGRSVTYIQGREPIIKENTQNTAQQAEIVAVITAFEEVSQPFNLYTDSKYVTGLFPEIETATLSPRTKIYTELKHLQRLIHKRQEKFYIGHIRGHTGLPGPLAQGNAYADSLTRILTAGKRTADGSEFEKRTADGSEFESPKKKAKVE

SEQ ID NO: 6186 - protein, 2130 aa, synthetic construct; identical to SEQ ID NO: 6185

SEQ ID NO: 6187 - protein, 2038 aa, synthetic construct
MPAAKRVKLDGGDKKYSIGLDIGTNSVGWAVITDEYKVPSKKFKVLGNTDRHSIKKNLIGALLFDSGETAEATRLKRTARRRYTRRKNRICYLQEIFSNEMAKVDDSFFHRLEESFLVEEDKKHERHPIFGNIVDEVAYHEKYPTIYHLRKKLVDSTDKADLRLIYLALAHMIKFRGHFLIEGDLNPDNSDVDKLFIQLVQTYNQLFEENPINASGVDAKAILSARLSKSRRLENLIAQLPGEKKNGLFGNLIALSLGLTPNFKSNFDLAEDAKLQLSKDTYDDDLDNLLAQIGDQYADLFLAAKNLSDAILLSDILRVNTEITKAPLSASMIKRYDEHHQDLTLLKALVRQQLPEKYKEIFFDQSKNGYAGYIDGGASQEEFYKFIKPILEKMDGTEELLVKLNREDLLRKQRTFDNGSIPHQIHLGELHAILRRQEDFYPFLKDNREKIEKILTFRIPYYVGPLARGNSRFAWMTRKSEETITPWNFEEVVDKGASAQSFIERMTNFDKNLPNEKVLPKHSLLYEYFTVYNELTKVKYVTEGMRKPAFLSGEQKKAIVDLLFKTNRKVTVKQLKEDYFKKIECFDSVEISGVEDRFNASLGTYHDLLKIIKDKDFLDNEENEDILEDIVLTLTLFEDREMIEERLKTYAHLFDDKVMKQLKRRRYTGWGRLSRKLINGIRDKQSGKTILDFLKSDGFANRNFMQLIHDDSLTFKEDIQKAQVSGQGDSLHEHIANLAGSPAIKKGILQTVKVVDELVKVMGRHKPENIVIEMARENQTTQKGQKNSRERMKRIEEGIKELGSQILKEHPVENTQLQNEKLYLYYLQNGRDMYVDQELDINRLSDYDVDHIVPQSFLKDDSIDNKVLTRSDKARGKSDNVPSEEVVKKMKNYWRQLLNAKLITQRKFDNLTKAERGGLSELDKAGFIKRQLVETRQITKHVAQILDSRMNTKYDENDKLIREVKVITLKSKLVSDFRKDFQFYKVREINNYHHAHDAYLNAVVGTALIKKYPKLESEFVYGDYKVYDVRKMIAKSEQEIGKATAKYFFYSNIMNFFKTEITLANGEIRKRPLIETNGETGEIVWDKGRDFATVRKVLSMPQVNIVKKTEVQTGGFSKESILPKRNSDKLIARKKDWDPKKYGGFDSPTVAYSVLVVAKVEKGKSKKLKSVKELLGITIMERSSFEKNPIDFLEAKGYKEVKKDLIIKLPKYSLFELENGRKRMLASAGELQKGNELALPSKYVNFLYLASHYEKLKGSPEDNEQKQLFVEQHKHYLDEIIEQISEFSKRVILADANLDKVLSAYNKHRDKPIREQAENIIHLFTLTNLGAPAAFKYFDTTIDRKRYTSTKEVLDATLIHQSITGLYETRIDLSQLGGDGGGGGGSGGGGSGGGGSGGGGSGGGGSGGGRDIMKDIKVRLMTDSPDDSQDLMIGAIESNLFADQISWKSDQPVWLNQWPLKQEKLQALQQLVTEQLQLGHLEESNSPWNTPVFVIKKKSGKWRLLQDLRAVNATMHDMGALQPGLPSPVAVPKGWEIIIIDLQDCFFNIKLHPEDCKRFAFSVPSPNFKRPYQRFQWKVLPQGMKNSPTLCQKFVDKAILTVRDKYQDSYIVHYMDDILLAHPSRSIVDEILTSMIQALNKHGLVVSTEKIQKYDNLKYLGTHIQGDSVSYQKLQIRTDKLRTLNDFQKLLGNINWIRPFLKLTTGELKPLFEILNGDSNPISTRKLTPEACKALQLMNERLSTARVKRLDLSQPWSLCILKTEYTPTACLWQDGVVEWIHLPHISPKVITPYDIFCTQLIIKGRHRSKELFSKDPDYIVVPYTKVQFDLLLQEKEDWPISLLGFLGEVHFHLPKDPLLTFTLQTAIIFPHMTSTTPLEKGIVIFTDGSANGRSVTYIQGREPIIKENTQNTAQQAEIVAVITAFEEVSQPFNLYTDSKYVTGLFPEIETATLSPRTKIYTELKHLQRLIHKRQEKFYIGHIRGHTGLPGPLAQGNAYADSLTRILTAGKRTADGSEFEKRTADGSEFESPKKKAKVE

SEQ ID NO: 6188 - protein, 2102 aa, synthetic construct
MPAAKRVKLDGGDKKYSIGLDIGTNSVGWAVITDEYKVPSKKFKVLGNTDRHSIKKNLIGALLFDSGETAEATRLKRTARRRYTRRKNRICYLQEIFSNEMAKVDDSFFHRLEESFLVEEDKKHERHPIFGNIVDEVAYHEKYPTIYHLRKKLVDSTDKADLRLIYLALAHMIKFRGHFLIEGDLNPDNSDVDKLFIQLVQTYNQLFEENPINASGVDAKAILSARLSKSRRLENLIAQLPGEKKNGLFGNLIALSLGLTPNFKSNFDLAEDAKLQLSKDTYDDDLDNLLAQIGDQYADLFLAAKNLSDAILLSDILRVNTEITKAPLSASMIKRYDEHHQDLTLLKALVRQQLPEKYKEIFFDQSKNGYAGYIDGGASQEEFYKFIKPILEKMDGTEELLVKLNREDLLRKQRTFDNGSIPHQIHLGELHAILRRQEDFYPFLKDNREKIEKILTFRIPYYVGPLARGNSRFAWMTRKSEETITPWNFEEVVDKGASAQSFIERMTNFDKNLPNEKVLPKHSLLYEYFTVYNELTKVKYVTEGMRKPAFLSGEQKKAIVDLLFKTNRKVTVKQLKEDYFKKIECFDSVEISGVEDRFNASLGTYHDLLKIIKDKDFLDNEENEDILEDIVLTLTLFEDREMIEERLKTYAHLFDDKVMKQLKRRRYTGWGRLSRKLINGIRDKQSGKTILDFLKSDGFANRNFMQLIHDDSLTFKEDIQKAQVSGQGDSLHEHIANLAGSPAIKKGILQTVKVVDELVKVMGRHKPENIVIEMARENQTTQKGQKNSRERMKRIEEGIKELGSQILKEHPVENTQLQNEKLYLYYLQNGRDMYVDQELDINRLSDYDVDHIVPQSFLKDDSIDNKVLTRSDKARGKSDNVPSEEVVKKMKNYWRQLLNAKLITQRKFDNLTKAERGGLSELDKAGFIKRQLVETRQITKHVAQILDSRMNTKYDENDKLIREVKVITLKSKLVSDFRKDFQFYKVREINNYHHAHDAYLNAVVGTALIKKYPKLESEFVYGDYKVYDVRKMIAKSEQEIGKATAKYFFYSNIMNFFKTEITLANGEIRKRPLIETNGETGEIVWDKGRDFATVRKVLSMPQVNIVKKTEVQTGGFSKESILPKRNSDKLIARKKDWDPKKYGGFDSPTVAYSVLVVAKVEKGKSKKLKSVKELLGITIMERSSFEKNPIDFLEAKGYKEVKKDLIIKLPKYSLFELENGRKRMLASAGELQKGNELALPSKYVNFLYLASHYEKLKGSPEDNEQKQLFVEQHKHYLDEIIEQISEFSKRVILADANLDKVLSAYNKHRDKPIREQAENIIHLFTLTNLGAPAAFKYFDTTIDRKRYTSTKEVLDATLIHQSITGLYETRIDLSQLGGDGGGGGGSGGGGSGGGGSGGGGSGGGGSGGLDDEYRLYSPLVKPDQNIQFWLEQFPQAWAETAGMGLAKQVPPQVIQLKASATPVSVRQYPLSKEAQEGIRPHVQRLIQQGILVPVQSPWNTPLLPVRKPGTNDYRPVQDLREVNKRVQDIHPTVPNPYNLLCALPPQRSWYTVLDLKDAFFCLRLHPTSQPLFAFEWRDPGTGRTGQLTWTRLPQGFKNSPTIFNEALHRDLANFRIQHPQVTLLQYVDDLLLAGATKQDCLEGTKALLLELSDLGYRASAKKAQICRREVTYLGYSLRDGQRWLTEARKKTVVQIPAPTTAKQVREFLGKAGFCRLFIPGFATLAAPLYPLTKPKGEFSWAPEHQKAFDAIKKALLSAPALALPDVTKPFTLYVDERKGVARGVLTQTLGPWRRPVAYLSKKLDPVASGWPVCLKAIAAVAILVKDADKLTLGQNITVIAPHALENIVRQPPDRWMTNARMTHYQSLLLTERVTFAPPAALNPATLLPEETDEPVTHDCHQLLIEETGVRKDLTDIPLTGEVLTWFTDGSSYVVEGKRMAGAAVVDGTRTIWASSLPEGTSAQKAELMALTQALRLAEGKSINIYTDSRYAFATAHVHGAIYKQRGWLTSAGREIKNKEEILSLLEALHLPKRLAIIHCPGHQKAKDPISRGNQMADRVAKQAAQGVNLLPAGKRTADGSEFEKRTADGSEFESPKKKAKVE

SEQ ID NO: 6189 - protein, 2104 aa, synthetic construct
MPAAKRVKLDGGDKKYSIGLDIGTNSVGWAVITDEYKVPSKKFKVLGNTDRHSIKKNLIGALLFDSGETAEATRLKRTARRRYTRRKNRICYLQEIFSNEMAKVDDSFFHRLEESFLVEEDKKHERHPIFGNIVDEVAYHEKYPTIYHLRKKLVDSTDKADLRLIYLALAHMIKFRGHFLIEGDLNPDNSDVDKLFIQLVQTYNQLFEENPINASGVDAKAILSARLSKSRRLENLIAQLPGEKKNGLFGNLIALSLGLTPNFKSNFDLAEDAKLQLSKDTYDDDLDNLLAQIGDQYADLFLAAKNLSDAILLSDILRVNTEITKAPLSASMIKRYDEHHQDLTLLKALVRQQLPEKYKEIFFDQSKNGYAGYIDGGASQEEFYKFIKPILEKMDGTEELLVKLNREDLLRKQRTFDNGSIPHQIHLGELHAILRRQEDFYPFLKDNREKIEKILTFRIPYYVGPLARGNSRFAWMTRKSEETITPWNFEEVVDKGASAQSFIERMTNFDKNLPNEKVLPKHSLLYEYFTVYNELTKVKYVTEGMRKPAFLSGEQKKAIVDLLFKTNRKVTVKQLKEDYFKKIECFDSVEISGVEDRFNASLGTYHDLLKIIKDKDFLDNEENEDILEDIVLTLTLFEDREMIEERLKTYAHLFDDKVMKQLKRRRYTGWGRLSRKLINGIRDKQSGKTILDFLKSDGFANRNFMQLIHDDSLTFKEDIQKAQVSGQGDSLHEHIANLAGSPAIKKGILQTVKVVDELVKVMGRHKPENIVIEMARENQTTQKGQKNSRERMKRIEEGIKELGSQILKEHPVENTQLQNEKLYLYYLQNGRDMYVDQELDINRLSDYDVDHIVPQSFLKDDSIDNKVLTRSDKARGKSDNVPSEEVVKKMKNYWRQLLNAKLITQRKFDNLTKAERGGLSELDKAGFIKRQLVETRQITKHVAQILDSRMNTKYDENDKLIREVKVITLKSKLVSDFRKDFQFYKVREINNYHHAHDAYLNAVVGTALIKKYPKLESEFVYGDYKVYDVRKMIAKSEQEIGKATAKYFFYSNIMNFFKTEITLANGEIRKRPLIETNGETGEIVWDKGRDFATVRKVLSMPQVNIVKKTEVQTGGFSKESILPKRNSDKLIARKKDWDPKKYGGFDSPTVAYSVLVVAKVEKGKSKKLKSVKELLGITIMERSSFEKNPIDFLEAKGYKEVKKDLIIKLPKYSLFELENGRKRMLASAGELQKGNELALPSKYVNFLYLASHYEKLKGSPEDNEQKQLFVEQHKHYLDEIIEQISEFSKRVILADANLDKVLSAYNKHRDKPIREQAENIIHLFTLTNLGAPAAFKYFDTTIDRKRYTSTKEVLDATLIHQSITGLYETRIDLSQLGGDGGGGGGSGGGGSGGGGSGGGGSGGGGSGGTLQLDDEYRLYSPLVKPDQNIQFWLEQFPQAWAETAGMGLAKQVPPQVIQLKASATPVSVRQYPLSKEAQEGIRPHVQRLIQQGILVPVQSPWNTPLLPVRKPGTNDYRPVQDLREVNKRVQDIHPTVPNPYNLLCALPPQRSWYTVLDLKDAFFCLRLHPTSQPLFAFEWRDPGTGRTGQLTWTRLPQGFKNSPTIFDEALHRDLANFRIQHPQVTLLQYVDDLLLAGATKQDCLEGTKALLLELSDLGYRASAKKAQICRREVTYLGYSLRDGQRWLTEARKKTVVQIPAPTTAKQVREFLGTAGFCRLWIPGFATLAAPLYPLTKEKGEFSWAPEHQKAFDAIKKALLSAPALALPDVTKPFTLYVDERKGVARGVLTQTLGPWRRPVAYLSKKLDPVASGWPVCLKAIAAVAILVKDADKLTLGQNITVIAPHALENIVRQPPDRWMTNARMTHYQSLLLTERVTFAPPAALNPATLLPEETDEPVTHDCHQLLIEETGVRKDLTDIPLTGEVLTWFTDGSSYVVEGKRMAGAAVVDGTRTIWASSLPEGTSAQKAELMALTQALRLAEGKSINIYTDSRYAFATAHVHGAIYKQRGLLTSAGREIKNKEEILSLLEALHLPKRLAIIHCPGHQKAKDPISRGNQMADRVAKQAAQGVNLLAGKRTADGSEFEKRTADGSEFESPKKKAKVE

SEQ ID NO: 6190 - protein, 2104 aa, synthetic construct
MPAAKRVKLDGGDKKYSIGLDIGTNSVGWAVITDEYKVPSKKFKVLGNTDRHSIKKNLIGALLFDSGETAEATRLKRTARRRYTRRKNRICYLQEIFSNEMAKVDDSFFHRLEESFLVEEDKKHERHPIFGNIVDEVAYHEKYPTIYHLRKKLVDSTDKADLRLIYLALAHMIKFRGHFLIEGDLNPDNSDVDKLFIQLVQTYNQLFEENPINASGVDAKAILSARLSKSRRLENLIAQLPGEKKNGLFGNLIALSLGLTPNFKSNFDLAEDAKLQLSKDTYDDDLDNLLAQIGDQYADLFLAAKNLSDAILLSDILRVNTEITKAPLSASMIKRYDEHHQDLTLLKALVRQQLPEKYKEIFFDQSKNGYAGYIDGGASQEEFYKFIKPILEKMDGTEELLVKLNREDLLRKQRTFDNGSIPHQIHLGELHAILRRQEDFYPFLKDNREKIEKILTFRIPYYVGPLARGNSRFAWMTRKSEETITPWNFEEVVDKGASAQSFIERMTNFDKNLPNEKVLPKHSLLYEYFTVYNELTKVKYVTEGMRKPAFLSGEQKKAIVDLLFKTNRKVTVKQLKEDYFKKIECFDSVEISGVEDRFNASLGTYHDLLKIIKDKDFLDNEENEDILEDIVLTLTLFEDREMIEERLKTYAHLFDDKVMKQLKRRRYTGWGRLSRKLINGIRDKQSGKTILDFLKSDGFANRNFMQLIHDDSLTFKEDIQKAQVSGQGDSLHEHIANLAGSPAIKKGILQTVKVVDELVKVMGRHKPENIVIEMARENQTTQKGQKNSRERMKRIEEGIKELGSQILKEHPVENTQLQNEKLYLYYLQNGRDMYVDQELDINRLSDYDVDHIVPQSFLKDDSIDNKVLTRSDKARGKSDNVPSEEVVKKMKNYWRQLLNAKLITQRKFDNLTKAERGGLSELDKAGFIKRQLVETRQITKHVAQILDSRMNTKYDENDKLIREVKVITLKSKLVSDFRKDFQFYKVREINNYHHAHDAYLNAVVGTALIKKYPKLESEFVYGDYKVYDVRKMIAKSEQEIGKATAKYFFYSNIMNFFKTEITLANGEIRKRPLIETNGETGEIVWDKGRDFATVRKVLSMPQVNIVKKTEVQTGGFSKESILPKRNSDKLIARKKDWDPKKYGGFDSPTVAYSVLVVAKVEKGKSKKLKSVKELLGITIMERSSFEKNPIDFLEAKGYKEVKKDLIIKLPKYSLFELENGRKRMLASAGELQKGNELALPSKYVNFLYLASHYEKLKGSPEDNEQKQLFVEQHKHYLDEIIEQISEFSKRVILADANLDKVLSAYNKHRDKPIREQAENIIHLFTLTNLGAPAAFKYFDTTIDRKRYTSTKEVLDATLIHQSITGLYETRIDLSQLGGDGGGGGGSGGGGSGGGGSGGGGSGGGGSGGTLQLDDEYRLYSPLVKPDQNIQFWLEQFPQAWAETAGMGLAKQVPPQVIQLKASATPVSVRQYPLSKEAQEGIRPHVQRLIQQGILVPVQSPWNTPLLPVRKPGTNDYRPVQDLREVNKRVQDIHPTVPNPYNLLCALPPQRSWYTVLDLKDAFFCLRLHPTSQPLFAFEWRDPGTGRTGQLTWTRLPQGFKNSPTIFNEALHRDLANFRIQHPQVTLLQYVDDLLLAGATKQDCLEGTKALLLELSDLGYRASAKKAQICRREVTYLGYSLRDGQRWLTEARKKTVVQIPAPTTAKQVREFLGTAGFCRLWIPGFATLAAPLYPLTKPKGEFSWAPEHQKAFDAIKKALLSAPALALPDVTKPFTLYVDERKGVARGVLTQTLGPWRRPVAYLSKKLDPVASGWPVCLKAIAAVAILVKDADKLTLGQNITVIAPHALENIVRQPPDRWMTNARMTHYQSLLLTERVTFAPPAALNPATLLPEETDEPVTHDCHQLLIEETGVRKDLTDIPLTGEVLTWFTDGSSYVVEGKRMAGAAVVDGTRTIWASSLPEGTSAQKAELMALTQALRLAEGKSINIYTDSRYAFATAHVHGAIYKQRGWLTSAGREIKNKEEILSLLEALHLPKRLAIIHCPGHQKAKDPISRGNQMADRVAKQAAQGVNLLAGKRTADGSEFEKRTADGSEFESPKKKAKVE

SEQ ID NO: 6191 - protein, 2190 aa, synthetic construct
MPAAKRVKLDGGDKKYSIGLDIGTNSVGWAVITDEYKVPSKKFKVLGNTDRHSIKKNLIGALLFDSGETAEATRLKRTARRRYTRRKNRICYLQEIFSNEMAKVDDSFFHRLEESFLVEEDKKHERHPIFGNIVDEVAYHEKYPTIYHLRKKLVDSTDKADLRLIYLALAHMIKFRGHFLIEGDLNPDNSDVDKLFIQLVQTYNQLFEENPINASGVDAKAILSARLSKSRRLENLIAQLPGEKKNGLFGNLIALSLGLTPNFKSNFDLAEDAKLQLSKDTYDDDLDNLLAQIGDQYADLFLAAKNLSDAILLSDILRVNTEITKAPLSASMIKRYDEHHQDLTLLKALVRQQLPEKYKEIFFDQSKNGYAGYIDGGASQEEFYKFIKPILEKMDGTEELLVKLNREDLLRKQRTFDNGSIPHQIHLGELHAILRRQEDFYPFLKDNREKIEKILTFRIPYYVGPLARGNSRFAWMTRKSEETITPWNFEEVVDKGASAQSFIERMTNFDKNLPNEKVLPKHSLLYEYFTVYNELTKVKYVTEGMRKPAFLSGEQKKAIVDLLFKTNRKVTVKQLKEDYFKKIECFDSVEISGVEDRFNASLGTYHDLLKIIKDKDFLDNEENEDILEDIVLTLTLFEDREMIEERLKTYAHLFDDKVMKQLKRRRYTGWGRLSRKLINGIRDKQSGKTILDFLKSDGFANRNFMQLIHDDSLTFKEDIQKAQVSGQGDSLHEHIANLAGSPAIKKGILQTVKVVDELVKVMGRHKPENIVIEMARENQTTQKGQKNSRERMKRIEEGIKELGSQILKEHPVENTQLQNEKLYLYYLQNGRDMYVDQELDINRLSDYDVDHIVPQSFLKDDSIDNKVLTRSDKARGKSDNVPSEEVVKKMKNYWRQLLNAKLITQRKFDNLTKAERGGLSELDKAGFIKRQLVETRQITKHVAQILDSRMNTKYDENDKLIREVKVITLKSKLVSDFRKDFQFYKVREINNYHHAHDAYLNAVVGTALIKKYPKLESEFVYGDYKVYDVRKMIAKSEQEIGKATAKYFFYSNIMNFFKTEITLANGEIRKRPLIETNGETGEIVWDKGRDFATVRKVLSMPQVNIVKKTEVQTGGFSKESILPKRNSDKLIARKKDWDPKKYGGFDSPTVAYSVLVVAKVEKGKSKKLKSVKELLGITIMERSSFEKNPIDFLEAKGYKEVKKDLIIKLPKYSLFELENGRKRMLASAGELQKGNELALPSKYVNFLYLASHYEKLKGSPEDNEQKQLFVEQHKHYLDEIIEQISEFSKRVILADANLDKVLSAYNKHRDKPIREQAENIIHLFTLTNLGAPAAFKYFDTTIDRKRYTSTKEVLDATLIHQSITGLYETRIDLSQLGGDGGGGGGSGGGGSGGGGSGGGGSGGGGSGGMDPLQLLQPLEAEIKGTKLKAHWNSGATITCVPEAFLEDERPIQTMLIKTIHGEKQQDVYYLTFKVQGRKVEAEVLASPYDYILLNPSDVPWLMKKPLQLTVLVPLHEYQERLLQQTALPKEQKELLQKLFLKYDALWQHWENQVGHRRIKPHNIATGTLAPRPQKQYPINPKAKPSIQIVIDDLLKQGVLIQQNSTMNTPVYPVPKPDGKWRMVLDYREVNKTIPLIAAQNQHSAGILSSIYRGKYKTTLDLTNGFWAHPITPESYWLTAFTWQGKQYCWTRLPQGFLNSPALFTADVVDLLKEIPNVQAYVDDIYISHDDPQEHLEQLEKIFSILLNAGYVVSLKKSEIAQREVEFLGFNITKEGRGLTDTFKQKLLNITPPKDLKQLQSILGLLNFARNFIPNYSELVKPLYTIVANANGKFISWTEDNSNQLQHIISVLNQADNLEERNPETRLIIKVNSSPSAGYIRYYNEGSKRPIMYVNYIFSKAEAKFTQTEKLLTTMHKGLIKAMDLAMGQEILVYSPIVSMTKIQRTPLPERKALPVRWITWMTYLEDPRIQFHYDKSLPELQQIPNVTEDVIAKTKHPSEFAMVFYTDGSAIKHPDVNKSHSAGMGIAQVQFIPEYKIVHQWSIPLGDHTAQLAEIAAVEFACKKALKISGPVLIVTDSFYVAESANKELPYWKSNGFLNNKKKPLRHVSKWKSIAECLQLKPDIIIMHEKGHQQPMTTLHTEGNNLADKLATQGSYVVHAGKRTADGSEFEKRTADGSEFESPKKKAKVE

SEQ ID NO: 6192 - protein, 2101 aa, synthetic construct
MPAAKRVKLDGGDKKYSIGLDIGTNSVGWAVITDEYKVPSKKFKVLGNTDRHSIKKNLIGALLFDSGETAEATRLKRTARRRYTRRKNRICYLQEIFSNEMAKVDDSFFHRLEESFLVEEDKKHERHPIFGNIVDEVAYHEKYPTIYHLRKKLVDSTDKADLRLIYLALAHMIKFRGHFLIEGDLNPDNSDVDKLFIQLVQTYNQLFEENPINASGVDAKAILSARLSKSRRLENLIAQLPGEKKNGLFGNLIALSLGLTPNFKSNFDLAEDAKLQLSKDTYDDDLDNLLAQIGDQYADLFLAAKNLSDAILLSDILRVNTEITKAPLSASMIKRYDEHHQDLTLLKALVRQQLPEKYKEIFFDQSKNGYAGYIDGGASQEEFYKFIKPILEKMDGTEELLVKLNREDLLRKQRTFDNGSIPHQIHLGELHAILRRQEDFYPFLKDNREKIEKILTFRIPYYVGPLARGNSRFAWMTRKSEETITPWNFEEVVDKGASAQSFIERMTNFDKNLPNEKVLPKHSLLYEYFTVYNELTKVKYVTEGMRKPAFLSGEQKKAIVDLLFKTNRKVTVKQLKEDYFKKIECFDSVEISGVEDRFNASLGTYHDLLKIIKDKDFLDNEENEDILEDIVLTLTLFEDREMIEERLKTYAHLFDDKVMKQLKRRRYTGWGRLSRKLINGIRDKQSGKTILDFLKSDGFANRNFMQLIHDDSLTFKEDIQKAQVSGQGDSLHEHIANLAGSPAIKKGILQTVKVVDELVKVMGRHKPENIVIEMARENQTTQKGQKNSRERMKRIEEGIKELGSQILKEHPVENTQLQNEKLYLYYLQNGRDMYVDQELDINRLSDYDVDHIVPQSFLKDDSIDNKVLTRSDKARGKSDNVPSEEVVKKMKNYWRQLLNAKLITQRKFDNLTKAERGGLSELDKAGFIKRQLVETRQITKHVAQILDSRMNTKYDENDKLIREVKVITLKSKLVSDFRKDFQFYKVREINNYHHAHDAYLNAVVGTALIKKYPKLESEFVYGDYKVYDVRKMIAKSEQEIGKATAKYFFYSNIMNFFKTEITLANGEIRKRPLIETNGETGEIVWDKGRDFATVRKVLSMPQVNIVKKTEVQTGGFSKESILPKRNSDKLIARKKDWDPKKYGGFDSPTVAYSVLVVAKVEKGKSKKLKSVKELLGITIMERSSFEKNPIDFLEAKGYKEVKKDLIIKLPKYSLFELENGRKRMLASAGELQKGNELALPSKYVNFLYLASHYEKLKGSPEDNEQKQLFVEQHKHYLDEIIEQISEFSKRVILADANLDKVLSAYNKHRDKPIREQAENIIHLFTLTNLGAPAAFKYFDTTIDRKRYTSTKEVLDATLIHQSITGLYETRIDLSQLGGDGGGGGGSGGGGSGGGGSGGGGSGGGGSGGVPWLMKKPLQLTVLVPLHEYQERLLQQTALPKEQKELLQKLFLKYDALWQHWENQVGHRRIKPHNIATGTLAPRPQKQYPINPKAKPSIQIVIDDLLKQGVLIQQNSTMNTPVYPVPKPDGKWRMVLDYREVNKTIPLIAAQNQHSAGILSSIYRGKYKTTLDLTNGFWAHPITPESYWLTAFTWQGKQYCWTRLPQGFLNSPALFNADVVDLLKEIPNVQAYVDDIYISHDDPQEHLEQLEKIFSILLNAGYVVSLKKSEIAQREVEFLGFNITKEGRGLTDTFKQKLLNITPPKDLKQLQSILGKLNFARNFIPNYSELVKPLYTIVAPANGKFISWTEDNSNQLQHIISVLNQADNLEERNPETRLIIKVNSSPSAGYIRYYNEGSKRPIMYVNYIFSKAEAKFTQTEKLLTTMHKGLIKAMDLAMGQEILVYSPIVSMTKIQRTPLPERKALPVRWITWMTYLEDPRIQFHYDKSLPELQQIPNVTEDVIAKTKHPSEFAMVFYTDGSAIKHPDVNKSHSAGMGIAQVQFIPEYKIVHQWSIPLGDHTAQLAEIAAVEFACKKALKISGPVLIVTDSFYVAESANKELPYWKSNGFLNNKKKPLRHVSKWKSIAECLQLKPDIIIMHEKGHQQPMTTLHTEGNNLADKLATQGSYVVHAGKRTADGSEFEKRTADGSEFESPKKKAKVE

SEQ ID NO: 6193 - protein, 2190 aa, synthetic construct
MPAAKRVKLDGGDKKYSIGLDIGTNSVGWAVITDEYKVPSKKFKVLGNTDRHSIKKNLIGALLFDSGETAEATRLKRTARRRYTRRKNRICYLQEIFSNEMAKVDDSFFHRLEESFLVEEDKKHERHPIFGNIVDEVAYHEKYPTIYHLRKKLVDSTDKADLRLIYLALAHMIKFRGHFLIEGDLNPDNSDVDKLFIQLVQTYNQLFEENPINASGVDAKAILSARLSKSRRLENLIAQLPGEKKNGLFGNLIALSLGLTPNFKSNFDLAEDAKLQLSKDTYDDDLDNLLAQIGDQYADLFLAAKNLSDAILLSDILRVNTEITKAPLSASMIKRYDEHHQDLTLLKALVRQQLPEKYKEIFFDQSKNGYAGYIDGGASQEEFYKFIKPILEKMDGTEELLVKLNREDLLRKQRTFDNGSIPHQIHLGELHAILRRQEDFYPFLKDNREKIEKILTFRIPYYVGPLARGNSRFAWMTRKSEETITPWNFEEVVDKGASAQSFIERMTNFDKNLPNEKVLPKHSLLYEYFTVYNELTKVKYVTEGMRKPAFLSGEQKKAIVDLLFKTNRKVTVKQLKEDYFKKIECFDSVEISGVEDRFNASLGTYHDLLKIIKDKDFLDNEENEDILEDIVLTLTLFEDREMIEERLKTYAHLFDDKVMKQLKRRRYTGWGRLSRKLINGIRDKQSGKTILDFLKSDGFANRNFMQLIHDDSLTFKEDIQKAQVSGQGDSLHEHIANLAGSPAIKKGILQTVKVVDELVKVMGRHKPENIVIEMARENQTTQKGQKNSRERMKRIEEGIKELGSQILKEHPVENTQLQNEKLYLYYLQNGRDMYVDQELDINRLSDYDVDHIVPQSFLKDDSIDNKVLTRSDKARGKSDNVPSEEVVKKMKNYWRQLLNAKLITQRKFDNLTKAERGGLSELDKAGFIKRQLVETRQITKHVAQILDSRMNTKYDENDKLIREVKVITLKSKLVSDFRKDFQFYKVREINNYHHAHDAYLNAVVGTALIKKYPKLESEFVYGDYKVYDVRKMIAKSEQEIGKATAKYFFYSNIMNFFKTEITLANGEIRKRPLIETNGETGEIVWDKGRDFATVRKVLSMPQVNIVKKTEVQTGGFSKESILPKRNSDKLIARKKDWDPKKYGGFDSPTVAYSVLVVAKVEKGKSKKLKSVKELLGITIMERSSFEKNPIDFLEAKGYKEVKKDLIIKLPKYSLFELENGRKRMLASAGELQKGNELALPSKYVNFLYLASHYEKLKGSPEDNEQKQLFVEQHKHYLDEIIEQISEFSKRVILADANLDKVLSAYNKHRDKPIREQAENIIHLFTLTNLGAPAAFKYFDTTIDRKRYTSTKEVLDATLIHQSITGLYETRIDLSQLGGDGGGGGGSGGGGSGGGGSGGGGSGGGGSGGMDPLQLLQPLEAEIKGTKLKAHWNSGATITCVPEAFLEDERPIQTMLIKTIHGEKQQDVYYLTFKVQGRKVEAEVLASPYDYILLNPSDVPWLMKKPLQLTVLVPLHEYQERLLQQTALPKEQKELLQKLFLKYDALWQHWENQVGHRRIKPHNIATGTLAPRPQKQYPINPKAKPSIQIVIDDLLKQGVLIQQNSTMNTPVYPVPKPDGKWRMVLDYREVNKTIPLIAAQNQHSAGILSSIYRGKYKTTLDLTNGFWAHPITPESYWLTAFTWQGKQYCWTRLPQGFLNSPALFNADVVDLLKEIPNVQAYVDDIYISHDDPQEHLEQLEKIFSILLNAGYVVSLKKSEIAQREVEFLGFNITKEGRGLTDTFKQKLLNITPPKDLKQLQSILGLLNFARNFIPNYSELVKPLYTIVAPANGKFISWTEDNSNQLQHIISVLNQADNLEERNPETRLIIKVNSSPSAGYIRYYNEGSKRPIMYVNYIFSKAEAKFTQTEKLLTTMHKGLIKAMDLAMGQEILVYSPIVSMTKIQRTPLPERKALPVRWITWMTYLEDPRIQFHYDKSLPELQQIPNVTEDVIAKTKHPSEFAMVFYTDGSAIKHPDVNKSHSAGMGIAQVQFIPEYKIVHQWSIPLGDHTAQLAEIAAVEFACKKALKISGPVLIVTDSFYVAESANKELPYWKSNGFLNNKKKPLRHVSKWKSIAECLQLKPDIIIMHEKGHQQPMTTLHTEGNNLADKLATQGSYVVHAGKRTADGSEFEKRTADGSEFESPKKKAKVE

SEQ ID NO: 6194 - protein, 2190 aa, synthetic construct
MPAAKRVKLDGGDKKYSIGLDIGTNSVGWAVITDEYKVPSKKFKVLGNTDRHSIKKNLIGALLFDSGETAEATRLKRTARRRYTRRKNRICYLQEIFSNEMAKVDDSFFHRLEESFLVEEDKKHERHPIFGNIVDEVAYHEKYPTIYHLRKKLVDSTDKADLRLIYLALAHMIKFRGHFLIEGDLNPDNSDVDKLFIQLVQTYNQLFEENPINASGVDAKAILSARLSKSRRLENLIAQLPGEKKNGLFGNLIALSLGLTPNFKSNFDLAEDAKLQLSKDTYDDDLDNLLAQIGDQYADLFLAAKNLSDAILLSDILRVNTEITKAPLSASMIKRYDEHHQDLTLLKALVRQQLPEKYKEIFFDQSKNGYAGYIDGGASQEEFYKFIKPILEKMDGTEELLVKLNREDLLRKQRTFDNGSIPHQIHLGELHAILRRQEDFYPFLKDNREKIEKILTFRIPYYVGPLARGNSRFAWMTRKSEETITPWNFEEVVDKGASAQSFIERMTNFDKNLPNEKVLPKHSLLYEYFTVYNELTKVKYVTEGMRKPAFLSGEQKKAIVDLLFKTNRKVTVKQLKEDYFKKIECFDSVEISGVEDRFNASLGTYHDLLKIIKDKDFLDNEENEDILEDIVLTLTLFEDREMIEERLKTYAHLFDDKVMKQLKRRRYTGWGRLSRKLINGIRDKQSGKTILDFLKSDGFANRNFMQLIHDDSLTFKEDIQKAQVSGQGDSLHEHIANLAGSPAIKKGILQTVKVVDELVKVMGRHKPENIVIEMARENQTTQKGQKNSRERMKRIEEGIKELGSQILKEHPVENTQLQNEKLYLYYLQNGRDMYVDQELDINRLSDYDVDHIVPQSFLKDDSIDNKVLTRSDKARGKSDNVPSEEVVKKMKNYWRQLLNAKLITQRKFDNLTKAERGGLSELDKAGFIKRQLVETRQITKHVAQILDSRMNTKYDENDKLIREVKVITLKSKLVSDFRKDFQFYKVREINNYHHAHDAYLNAVVGTALIKKYPKLESEFVYGDYKVYDVRKMIAKSEQEIGKATAKYFFYSNIMNFFKTEITLANGEIRKRPLIETNGETGEIVWDKGRDFATVRKVLSMPQVNIVKKTEVQTGGFSKESILPKRNSDKLIARKKDWDPKKYGGFDSPTVAYSVLVVAKVEKGKSKKLKSVKELLGITIMERSSFEKNPIDFLEAKGYKEVKKDLIIKLPKYSLFELENGRKRMLASAGELQKGNELALPSKYVNFLYLASHYEKLKGSPEDNEQKQLFVEQHKHYLDEIIEQISEFSKRVILADANLDKVLSAYNKHRDKPIREQAENIIHLFTLTNLGAPAAFKYFDTTIDRKRYTSTKEVLDATLIHQSITGLYETRIDLSQLGGDGGGGGGSGGGGSGGGGSGGGGSGGGGSGGMDPLQLLQPLEAEIKGTKLKAHWNSGATITCVPEAFLEDERPIQTMLIKTIHGEKQQDVYYLTFKVQGRKVEAEVLASPYDYILLNPSDVPWLMKKPLQLTVLVPLHEYQERLLQQTALPKEQKELLQKLFLKYDALWQHWENQVGHRRIKPHNIATGTLAPRPQKQYPINPKAKPSIQIVIDDLLKQGVLIQQNSTMNTPVYPVPKPDGKWRMVLDYREVNKTIPLIAAQNQHSAGILSSIYRGKYKTTLDLTNGFWAHPITPESYWLTAFTWQGKQYCWTRLPQGFLNSPALFNADVVDLLKEIPNVQAYVDDIYISHDDPQEHLEQLEKIFSILLNAGYVVSLKKSEIAQREVEFLGFNITKEGRGLTDTFKQKLLNITPPKDLKQLQSILGKLNFARNFIPNYSELVKPLYTIVAPANGKFISWTEDNSNQLQHIISVLNQADNLEERNPETRLIIKVNSSPSAGYIRYYNEGSKRPIMYVNYIFSKAEAKFTQTEKLLTTMHKGLIKAMDLAMGQEILVYSPIVSMTKIQRTPLPERKALPVRWITWMTYLEDPRIQFHYDKSLPELQQIPNVTEDVIAKTKHPSEFAMVFYTDGSAIKHPDVNKSHSAGMGIAQVQFIPEYKIVHQWSIPLGDHTAQLAEIAAVEFACKKALKISGPVLIVTDSFYVAESANKELPYWKSNGFLNNKKKPLRHVSKWKSIAECLQLKPDIIIMHEKGHQQPMTTLHTEGNNLADKLATQGSYVVHAGKRTADGSEFEKRTADGSEFESPKKKAKVE

SEQ ID NO: 6195 - protein, 2101 aa, synthetic construct
MPAAKRVKLDGGDKKYSIGLDIGTNSVGWAVITDEYKVPSKKFKVLGNTDRHSIKKNLIGALLFDSGETAEATRLKRTARRRYTRRKNRICYLQEIFSNEMAKVDDSFFHRLEESFLVEEDKKHERHPIFGNIVDEVAYHEKYPTIYHLRKKLVDSTDKADLRLIYLALAHMIKFRGHFLIEGDLNPDNSDVDKLFIQLVQTYNQLFEENPINASGVDAKAILSARLSKSRRLENLIAQLPGEKKNGLFGNLIALSLGLTPNFKSNFDLAEDAKLQLSKDTYDDDLDNLLAQIGDQYADLFLAAKNLSDAILLSDILRVNTEITKAPLSASMIKRYDEHHQDLTLLKALVRQQLPEKYKEIFFDQSKNGYAGYIDGGASQEEFYKFIKPILEKMDGTEELLVKLNREDLLRKQRTFDNGSIPHQIHLGELHAILRRQEDFYPFLKDNREKIEKILTFRIPYYVGPLARGNSRFAWMTRKSEETITPWNFEEVVDKGASAQSFIERMTNFDKNLPNEKVLPKHSLLYEYFTVYNELTKVKYVTEGMRKPAFLSGEQKKAIVDLLFKTNRKVTVKQLKEDYFKKIECFDSVEISGVEDRFNASLGTYHDLLKIIKDKDFLDNEENEDILEDIVLTLTLFEDREMIEERLKTYAHLFDDKVMKQLKRRRYTGWGRLSRKLINGIRDKQSGKTILDFLKSDGFANRNFMQLIHDDSLTFKEDIQKAQVSGQGDSLHEHIANLAGSPAIKKGILQTVKVVDELVKVMGRHKPENIVIEMARENQTTQKGQKNSRERMKRIEEGIKELGSQILKEHPVENTQLQNEKLYLYYLQNGRDMYVDQELDINRLSDYDVDHIVPQSFLKDDSIDNKVLTRSDKARGKSDNVPSEEVVKKMKNYWRQLLNAKLITQRKFDNLTKAERGGLSELDKAGFIKRQLVETRQITKHVAQILDSRMNTKYDENDKLIREVKVITLKSKLVSDFRKDFQFYKVREINNYHHAHDAYLNAVVGTALIKKYPKLESEFVYGDYKVYDVRKMIAKSEQEIGKATAKYFFYSNIMNFFKTEITLANGEIRKRPLIETNGETGEIVWDKGRDFATVRKVLSMPQVNIVKKTEVQTGGFSKESILPKRNSDKLIARKKDWDPKKYGGFDSPTVAYSVLVVAKVEKGKSKKLKSVKELLGITIMERSSFEKNPIDFLEAKGYKEVKKDLIIKLPKYSLFELENGRKRMLASAGELQKGNELALPSKYVNFLYLASHYEKLKGSPEDNEQKQLFVEQHKHYLDEIIEQISEFSKRVILADANLDKVLSAYNKHRDKPIREQAENIIHLFTLTNLGAPAAFKYFDTTIDRKRYTSTKEVLDATLIHQSITGLYETRIDLSQLGGDGGGGGGSGGGGSGGGGSGGGGSGGGGSGGIPWLMKKPLQLTTLVPLQEYEERLLKQTMLTGSYKEKLQSLFLKYDALWQHWENQVGHRRIKPHHIATGTVNPRPQKQYPINPKAKASIQTVINDLLKQGVLIQQNSIMNTPVYPVPKPDGKWRMVLDYREVNKTIPLIAAQNQHSAGILSSIFRGKYKTTLDLSNGFWAHSITPESYWLTAFTWLGQQYCWTRLPQGFLNSPALFNADVVDLLKEVPNVQVYVDDIYISHDDPREHLEQLEKVFSLLLNAGYVVSLKKSEIAQHEVEFLGFNITKEGRGLTETFKQKLLNITPPRDLKQLQSILGKLNFARNFIPNFSELVKPLYNIIATAPGKYITWTTDNSQQLQNIISMLNSAENLEERNPEVRLIMKVNTSPSAGYIRFYNEFAKRPIMYLNYVYTKAEVKFTNTEKLLTTIHKGLIKALDLGMGQEILVYSPIVSMTKIQKTPLPERKALPIRWITWMSYLEDPRIQFHYDKTLPELQQVPTVTDDIIAKIKHPSEFSMVFYTDGSAIKHPNVNKSHNAGMGIAQVQFKPEFTVINTWSIPLGDHTAQLAEVAAVEFACKKALKIDGPVLIVTDSFYVAESVNKELPYWQSNGFFNNKKKPLKHVSKWKSIADCIQLKPDIIIIHEKGHQPTASTFHTEGNNLADKLATQGSYVVNAGKRTADGSEFEKRTADGSEFESPKKKAKVE

SEQ ID NO: 6196 - protein, 2190 aa, synthetic construct
MPAAKRVKLDGGDKKYSIGLDIGTNSVGWAVITDEYKVPSKKFKVLGNTDRHSIKKNLIGALLFDSGETAEATRLKRTARRRYTRRKNRICYLQEIFSNEMAKVDDSFFHRLEESFLVEEDKKHERHPIFGNIVDEVAYHEKYPTIYHLRKKLVDSTDKADLRLIYLALAHMIKFRGHFLIEGDLNPDNSDVDKLFIQLVQTYNQLFEENPINASGVDAKAILSARLSKSRRLENLIAQLPGEKKNGLFGNLIALSLGLTPNFKSNFDLAEDAKLQLSKDTYDDDLDNLLAQIGDQYADLFLAAKNLSDAILLSDILRVNTEITKAPLSASMIKRYDEHHQDLTLLKALVRQQLPEKYKEIFFDQSKNGYAGYIDGGASQEEFYKFIKPILEKMDGTEELLVKLNREDLLRKQRTFDNGSIPHQIHLGELHAILRRQEDFYPFLKDNREKIEKILTFRIPYYVGPLARGNSRFAWMTRKSEETITPWNFEEVVDKGASAQSFIERMTNFDKNLPNEKVLPKHSLLYEYFTVYNELTKVKYVTEGMRKPAFLSGEQKKAIVDLLFKTNRKVTVKQLKEDYFKKIECFDSVEISGVEDRFNASLGTYHDLLKIIKDKDFLDNEENEDILEDIVLTLTLFEDREMIEERLKTYAHLFDDKVMKQLKRRRYTGWGRLSRKLINGIRDKQSGKTILDFLKSDGFANRNFMQLIHDDSLTFKEDIQKAQVSGQGDSLHEHIANLAGSPAIKKGILQTVKVVDELVKVMGRHKPENIVIEMARENQTTQKGQKNSRERMKRIEEGIKELGSQILKEHPVENTQLQNEKLYLYYLQNGRDMYVDQELDINRLSDYDVDHIVPQSFLKDDSIDNKVLTRSDKARGKSDNVPSEEVVKKMKNYWRQLLNAKLITQRKFDNLTKAERGGLSELDKAGFIKRQLVETRQITKHVAQILDSRMNTKYDENDKLIREVKVITLKSKLVSDFRKDFQFYKVREINNYHHAHDAYLNAVVGTALIKKYPKLESEFVYGDYKVYDVRKMIAKSEQEIGKATAKYFFYSNIMNFFKTEITLANGEIRKRPLIETNGETGEIVWDKGRDFATVRKVLSMPQVNIVKKTEVQTGGFSKESILPKRNSDKLIARKKDWDPKKYGGFDSPTVAYSVLVVAKVEKGKSKKLKSVKELLGITIMERSSFEKNPIDFLEAKGYKEVKKDLIIKLPKYSLFELENGRKRMLASAGELQKGNELALPSKYVNFLYLASHYEKLKGSPEDNEQKQLFVEQHKHYLDEIIEQISEFSKRVILADANLDKVLSAYNKHRDKPIREQAENIIHLFTLTNLGAPAAFKYFDTTIDRKRYTSTKEVLDATLIHQSITGLYETRIDLSQLGGDGGGGGGSGGGGSGGGGSGGGGSGGGGSGGMDPLQLLQPLEAEIKGTKLKAHWNSGATITCVPQAFLEEEVPIKNIWIKTIHGEKEQPVYYLTFKIQGRKVEAEVISSPYDYILVSPSDIPWLMKKPLQLTTLVPLQEYEERLLKQTMLTGSYKEKLQSLFLKYDALWQHWENQVGHRRIKPHHIATGTVNPRPQKQYPINPKAKASIQTVINDLLKQGVLIQQNSIMNTPVYPVPKPDGKWRMVLDYREVNKTIPLIAAQNQHSAGILSSIFRGKYKTTLDLSNGFWAHSITPESYWLTAFTWLGQQYCWTRLPQGFLNSPALFNADVVDLLKEVPNVQVYVDDIYISHDDPREHLEQLEKVFSLLLNAGYVVSLKKSEIAQHEVEFLGFNITKEGRGLTETFKQKLLNITPPRDLKQLQSILGLLNFARNFIPNFSELVKPLYNIIATAPGKYITWTTDNSQQLQNIISMLNSAENLEERNPEVRLIMKVNTSPSAGYIRFYNEFAKRPIMYLNYVYTKAEVKFTNTEKLLTTIHKGLIKALDLGMGQEILVYSPIVSMTKIQKTPLPERKALPIRWITWMSYLEDPRIQFHYDKTLPELQQVPTVTDDIIAKIKHPSEFSMVFYTDGSAIKHPNVNKSHNAGMGIAQVQFKPEFTVINTWSIPLGDHTAQLAEVAAVEFACKKALKIDGPVLIVTDSFYVAESVNKELPYWQSNGFFNNKKKPLKHVSKWKSIADCIQLKPDIIIIHEKGHQPTASTFHTEGNNLADKLATQGSYVVNAGKRTADGSEFEKRTADGSEFESPKKKAKVE

SEQ ID NO: 6197 - protein, 2190 aa, synthetic construct
MPAAKRVKLDGGDKKYSIGLDIGTNSVGWAVITDEYKVPSKKFKVLGNTDRHSIKKNLIGALLFDSGETAEATRLKRTARRRYTRRKNRICYLQEIFSNEMAKVDDSFFHRLEESFLVEEDKKHERHPIFGNIVDEVAYHEKYPTIYHLRKKLVDSTDKADLRLIYLALAHMIKFRGHFLIEGDLNPDNSDVDKLFIQLVQTYNQLFEENPINASGVDAKAILSARLSKSRRLENLIAQLPGEKKNGLFGNLIALSLGLTPNFKSNFDLAEDAKLQLSKDTYDDDLDNLLAQIGDQYADLFLAAKNLSDAILLSDILRVNTEITKAPLSASMIKRYDEHHQDLTLLKALVRQQLPEKYKEIFFDQSKNGYAGYIDGGASQEEFYKFIKPILEKMDGTEELLVKLNREDLLRKQRTFDNGSIPHQIHLGELHAILRRQEDFYPFLKDNREKIEKILTFRIPYYVGPLARGNSRFAWMTRKSEETITPWNFEEVVDKGASAQSFIERMTNFDKNLPNEKVLPKHSLLYEYFTVYNELTKVKYVTEGMRKPAFLSGEQKKAIVDLLFKTNRKVTVKQLKEDYFKKIECFDSVEISGVEDRFNASLGTYHDLLKIIKDKDFLDNEENEDILEDIVLTLTLFEDREMIEERLKTYAHLFDDKVMKQLKRRRYTGWGRLSRKLINGIRDKQSGKTILDFLKSDGFANRNFMQLIHDDSLTFKEDIQKAQVSGQGDSLHEHIANLAGSPAIKKGILQTVKVVDELVKVMGRHKPENIVIEMARENQTTQKGQKNSRERMKRIEEGIKELGSQILKEHPVENTQLQNEKLYLYYLQNGRDMYVDQELDINRLSDYDVDHIVPQSFLKDDSIDNKVLTRSDKARGKSDNVPSEEVVKKMKNYWRQLLNAKLITQRKFDNLTKAERGGLSELDKAGFIKRQLVETRQITKHVAQILDSRMNTKYDENDKLIREVKVITLKSKLVSDFRKDFQFYKVREINNYHHAHDAYLNAVVGTALIKKYPKLESEFVYGDYKVYDVRKMIAKSEQEIGKATAKYFFYSNIMNFFKTEITLANGEIRKRPLIETNGETGEIVWDKGRDFATVRKVLSMPQVNIVKKTEVQTGGFSKESILPKRNSDKLIARKKDWDPKKYGGFDSPTVAYSVLVVAKVEKGKSKKLKSVKELLGITIMERSSFEKNPIDFLEAKGYKEVKKDLIIKLPKYSLFELENGRKRMLASAGELQKGNELALPSKYVNFLYLASHYEKLKGSPEDNEQKQLFVEQHKHYLDEIIEQISEFSKRVILADANLDKVLSAYNKHRDKPIREQAENIIHLFTLTNLGAPAAFKYFDTTIDRKRYTSTKEVLDATLIHQSITGLYETRIDLSQLGGDGGGGGGSGGGGSGGGGSGGGGSGGGGSGGMDPLQLLQPLEAEIKGTKLKAHWNSGATITCVPQAFLEEEVPIKNIWIKTIHGEKEQPVYYLTFKIQGRKVEAEVISSPYDYILVSPSDIPWLMKKPLQLTTLVPLQEYEERLLKQTMLTGSYKEKLQSLFLKYDALWQHWENQVGHRRIKPHHIATGTVNPRPQKQYPINPKAKASIQTVINDLLKQGVLIQQNSIMNTPVYPVPKPDGKWRMVLDYREVNKTIPLIAAQNQHSAGILSSIFRGKYKTTLDLSNGFWAHSITPESYWLTAFTWLGQQYCWTRLPQGFLNSPALFNADVVDLLKEVPNVQVYVDDIYISHDDPREHLEQLEKVFSLLLNAGYVVSLKKSEIAQHEVEFLGFNITKEGRGLTETFKQKLLNITPPRDLKQLQSILGKLNFARNFIPNFSELVKPLYNIIATAPGKYITWTTDNSQQLQNIISMLNSAENLEERNPEVRLIMKVNTSPSAGYIRFYNEFAKRPIMYLNYVYTKAEVKFTNTEKLLTTIHKGLIKALDLGMGQEILVYSPIVSMTKIQKTPLPERKALPIRWITWMSYLEDPRIQFHYDKTLPELQQVPTVTDDIIAKIKHPSEFSMVFYTDGSAIKHPNVNKSHNAGMGIAQVQFKPEFTVINTWSIPLGDHTAQLAEVAAVEFACKKALKIDGPVLIVTDSFYVAESVNKELPYWQSNGFFNNKKKPLKHVSKWKSIADCIQLKPDIIIIHEKGHQPTASTFHTEGNNLADKLATQGSYVVNAGKRTADGSEFEKRTADGSEFESPKKKAKVE

SEQ ID NO: 6198 - protein, 2108 aa, synthetic construct
MPAAKRVKLDGGDKKYSIGLDIGTNSVGWAVITDEYKVPSKKFKVLGNTDRHSIKKNLIGALLFDSGETAEATRLKRTARRRYTRRKNRICYLQEIFSNEMAKVDDSFFHRLEESFLVEEDKKHERHPIFGNIVDEVAYHEKYPTIYHLRKKLVDSTDKADLRLIYLALAHMIKFRGHFLIEGDLNPDNSDVDKLFIQLVQTYNQLFEENPINASGVDAKAILSARLSKSRRLENLIAQLPGEKKNGLFGNLIALSLGLTPNFKSNFDLAEDAKLQLSKDTYDDDLDNLLAQIGDQYADLFLAAKNLSDAILLSDILRVNTEITKAPLSASMIKRYDEHHQDLTLLKALVRQQLPEKYKEIFFDQSKNGYAGYIDGGASQEEFYKFIKPILEKMDGTEELLVKLNREDLLRKQRTFDNGSIPHQIHLGELHAILRRQEDFYPFLKDNREKIEKILTFRIPYYVGPLARGNSRFAWMTRKSEETITPWNFEEVVDKGASAQSFIERMTNFDKNLPNEKVLPKHSLLYEYFTVYNELTKVKYVTEGMRKPAFLSGEQKKAIVDLLFKTNRKVTVKQLKEDYFKKIECFDSVEISGVEDRFNASLGTYHDLLKIIKDKDFLDNEENEDILEDIVLTLTLFEDREMIEERLKTYAHLFDDKVMKQLKRRRYTGWGRLSRKLINGIRDKQSGKTILDFLKSDGFANRNFMQLIHDDSLTFKEDIQKAQVSGQGDSLHEHIANLAGSPAIKKGILQTVKVVDELVKVMGRHKPENIVIEMARENQTTQKGQKNSRERMKRIEEGIKELGSQILKEHPVENTQLQNEKLYLYYLQNGRDMYVDQELDINRLSDYDVDHIVPQSFLKDDSIDNKVLTRSDKARGKSDNVPSEEVVKKMKNYWRQLLNAKLITQRKFDNLTKAERGGLSELDKAGFIKRQLVETRQITKHVAQILDSRMNTKYDENDKLIREVKVITLKSKLVSDFRKDFQFYKVREINNYHHAHDAYLNAVVGTALIKKYPKLESEFVYGDYKVYDVRKMIAKSEQEIGKATAKYFFYSNIMNFFKTEITLANGEIRKRPLIETNGETGEIVWDKGRDFATVRKVLSMPQVNIVKKTEVQTGGFSKESILPKRNSDKLIARKKDWDPKKYGGFDSPTVAYSVLVVAKVEKGKSKKLKSVKELLGITIMERSSFEKNPIDFLEAKGYKEVKKDLIIKLPKYSLFELENGRKRMLASAGELQKGNELALPSKYVNFLYLASHYEKLKGSPEDNEQKQLFVEQHKHYLDEIIEQISEFSKRVILADANLDKVLSAYNKHRDKPIREQAENIIHLFTLTNLGAPAAFKYFDTTIDRKRYTSTKEVLDATLIHQSITGLYETRIDLSQLGGDGGGGGGSGGGGSGGGGSGGGGSGGGGSGGVLNLEEEYRLHEKPVPSSIDPSWLQLFPTVWAERAGMGLANQVPPVVVELRSGASPVAVRQYPMSKEAREGIRPHIQRFLDLGVLVPCQSPWNTPLLPVKKPGTNDYRPVQDLREINKRVQDIHPTVPNPYNLLSSLPPSHTWYSVLDLKDAFFCLKLHPNSQPLFAFEWRDPEKGNTGQLTWTRLPQGFKNSPTLFNEALHRDLAPFRALNPQVVLLQYVDDLLVAAPTYRDCKEGTQKLLQELSKLGYRVSAKKAQLCQKEVTYLGYLLKEGKRWLTPARKATVMKIPPPTTPRQVREFLGTAGFCRLWIPGFASLAAPLYPLTKPSIPFIWTEEHQKAFDRIKEALLSAPALALPDLTKPFTLYVDERAGVARGVLTQTLGPWRRPVAYLSKKLDPVASGWPTCLKAVAAVALLLKDADKLTLGQNVTVIASHSLESIVRQPPDRWMTNARMTHYQSLLLNERVSFAPPAVLNPATLLPVESEATPVHRCSEILAEETGTRRDLKDQPLPGVPAWYTDGSSFIAEGKRRAGAAIVDGKRTVWASSLPEGTSAQKAELVALTQALRLAEGKDINIYTDSRYAFATAHIHGAIYKQRGWLTSAGKDIKNKEEILALLEAIHLPKRVAIIHCPGHQKGNDPVATGNRRADEAAKQAALSTRVLAETTKPAGKRTADGSEFEKRTADGSEFESPKKKAKVE

SEQ ID NO: 6199 - protein, 2110 aa, synthetic construct
MPAAKRVKLDGGDKKYSIGLDIGTNSVGWAVITDEYKVPSKKFKVLGNTDRHSIKKNLIGALLFDSGETAEATRLKRTARRRYTRRKNRICYLQEIFSNEMAKVDDSFFHRLEESFLVEEDKKHERHPIFGNIVDEVAYHEKYPTIYHLRKKLVDSTDKADLRLIYLALAHMIKFRGHFLIEGDLNPDNSDVDKLFIQLVQTYNQLFEENPINASGVDAKAILSARLSKSRRLENLIAQLPGEKKNGLFGNLIALSLGLTPNFKSNFDLAEDAKLQLSKDTYDDDLDNLLAQIGDQYADLFLAAKNLSDAILLSDILRVNTEITKAPLSASMIKRYDEHHQDLTLLKALVRQQLPEKYKEIFFDQSKNGYAGYIDGGASQEEFYKFIKPILEKMDGTEELLVKLNREDLLRKQRTFDNGSIPHQIHLGELHAILRRQEDFYPFLKDNREKIEKILTFRIPYYVGPLARGNSRFAWMTRKSEETITPWNFEEVVDKGASAQSFIERMTNFDKNLPNEKVLPKHSLLYEYFTVYNELTKVKYVTEGMRKPAFLSGEQKKAIVDLLFKTNRKVTVKQLKEDYFKKIECFDSVEISGVEDRFNASLGTYHDLLKIIKDKDFLDNEENEDILEDIVLTLTLFEDREMIEERLKTYAHLFDDKVMKQLKRRRYTGWGRLSRKLINGIRDKQSGKTILDFLKSDGFANRNFMQLIHDDSLTFKEDIQKAQVSGQGDSLHEHIANLAGSPAIKKGILQTVKVVDELVKVMGRHKPENIVIEMARENQTTQKGQKNSRERMKRIEEGIKELGSQILKEHPVENTQLQNEKLYLYYLQNGRDMYVDQELDINRLSDYDVDHIVPQSFLKDDSIDNKVLTRSDKARGKSDNVPSEEVVKKMKNYWRQLLNAKLITQRKFDNLTKAERGGLSELDKAGFIKRQLVETRQITKHVAQILDSRMNTKYDENDKLIREVKVITLKSKLVSDFRKDFQFYKVREINNYHHAHDAYLNAVVGTALIKKYPKLESEFVYGDYKVYDVRKMIAKSEQEIGKATAKYFFYSNIMNFFKTEITLANGEIRKRPLIETNGETGEIVWDKGRDFATVRKVLSMPQVNIVKKTEVQTGGFSKESILPKRNSDKLIARKKDWDPKKYGGFDSPTVAYSVLVVAKVEKGKSKKLKSVKELLGITIMERSSFEKNPIDFLEAKGYKEVKKDLIIKLPKYSLFELENGRKRMLASAGELQKGNELALPSKYVNFLYLASHYEKLKGSPEDNEQKQLFVEQHKHYLDEIIEQISEFSKRVILADANLDKVLSAYNKHRDKPIREQAENIIHLFTLTNLGAPAAFKYFDTTIDRKRYTSTKEVLDATLIHQSITGLYETRIDLSQLGGDGGGGGGSGGGGSGGGGSGGGGSGGGGSGGTLNIEDEYRLHETSKEPDVPLGSTWLSDFPQAWAETGGMGLAVRQAPLIIPLKATSTPVSIKQYPMSQEARLGIKPHIQRLLDQGILVPCQSPWNTPLLPVKKPGTNDYRPVQDLREVNKRVEDIHPTVPNPYNLLSGLPPSHQWYTVLDLKDAFFCLRLHPTSQPLFAFEWRDPEMGISGQLTWTRLPQGFKNSPTLFNEALHRDLADFRIQHPDLILLQYVDDLLLAATSEQDCQRGTRALLQTLGNLGYRASAKKAQICQKQVKYLGYLLKEGQRWLTEARKETVMGQPTPKTPRQLREFLGTAGFCRLWIPGFAEMAAPLYPLTKPGTLFNWGPDQQKAYQEIKQALLTAPALGLPDLTKPFELFVDEKQGYAKGVLTQKLGPWRRPVAYLSKKLDPVAAGWPPCLRMVAAIAVLTKDAGKLTMGQPLVILAPHAVEALVKQPPDRWLSNARMTHYQAMLLDTDRVQFGPVVALNPATLLPLPEKEAPHDCLEILAETHGTRPDLTDQPIPDADYTWYTDGSSFLQEGQRRAGAAVTTETEVIWARALPAGTSAQRAELIALTQALKMAEGKKLNVYTDSRYAFATAHVHGEIYRRRGWLTSEGREIKNKNEILALLKALFLPKRLSIIHCPGHQKGNSAEARGNRMADQAAREAAMKAVLETSTLLAGKRTADGSEFEKRTADGSEFESPKKKAKVE

SEQ ID NO: 6200 - protein, 2117 aa, synthetic construct
MPAAKRVKLDGGDKKYSIGLDIGTNSVGWAVITDEYKVPSKKFKVLGNTDRHSIKKNLIGALLFDSGETAEATRLKRTARRRYTRRKNRICYLQEIFSNEMAKVDDSFFHRLEESFLVEEDKKHERHPIFGNIVDEVAYHEKYPTIYHLRKKLVDSTDKADLRLIYLALAHMIKFRGHFLIEGDLNPDNSDVDKLFIQLVQTYNQLFEENPINASGVDAKAILSARLSKSRRLENLIAQLPGEKKNGLFGNLIALSLGLTPNFKSNFDLAEDAKLQLSKDTYDDDLDNLLAQIGDQYADLFLAAKNLSDAILLSDILRVNTEITKAPLSASMIKRYDEHHQDLTLLKALVRQQLPEKYKEIFFDQSKNGYAGYIDGGASQEEFYKFIKPILEKMDGTEELLVKLNREDLLRKQRTFDNGSIPHQIHLGELHAILRRQEDFYPFLKDNREKIEKILTFRIPYYVGPLARGNSRFAWMTRKSEETITPWNFEEVVDKGASAQSFIERMTNFDKNLPNEKVLPKHSLLYEYFTVYNELTKVKYVTEGMRKPAFLSGEQKKAIVDLLFKTNRKVTVKQLKEDYFKKIECFDSVEISGVEDRFNASLGTYHDLLKIIKDKDFLDNEENEDILEDIVLTLTLFEDREMIEERLKTYAHLFDDKVMKQLKRRRYTGWGRLSRKLINGIRDKQSGKTILDFLKSDGFANRNFMQLIHDDSLTFKEDIQKAQVSGQGDSLHEHIANLAGSPAIKKGILQTVKVVDELVKVMGRHKPENIVIEMARENQTTQKGQKNSRERMKRIEEGIKELGSQILKEHPVENTQLQNEKLYLYYLQNGRDMYVDQELDINRLSDYDVDHIVPQSFLKDDSIDNKVLTRSDKARGKSDNVPSEEVVKKMKNYWRQLLNAKLITQRKFDNLTKAERGGLSELDKAGFIKRQLVETRQITKHVAQILDSRMNTKYDENDKLIREVKVITLKSKLVSDFRKDFQFYKVREINNYHHAHDAYLNAVVGTALIKKYPKLESEFVYGDYKVYDVRKMIAKSEQEIGKATAKYFFYSNIMNFFKTEITLANGEIRKRPLIETNGETGEIVWDKGRDFATVRKVLSMPQVNIVKKTEVQTGGFSKESILPKRNSDKLIARKKDWDPKKYGGFDSPTVAYSVLVVAKVEKGKSKKLKSVKELLGITIMERSSFEKNPIDFLEAKGYKEVKKDLIIKLPKYSLFELENGRKRMLASAGELQKGNELALPSKYVNFLYLASHYEKLKGSPEDNEQKQLFVEQHKHYLDEIIEQISEFSKRVILADANLDKVLSAYNKHRDKPIREQAENIIHLFTLTNLGAPAAFKYFDTTIDRKRYTSTKEVLDATLIHQSITGLYETRIDLSQLGGDGGGGGGSGGGGSGGGGSGGGGSGGGGSGGGGSGGTAPLEEEYRLFLEAPIQNVTLLEQWKREIPKVWAEINPPGLASTQAPIHVQLLSTALPVRVRQYPITLEAKRSLRETIRKFRAAGILRPVHSPWNTPLLPVRKSGTSEYRMVQDLREVNKRVETIHPTVPNPYTLLSLLPPDRIWYSVLDLKDAFFCIPLAPESQLIFAFEWADAEEGESGQLTWTRLPQGFKNSPTLFDEALNRDLQGFRLDHPSVSLLQYVDDLLIAADTQAACLSATRDLLMTLAELGYRVSGKKAQLCQEEVTYLGFKIHKGSRSLSNSRTQAILQIPVPKTKRQVREFLGTIGYCRLWIPGFAELAQPLYAATRGGNDPLVWGEKEEEAFQSLKLALTQPPALALPSLDKPFQLFVEETSGAAKGVLTQALGPWKRPVAYLSKRLDPVAAGWPRCLRAIAAAALLTREASKLTFGQDIEITSSHNLESLLRSPPDKWLTNARITQYQVLLLDPPRVRFKQTAALNPATLLPETDDTLPIHHCLDTLDSLTSTRPDLTDQPLAQAEATLFTDGSSYIRDGKRYAGAAVVTLDSVIWAEPLPIGTSAQKAELIALTKALEWSKDKSVNIYTDSRYAFATLHVHGMIYRERGLLTAGGKAIKNAPEILALLTAVWLPKRVAVMHCKGHQKDDAPTSTGNRRADEVAREVAIRPLSTQATISAGKRTADGSEFEKRTADGSEFESPKKKAKVE

SEQ ID NO: 6201 - protein, 2117 aa, synthetic construct
MPAAKRVKLDGGDKKYSIGLDIGTNSVGWAVITDEYKVPSKKFKVLGNTDRHSIKKNLIGALLFDSGETAEATRLKRTARRRYTRRKNRICYLQEIFSNEMAKVDDSFFHRLEESFLVEEDKKHERHPIFGNIVDEVAYHEKYPTIYHLRKKLVDSTDKADLRLIYLALAHMIKFRGHFLIEGDLNPDNSDVDKLFIQLVQTYNQLFEENPINASGVDAKAILSARLSKSRRLENLIAQLPGEKKNGLFGNLIALSLGLTPNFKSNFDLAEDAKLQLSKDTYDDDLDNLLAQIGDQYADLFLAAKNLSDAILLSDILRVNTEITKAPLSASMIKRYDEHHQDLTLLKALVRQQLPEKYKEIFFDQSKNGYAGYIDGGASQEEFYKFIKPILEKMDGTEELLVKLNREDLLRKQRTFDNGSIPHQIHLGELHAILRRQEDFYPFLKDNREKIEKILTFRIPYYVGPLARGNSRFAWMTRKSEETITPWNFEEVVDKGASAQSFIERMTNFDKNLPNEKVLPKHSLLYEYFTVYNELTKVKYVTEGMRKPAFLSGEQKKAIVDLLFKTNRKVTVKQLKEDYFKKIECFDSVEISGVEDRFNASLGTYHDLLKIIKDKDFLDNEENEDILEDIVLTLTLFEDREMIEERLKTYAHLFDDKVMKQLKRRRYTGWGRLSRKLINGIRDKQSGKTILDFLKSDGFANRNFMQLIHDDSLTFKEDIQKAQVSGQGDSLHEHIANLAGSPAIKKGILQTVKVVDELVKVMGRHKPENIVIEMARENQTTQKGQKNSRERMKRIEEGIKELGSQILKEHPVENTQLQNEKLYLYYLQNGRDMYVDQELDINRLSDYDVDHIVPQSFLKDDSIDNKVLTRSDKARGKSDNVPSEEVVKKMKNYWRQLLNAKLITQRKFDNLTKAERGGLSELDKAGFIKRQLVETRQITKHVAQILDSRMNTKYDENDKLIREVKVITLKSKLVSDFRKDFQFYKVREINNYHHAHDAYLNAVVGTALIKKYPKLESEFVYGDYKVYDVRKMIAKSEQEIGKATAKYFFYSNIMNFFKTEITLANGEIRKRPLIETNGETGEIVWDKGRDFATVRKVLSMPQVNIVKKTEVQTGGFSKESILPKRNSDKLIARKKDWDPKKYGGFDSPTVAYSVLVVAKVEKGKSKKLKSVKELLGITIMERSSFEKNPIDFLEAKGYKEVKKDLIIKLPKYSLFELENGRKRMLASAGELQKGNELALPSKYVNFLYLASHYEKLKGSPEDNEQKQLFVEQHKHYLDEIIEQISEFSKRVILADANLDKVLSAYNKHRDKPIREQAENIIHLFTLTNLGAPAAFKYFDTTIDRKRYTSTKEVLDATLIHQSITGLYETRIDLSQLGGDGGGGGGSGGGGSGGGGSGGGGSGGGGSGGGGSGGTAPLEEEYRLFLEAPIQNVTLLEQWKREIPKVWAEINPPGLASTQAPIHVQLLSTALPVRVRQYPITLEAKRSLRETIRKFRAAGILRPVHSPWNTPLLPVRKSGTSEYRMVQDLREVNKRVETIHPTVPNPYTLLSLLPPDRIWYSVLDLKDAFFCIPLAPESQLIFAFEWADAEEGESGQLTWTRLPQGFKNSPTLFNEALNRDLQGFRLDHPSVSLLQYVDDLLIAADTQAACLSATRDLLMTLAELGYRVSGKKAQLCQEEVTYLGFKIHKGSRSLSNSRTQAILQIPVPKTKRQVREFLGTIGYCRLWIPGFAELAQPLYAATRPGNDPLVWGEKEEEAFQSLKLALTQPPALALPSLDKPFQLFVEETSGAAKGVLTQALGPWKRPVAYLSKRLDPVAAGWPRCLRAIAAAALLTREASKLTFGQDIEITSSHNLESLLRSPPDKWLTNARITQYQVLLLDPPRVRFKQTAALNPATLLPETDDTLPIHHCLDTLDSLTSTRPDLTDQPLAQAEATLFTDGSSYIRDGKRYAGAAVVTLDSVIWAEPLPIGTSAQKAELIALTKALEWSKDKSVNIYTDSRYAFATLHVHGMIYRERGWLTAGGKAIKNAPEILALLTAVWLPKRVAVMHCKGHQKDDAPTSTGNRRADEVAREVAIRPLSTQATISAGKRTADGSEFEKRTADGSEFESPKKKAKVE

SEQ ID NO: 6202 - protein, 2121 aa, synthetic construct
MPAAKRVKLDGGDKKYSIGLDIGTNSVGWAVITDEYKVPSKKFKVLGNTDRHSIKKNLIGALLFDSGETAEATRLKRTARRRYTRRKNRICYLQEIFSNEMAKVDDSFFHRLEESFLVEEDKKHERHPIFGNIVDEVAYHEKYPTIYHLRKKLVDSTDKADLRLIYLALAHMIKFRGHFLIEGDLNPDNSDVDKLFIQLVQTYNQLFEENPINASGVDAKAILSARLSKSRRLENLIAQLPGEKKNGLFGNLIALSLGLTPNFKSNFDLAEDAKLQLSKDTYDDDLDNLLAQIGDQYADLFLAAKNLSDAILLSDILRVNTEITKAPLSASMIKRYDEHHQDLTLLKALVRQQLPEKYKEIFFDQSKNGYAGYIDGGASQEEFYKFIKPILEKMDGTEELLVKLNREDLLRKQRTFDNGSIPHQIHLGELHAILRRQEDFYPFLKDNREKIEKILTFRIPYYVGPLARGNSRFAWMTRKSEETITPWNFEEVVDKGASAQSFIERMTNFDKNLPNEKVLPKHSLLYEYFTVYNELTKVKYVTEGMRKPAFLSGEQKKAIVDLLFKTNRKVTVKQLKEDYFKKIECFDSVEISGVEDRFNASLGTYHDLLKIIKDKDFLDNEENEDILEDIVLTLTLFEDREMIEERLKTYAHLFDDKVMKQLKRRRYTGWGRLSRKLINGIRDKQSGKTILDFLKSDGFANRNFMQLIHDDSLTFKEDIQKAQVSGQGDSLHEHIANLAGSPAIKKGILQTVKVVDELVKVMGRHKPENIVIEMARENQTTQKGQKNSRERMKRIEEGIKELGSQILKEHPVENTQLQNEKLYLYYLQNGRDMYVDQELDINRLSDYDVDHIVPQSFLKDDSIDNKVLTRSDKARGKSDNVPSEEVVKKMKNYWRQLLNAKLITQRKFDNLTKAERGGLSELDKAGFIKRQLVETRQITKHVAQILDSRMNTKYDENDKLIREVKVITLKSKLVSDFRKDFQFYKVREINNYHHAHDAYLNAVVGTALIKKYPKLESEFVYGDYKVYDVRKMIAKSEQEIGKATAKYFFYSNIMNFFKTEITLANGEIRKRPLIETNGETGEIVWDKGRDFATVRKVLSMPQVNIVKKTEVQTGGFSKESILPKRNSDKLIARKKDWDPKKYGGFDSPTVAYSVLVVAKVEKGKSKKLKSVKELLGITIMERSSFEKNPIDFLEAKGYKEVKKDLIIKLPKYSLFELENGRKRMLASAGELQKGNELALPSKYVNFLYLASHYEKLKGSPEDNEQKQLFVEQHKHYLDEIIEQISEFSKRVILADANLDKVLSAYNKHRDKPIREQAENIIHLFTLTNLGAPAAFKYFDTTIDRKRYTSTKEVLDATLIHQSITGLYETRIDLSQLGGDGGGGGGSGGGGSGGGGSGGGGSGGGGSGGGGSGGTVSLQDEHRLFDIPVTTSLPDVWLQDFPQAWAETGGLGRAKCQAPIIIDLKPTAVPVSIKQYPMSLEAHMGIRQHIIKFLELGVLRPCRSPWNTPLLPVKKPGTQDYRPVQDLREINKRTVDIHPTVPNPYNLLSTLKPDYSWYTVLDLKDAFFCLPLAPQSQELFAFEWKDPERGISGQLTWTRLPQGFKNSPTLFDEALHRDLTDFRTQHPEVTLLQYVDDLLLAAPTKKACTQGTRHLLQELGEKGYRASAKKAQICQTKVTYLGYILSEGKRWLTPGRIETVARIPPPRNPREVREFLGTAGFCRLWIPGFAELAAPLYALTKESTPFTWQTEHQLAFEALKKALLSAPALGLPDTSKPFTLFLDERQGIAKGVLTQKLGPWKRPVAYLSKKLDPVAAGWPPCLRIMAATAMLVKDSAKLTLGQPLTVITPHTLEAIVRQPPDRWITNARLTHYQALLLDTDRVQFGPPVTLNPATLLPVPENQPSPHDCRQVLAETHGTREDLKDQELPDADHTWYTDGSSYLDSGTRRAGAAVVDGHNTIWAQSLPPGTSAQKAELIALTKALELSKGKKANIYTDSRYAFATAHTHGSIYERRGLLTSEGKEIKNKAEIIALLKALFLPQEVAIIHCPGHQKGQDPVAVGNRQADRVARQAAMAEVLTLATEPDNTSHITAGKRTADGSEFEKRTADGSEFESPKKKAKVE

SEQ ID NO: 6203 - protein, 2121 aa, synthetic construct
MPAAKRVKLDGGDKKYSIGLDIGTNSVGWAVITDEYKVPSKKFKVLGNTDRHSIKKNLIGALLFDSGETAEATRLKRTARRRYTRRKNRICYLQEIFSNEMAKVDDSFFHRLEESFLVEEDKKHERHPIFGNIVDEVAYHEKYPTIYHLRKKLVDSTDKADLRLIYLALAHMIKFRGHFLIEGDLNPDNSDVDKLFIQLVQTYNQLFEENPINASGVDAKAILSARLSKSRRLENLIAQLPGEKKNGLFGNLIALSLGLTPNFKSNFDLAEDAKLQLSKDTYDDDLDNLLAQIGDQYADLFLAAKNLSDAILLSDILRVNTEITKAPLSASMIKRYDEHHQDLTLLKALVRQQLPEKYKEIFFDQSKNGYAGYIDGGASQEEFYKFIKPILEKMDGTEELLVKLNREDLLRKQRTFDNGSIPHQIHLGELHAILRRQEDFYPFLKDNREKIEKILTFRIPYYVGPLARGNSRFAWMTRKSEETITPWNFEEVVDKGASAQSFIERMTNFDKNLPNEKVLPKHSLLYEYFTVYNELTKVKYVTEGMRKPAFLSGEQKKAIVDLLFKTNRKVTVKQLKEDYFKKIECFDSVEISGVEDRFNASLGTYHDLLKIIKDKDFLDNEENEDILEDIVLTLTLFEDREMIEERLKTYAHLFDDKVMKQLKRRRYTGWGRLSRKLINGIRDKQSGKTILDFLKSDGFANRNFMQLIHDDSLTFKEDIQKAQVSGQGDSLHEHIANLAGSPAIKKGILQTVKVVDELVKVMGRHKPENIVIEMARENQTTQKGQKNSRERMKRIEEGIKELGSQILKEHPVENTQLQNEKLYLYYLQNGRDMYVDQELDINRLSDYDVDHIVPQSFLKDDSIDNKVLTRSDKARGKSDNVPSEEVVKKMKNYWRQLLNAKLITQRKFDNLTKAERGGLSELDKAGFIKRQLVETRQITKHVAQILDSRMNTKYDENDKLIREVKVITLKSKLVSDFRKDFQFYKVREINNYHHAHDAYLNAVVGTALIKKYPKLESEFVYGDYKVYDVRKMIAKSEQEIGKATAKYFFYSNIMNFFKTEITLANGEIRKRPLIETNGETGEIVWDKGRDFATVRKVLSMPQVNIVKKTEVQTGGFSKESILPKRNSDKLIARKKDWDPKKYGGFDSPTVAYSVLVVAKVEKGKSKKLKSVKELLGITIMERSSFEKNPIDFLEAKGYKEVKKDLIIKLPKYSLFELENGRKRMLASAGELQKGNELALPSKYVNFLYLASHYEKLKGSPEDNEQKQLFVEQHKHYLDEIIEQISEFSKRVILADANLDKVLSAYNKHRDKPIREQAENIIHLFTLTNLGAPAAFKYFDTTIDRKRYTSTKEVLDATLIHQSITGLYETRIDLSQLGGDGGGGGGSGGGGSGGGGSGGGGSGGGGSGGGGSGGTVSLQDEHRLFDIPVTTSLPDVWLQDFPQAWAETGGLGRAKCQAPIIIDLKPTAVPVSIKQYPMSLEAHMGIRQHIIKFLELGVLRPCRSPWNTPLLPVKKPGTQDYRPVQDLREINKRTVDIHPTVPNPYNLLSTLKPDYSWYTVLDLKDAFFCLPLAPQSQELFAFEWKDPERGISGQLTWTRLPQGFKNSPTLFNEALHRDLTDFRTQHPEVTLLQYVDDLLLAAPTKKACTQGTRHLLQELGEKGYRASAKKAQICQTKVTYLGYILSEGKRWLTPGRIETVARIPPPRNPREVREFLGTAGFCRLWIPGFAELAAPLYALTKPSTPFTWQTEHQLAFEALKKALLSAPALGLPDTSKPFTLFLDERQGIAKGVLTQKLGPWKRPVAYLSKKLDPVAAGWPPCLRIMAATAMLVKDSAKLTLGQPLTVITPHTLEAIVRQPPDRWITNARLTHYQALLLDTDRVQFGPPVTLNPATLLPVPENQPSPHDCRQVLAETHGTREDLKDQELPDADHTWYTDGSSYLDSGTRRAGAAVVDGHNTIWAQSLPPGTSAQKAELIALTKALELSKGKKANIYTDSRYAFATAHTHGSIYERRGWLTSEGKEIKNKAEIIALLKALFLPQEVAIIHCPGHQKGQDPVAVGNRQADRVARQAAMAEVLTLATEPDNTSHITAGKRTADGSEFEKRTADGSEFESPKKKAKVE

SEQ ID NO: 6204 - protein, 2106 aa, synthetic construct
MPAAKRVKLDGGDKKYSIGLDIGTNSVGWAVITDEYKVPSKKFKVLGNTDRHSIKKNLIGALLFDSGETAEATRLKRTARRRYTRRKNRICYLQEIFSNEMAKVDDSFFHRLEESFLVEEDKKHERHPIFGNIVDEVAYHEKYPTIYHLRKKLVDSTDKADLRLIYLALAHMIKFRGHFLIEGDLNPDNSDVDKLFIQLVQTYNQLFEENPINASGVDAKAILSARLSKSRRLENLIAQLPGEKKNGLFGNLIALSLGLTPNFKSNFDLAEDAKLQLSKDTYDDDLDNLLAQIGDQYADLFLAAKNLSDAILLSDILRVNTEITKAPLSASMIKRYDEHHQDLTLLKALVRQQLPEKYKEIFFDQSKNGYAGYIDGGASQEEFYKFIKPILEKMDGTEELLVKLNREDLLRKQRTFDNGSIPHQIHLGELHAILRRQEDFYPFLKDNREKIEKILTFRIPYYVGPLARGNSRFAWMTRKSEETITPWNFEEVVDKGASAQSFIERMTNFDKNLPNEKVLPKHSLLYEYFTVYNELTKVKYVTEGMRKPAFLSGEQKKAIVDLLFKTNRKVTVKQLKEDYFKKIECFDSVEISGVEDRFNASLGTYHDLLKIIKDKDFLDNEENEDILEDIVLTLTLFEDREMIEERLKTYAHLFDDKVMKQLKRRRYTGWGRLSRKLINGIRDKQSGKTILDFLKSDGFANRNFMQLIHDDSLTFKEDIQKAQVSGQGDSLHEHIANLAGSPAIKKGILQTVKVVDELVKVMGRHKPENIVIEMARENQTTQKGQKNSRERMKRIEEGIKELGSQILKEHPVENTQLQNEKLYLYYLQNGRDMYVDQELDINRLSDYDVDHIVPQSFLKDDSIDNKVLTRSDKARGKSDNVPSEEVVKKMKNYWRQLLNAKLITQRKFDNLTKAERGGLSELDKAGFIKRQLVETRQITKHVAQILDSRMNTKYDENDKLIREVKVITLKSKLVSDFRKDFQFYKVREINNYHHAHDAYLNAVVGTALIKKYPKLESEFVYGDYKVYDVRKMIAKSEQEIGKATAKYFFYSNIMNFFKTEITLANGEIRKRPLIETNGETGEIVWDKGRDFATVRKVLSMPQVNIVKKTEVQTGGFSKESILPKRNSDKLIARKKDWDPKKYGGFDSPTVAYSVLVVAKVEKGKSKKLKSVKELLGITIMERSSFEKNPIDFLEAKGYKEVKKDLIIKLPKYSLFELENGRKRMLASAGELQKGNELALPSKYVNFLYLASHYEKLKGSPEDNEQKQLFVEQHKHYLDEIIEQISEFSKRVILADANLDKVLSAYNKHRDKPIREQAENIIHLFTLTNLGAPAAFKYFDTTIDRKRYTSTKEVLDATLIHQSITGLYETRIDLSQLGGDGGGGGGSGGGGSGGGGSGGGGSGGGGSGGGGSGGVPWILKKPLELTIKLDLEEQQGTLLNNSILSKKGKEELKQLFEKYSALWQSWENQVGHRRIRPHKIATGTVKPTPQKQYHINPKAKPDIQIVINDLLKQGVLIQKESTMNTPVYPVPKPNGRWRMVLDYRAVNKVTPLIAVQNQHSYGILGSLFKGRYKTTIDLSNGFWAHPIVPEDYWITAFTWQGKQYCWTVLPQGFLNSPGLFNGDVVDLLQGIPNVEVYVDDVYISHDSEKEHLEYLDILFNRLKEAGYIISLKKSNIANSIVDFLGFQITNEGRGLTDTFKEKLENITAPTTLKQLQSILGLLNFARNFIPDFTELIAPLYALIPKSPKNYVPWQIEHSTTLETLITKLNGAEYLQGRKGDKTLIMKVNASYTTGYIRYYNEGEKKPISYVSIVFSKTELKFTELEKLLTTVHKGLLKALDLSMGQNIHVYSPIVSMQNIQKTPQTAKKALASRWLSWLSYLEDPRIRFFYDPQMPALKDLPAVDTGKDNKKHPSNFQHIFYTDGSAITSPTKEGHLNAGMGIVYFINKDGNLQKQQEWSISLGNHTAQFAEIAAFEFALKKCLPLGGNILVVTDSNYVAKAYNEELDVWASNGFVNNRKKPLKHISKWKSVADLKRLRPDVVVTHEPGHQKLDSSPHAYGNNLADQLATQASFKVHAGKRTADGSEFEKRTADGSEFESPKKKAKVE

SEQ ID NO: 6205 - protein, 2114 aa, synthetic construct
MPAAKRVKLDGGDKKYSIGLDIGTNSVGWAVITDEYKVPSKKFKVLGNTDRHSIKKNLIGALLFDSGETAEATRLKRTARRRYTRRKNRICYLQEIFSNEMAKVDDSFFHRLEESFLVEEDKKHERHPIFGNIVDEVAYHEKYPTIYHLRKKLVDSTDKADLRLIYLALAHMIKFRGHFLIEGDLNPDNSDVDKLFIQLVQTYNQLFEENPINASGVDAKAILSARLSKSRRLENLIAQLPGEKKNGLFGNLIALSLGLTPNFKSNFDLAEDAKLQLSKDTYDDDLDNLLAQIGDQYADLFLAAKNLSDAILLSDILRVNTEITKAPLSASMIKRYDEHHQDLTLLKALVRQQLPEKYKEIFFDQSKNGYAGYIDGGASQEEFYKFIKPILEKMDGTEELLVKLNREDLLRKQRTFDNGSIPHQIHLGELHAILRRQEDFYPFLKDNREKIEKILTFRIPYYVGPLARGNSRFAWMTRKSEETITPWNFEEVVDKGASAQSFIERMTNFDKNLPNEKVLPKHSLLYEYFTVYNELTKVKYVTEGMRKPAFLSGEQKKAIVDLLFKTNRKVTVKQLKEDYFKKIECFDSVEISGVEDRFNASLGTYHDLLKIIKDKDFLDNEENEDILEDIVLTLTLFEDREMIEERLKTYAHLFDDKVMKQLKRRRYTGWGRLSRKLINGIRDKQSGKTILDFLKSDGFANRNFMQLIHDDSLTFKEDIQKAQVSGQGDSLHEHIANLAGSPAIKKGILQTVKVVDELVKVMGRHKPENIVIEMARENQTTQKGQKNSRERMKRIEEGIKELGSQILKEHPVENTQLQNEKLYLYYLQNGRDMYVDQELDINRLSDYDVDHIVPQSFLKDDSIDNKVLTRSDKARGKSDNVPSEEVVKKMKNYWRQLLNAKLITQRKFDNLTKAERGGLSELDKAGFIKRQLVETRQITKHVAQILDSRMNTKYDENDKLIREVKVITLKSKLVSDFRKDFQFYKVREINNYHHAHDAYLNAVVGTALIKKYPKLESEFVYGDYKVYDVRKMIAKSEQEIGKATAKYFFYSNIMNFFKTEITLANGEIRKRPLIETNGETGEIVWDKGRDFATVRKVLSMPQVNIVKKTEVQTGGFSKESILPKRNSDKLIARKKDWDPKKYGGFDSPTVAYSVLVVAKVEKGKSKKLKSVKELLGITIMERSSFEKNPIDFLEAKGYKEVKKDLIIKLPKYSLFELENGRKRMLASAGELQKGNELALPSKYVNFLYLASHYEKLKGSPEDNEQKQLFVEQHKHYLDEIIEQISEFSKRVILADANLDKVLSAYNKHRDKPIREQAENIIHLFTLTNLGAPAAFKYFDTTIDRKRYTSTKEVLDATLIHQSITGLYETRIDLSQLGGDGGGGGGSGGGGSGGGGSGGGGSGGGGSGGGGSGGTLQLEEEYRLFEPESTQKQEMDIWLKNFPQAWAETGGMGTAHCQAPVLIQLKATATPISIRQYPMPHEAYQGIKPHIRRMLDQGILKPCQSPWNTPLLPVKKPGTEDYRPVQDLREVNKRVEDIHPTVPNPYNLLSTLPPSHPWYTVLDLKDAFFCLRLHSESQLLFAFEWRDPEIGLSGQLTWTRLPQGFKNSPTLFNEALHSDLADFRVRYPALVLLQYVDDLLLAAATRTECLEGTKALLETLGNKGYRASAKKAQICLQEVTYLGYSLKDGQRWLTKARKEAILSIPVPKNSRQVREFLGTAGYCRLWIPGFAELAAPLYPLTRPGTLFQWGTEQQLAFEDIKKALLSSPALGLPDITKPFELFIDENSGFAKGVLVQKLGPWKRPVAYLSKKLDTVASGWPPCLRMVAAIAILVKDAGKLTLGQPLTILTSHPVEALVRQPPNKWLSNARMTHYQAMLLDAERVHFGPTVSLNPATLLPLPSGGNHHDCLQILAETHGTRPDLTDQPLPDADLTWYTDGSSFIRNGEREAGAAVTTESEVIWAAPLPPGTSAQRAELIALTQALKMAEGKKLTVYTDSRYAFATTHVHGEIYRRRGWLTSEGKEIKNKNEILALLEALFLPKRLSIIHCPGHQKGDSPQAKGNRLADDTAKKAATETHSSLTVLPAGKRTADGSEFEKRTADGSEFESPKKKAKVE

SEQ ID NO: 6206 - protein, 2106 aa, synthetic construct
MPAAKRVKLDGGDKKYSIGLDIGTNSVGWAVITDEYKVPSKKFKVLGNTDRHSIKKNLIGALLFDSGETAEATRLKRTARRRYTRRKNRICYLQEIFSNEMAKVDDSFFHRLEESFLVEEDKKHERHPIFGNIVDEVAYHEKYPTIYHLRKKLVDSTDKADLRLIYLALAHMIKFRGHFLIEGDLNPDNSDVDKLFIQLVQTYNQLFEENPINASGVDAKAILSARLSKSRRLENLIAQLPGEKKNGLFGNLIALSLGLTPNFKSNFDLAEDAKLQLSKDTYDDDLDNLLAQIGDQYADLFLAAKNLSDAILLSDILRVNTEITKAPLSASMIKRYDEHHQDLTLLKALVRQQLPEKYKEIFFDQSKNGYAGYIDGGASQEEFYKFIKPILEKMDGTEELLVKLNREDLLRKQRTFDNGSIPHQIHLGELHAILRRQEDFYPFLKDNREKIEKILTFRIPYYVGPLARGNSRFAWMTRKSEETITPWNFEEVVDKGASAQSFIERMTNFDKNLPNEKVLPKHSLLYEYFTVYNELTKVKYVTEGMRKPAFLSGEQKKAIVDLLFKTNRKVTVKQLKEDYFKKIECFDSVEISGVEDRFNASLGTYHDLLKIIKDKDFLDNEENEDILEDIVLTLTLFEDREMIEERLKTYAHLFDDKVMKQLKRRRYTGWGRLSRKLINGIRDKQSGKTILDFLKSDGFANRNFMQLIHDDSLTFKEDIQKAQVSGQGDSLHEHIANLAGSPAIKKGILQTVKVVDELVKVMGRHKPENIVIEMARENQTTQKGQKNSRERMKRIEEGIKELGSQILKEHPVENTQLQNEKLYLYYLQNGRDMYVDQELDINRLSDYDVDHIVPQSFLKDDSIDNKVLTRSDKARGKSDNVPSEEVVKKMKNYWRQLLNAKLITQRKFDNLTKAERGGLSELDKAGFIKRQLVETRQITKHVAQILDSRMNTKYDENDKLIREVKVITLKSKLVSDFRKDFQFYKVREINNYHHAHDAYLNAVVGTALIKKYPKLESEFVYGDYKVYDVRKMIAKSEQEIGKATAKYFFYSNIMNFFKTEITLANGEIRKRPLIETNGETGEIVWDKGRDFATVRKVLSMPQVNIVKKTEVQTGGFSKESILPKRNSDKLIARKKDWDPKKYGGFDSPTVAYSVLVVAKVEKGKSKKLKSVKELLGITIMERSSFEKNPIDFLEAKGYKEVKKDLIIKLPKYSLFELENGRKRMLASAGELQKGNELALPSKYVNFLYLASHYEKLKGSPEDNEQKQLFVEQHKHYLDEIIEQISEFSKRVILADANLDKVLSAYNKHRDKPIREQAENIIHLFTLTNLGAPAAFKYFDTTIDRKRYTSTKEVLDATLIHQSITGLYETRIDLSQLGGDGGGGGGSGGGGSGGGGSGGGGSGGGGSGGGGSGGVPWLTQQPLQLTILVPLQEYQEKILSKTALPEDQKQQLKTLFVKYDNLWQHWENQVGHRKIRPHNIATGDYPPRPQKQYPINPKAKPSIQIVIDDLLKQGVLTPQNSTMNTPVYPVPKPDGRWRMVLDYREVNKTIPLTAAQNQHSAGILATIVRQKYKTTLDLANGFWAHPITPESYWLTAFTWQGKQYCWTRLPQGFLNSPALFNADVVDLLKEIPNVQVYVDDIYLSHDDPKEHVQQLEKVFQILLQAGYVVSLKKSEIGQKTVEFLGFNITKEGRGLTDTFKTKLLNITPPKDLKQLQSILGLLNFARNFIPNFAELVQPLYNLIAPAKGKYIEWSEENTKQLNMVIEALNTASNLEERLPEQRLVIKVNTSPSAGYVRYYNETGKKPIMYLNYVFSKAELKFSMLEKLLTTMHKALIKAMDLAMGQEILVYSPIVSMTKIQKTPLPERKALPIRWITWMTYLEDPRIQFHYDKTLPELKHIPDVYTSSQSPVKHPSQYEGVFYTDGSAIKSPDPTKSNNAGMGIVHATYKPEYQVLNQWSIPLGNHTAQMAEIAAVEFACKKALKIPGPVLVITDSFYVAESANKELPYWKSNGFVNNKKKPLKHISKWKSIAECLSMKPDITIQHEKGISLQIPVFILKGNALADKLATQGSYVVNAGKRTADGSEFEKRTADGSEFESPKKKAKVE

SEQ ID NO: 6207 - protein, 2106 aa, synthetic construct
MPAAKRVKLDGGDKKYSIGLDIGTNSVGWAVITDEYKVPSKKFKVLGNTDRHSIKKNLIGALLFDSGETAEATRLKRTARRRYTRRKNRICYLQEIFSNEMAKVDDSFFHRLEESFLVEEDKKHERHPIFGNIVDEVAYHEKYPTIYHLRKKLVDSTDKADLRLIYLALAHMIKFRGHFLIEGDLNPDNSDVDKLFIQLVQTYNQLFEENPINASGVDAKAILSARLSKSRRLENLIAQLPGEKKNGLFGNLIALSLGLTPNFKSNFDLAEDAKLQLSKDTYDDDLDNLLAQIGDQYADLFLAAKNLSDAILLSDILRVNTEITKAPLSASMIKRYDEHHQDLTLLKALVRQQLPEKYKEIFFDQSKNGYAGYIDGGASQEEFYKFIKPILEKMDGTEELLVKLNREDLLRKQRTFDNGSIPHQIHLGELHAILRRQEDFYPFLKDNREKIEKILTFRIPYYVGPLARGNSRFAWMTRKSEETITPWNFEEVVDKGASAQSFIERMTNFDKNLPNEKVLPKHSLLYEYFTVYNELTKVKYVTEGMRKPAFLSGEQKKAIVDLLFKTNRKVTVKQLKEDYFKKIECFDSVEISGVEDRFNASLGTYHDLLKIIKDKDFLDNEENEDILEDIVLTLTLFEDREMIEERLKTYAHLFDDKVMKQLKRRRYTGWGRLSRKLINGIRDKQSGKTILDFLKSDGFANRNFMQLIHDDSLTFKEDIQKAQVSGQGDSLHEHIANLAGSPAIKKGILQTVKVVDELVKVMGRHKPENIVIEMARENQTTQKGQKNSRERMKRIEEGIKELGSQILKEHPVENTQLQNEKLYLYYLQNGRDMYVDQELDINRLSDYDVDHIVPQSFLKDDSIDNKVLTRSDKARGKSDNVPSEEVVKKMKNYWRQLLNAKLITQRKFDNLTKAERGGLSELDKAGFIKRQLVETRQITKHVAQILDSRMNTKYDENDKLIREVKVITLKSKLVSDFRKDFQFYKVREINNYHHAHDAYLNAVVGTALIKKYPKLESEFVYGDYKVYDVRKMIAKSEQEIGKATAKYFFYSNIMNFFKTEITLANGEIRKRPLIETNGETGEIVWDKGRDFATVRKVLSMPQVNIVKKTEVQTGGFSKESILPKRNSDKLIARKKDWDPKKYGGFDSPTVAYSVLVVAKVEKGKSKKLKSVKELLGITIMERSSFEKNPIDFLEAKGYKEVKKDLIIKLPKYSLFELENGRKRMLASAGELQKGNELALPSKYVNFLYLASHYEKLKGSPEDNEQKQLFVEQHKHYLDEIIEQISEFSKRVILADANLDKVLSAYNKHRDKPIREQAENIIHLFTLTNLGAPAAFKYFDTTIDRKRYTSTKEVLDATLIHQSITGLYETRIDLSQLGGDGGGGGGSGGGGSGGGGSGGGGSGGGGSGGGGSGGVPWLTQQPLQLTILVPLQEYQEKILSKTALPEDQKQQLKTLFVKYDNLWQHWENQVGHRKIRPHNIATGDYPPRPQKQYPINPKAKPSIQIVIDDLLKQGVLTPQNSTMNTPVYPVPKPDGRWRMVLDYREVNKTIPLTAAQNQHSAGILATIVRQKYKTTLDLANGFWAHPITPESYWLTAFTWQGKQYCWTRLPQGFLNSPALFNADVVDLLKEIPNVQVYVDDIYLSHDDPKEHVQQLEKVFQILLQAGYVVSLKKSEIGQKTVEFLGFNITKEGRGLTDTFKTKLLNITPPKDLKQLQSILGKLNFARNFIPNFAELVQPLYNLIAPAKGKYIEWSEENTKQLNMVIEALNTASNLEERLPEQRLVIKVNTSPSAGYVRYYNETGKKPIMYLNYVFSKAELKFSMLEKLLTTMHKALIKAMDLAMGQEILVYSPIVSMTKIQKTPLPERKALPIRWITWMTYLEDPRIQFHYDKTLPELKHIPDVYTSSQSPVKHPSQYEGVFYTDGSAIKSPDPTKSNNAGMGIVHATYKPEYQVLNQWSIPLGNHTAQMAEIAAVEFACKKALKIPGPVLVITDSFYVAESANKELPYWKSNGFVNNKKKPLKHISKWKSIAECLSMKPDITIQHEKGISLQIPVFILKGNALADKLATQGSYVVNAGKRTADGSEFEKRTADGSEFESPKKKAKVE

SEQ ID NO: 6208 - protein, 2195 aa, synthetic construct
MPAAKRVKLDGGDKKYSIGLDIGTNSVGWAVITDEYKVPSKKFKVLGNTDRHSIKKNLIGALLFDSGETAEATRLKRTARRRYTRRKNRICYLQEIFSNEMAKVDDSFFHRLEESFLVEEDKKHERHPIFGNIVDEVAYHEKYPTIYHLRKKLVDSTDKADLRLIYLALAHMIKFRGHFLIEGDLNPDNSDVDKLFIQLVQTYNQLFEENPINASGVDAKAILSARLSKSRRLENLIAQLPGEKKNGLFGNLIALSLGLTPNFKSNFDLAEDAKLQLSKDTYDDDLDNLLAQIGDQYADLFLAAKNLSDAILLSDILRVNTEITKAPLSASMIKRYDEHHQDLTLLKALVRQQLPEKYKEIFFDQSKNGYAGYIDGGASQEEFYKFIKPILEKMDGTEELLVKLNREDLLRKQRTFDNGSIPHQIHLGELHAILRRQEDFYPFLKDNREKIEKILTFRIPYYVGPLARGNSRFAWMTRKSEETITPWNFEEVVDKGASAQSFIERMTNFDKNLPNEKVLPKHSLLYEYFTVYNELTKVKYVTEGMRKPAFLSGEQKKAIVDLLFKTNRKVTVKQLKEDYFKKIECFDSVEISGVEDRFNASLGTYHDLLKIIKDKDFLDNEENEDILEDIVLTLTLFEDREMIEERLKTYAHLFDDKVMKQLKRRRYTGWGRLSRKLINGIRDKQSGKTILDFLKSDGFANRNFMQLIHDDSLTFKEDIQKAQVSGQGDSLHEHIANLAGSPAIKKGILQTVKVVDELVKVMGRHKPENIVIEMARENQTTQKGQKNSRERMKRIEEGIKELGSQILKEHPVENTQLQNEKLYLYYLQNGRDMYVDQELDINRLSDYDVDHIVPQSFLKDDSIDNKVLTRSDKARGKSDNVPSEEVVKKMKNYWRQLLNAKLITQRKFDNLTKAERGGLSELDKAGFIKRQLVETRQITKHVAQILDSRMNTKYDENDKLIREVKVITLKSKLVSDFRKDFQFYKVREINNYHHAHDAYLNAVVGTALIKKYPKLESEFVYGDYKVYDVRKMIAKSEQEIGKATAKYFFYSNIMNFFKTEITLANGEIRKRPLIETNGETGEIVWDKGRDFATVRKVLSMPQVNIVKKTEVQTGGFSKESILPKRNSDKLIARKKDWDPKKYGGFDSPTVAYSVLVVAKVEKGKSKKLKSVKELLGITIMERSSFEKNPIDFLEAKGYKEVKKDLIIKLPKYSLFELENGRKRMLASAGELQKGNELALPSKYVNFLYLASHYEKLKGSPEDNEQKQLFVEQHKHYLDEIIEQISEFSKRVILADANLDKVLSAYNKHRDKPIREQAENIIHLFTLTNLGAPAAFKYFDTTIDRKRYTSTKEVLDATLIHQSITGLYETRIDLSQLGGDGGGGGGSGGGGSGGGGSGGGGSGGGGSGGGGSGGMNPLQLLQPLPAEIKGTKLLAHWNSGATITCIPESFLEDEQPIKKTLIKTIHGEKQQNVYYVTFKVKGRKVEAEVIASPYEYILLSPTDVPWLTQQPLQLTILVPLQEYQEKILSKTALPEDQKQQLKTLFVKYDNLWQHWENQVGHRKIRPHNIATGDYPPRPQKQYPINPKAKPSIQIVIDDLLKQGVLTPQNSTMNTPVYPVPKPDGRWRMVLDYREVNKTIPLTAAQNQHSAGILATIVRQKYKTTLDLANGFWAHPITPESYWLTAFTWQGKQYCWTRLPQGFLNSPALFNADVVDLLKEIPNVQVYVDDIYLSHDDPKEHVQQLEKVFQILLQAGYVVSLKKSEIGQKTVEFLGFNITKEGRGLTDTFKTKLLNITPPKDLKQLQSILGLLNFARNFIPNFAELVQPLYNLIAPAKGKYIEWSEENTKQLNMVIEALNTASNLEERLPEQRLVIKVNTSPSAGYVRYYNETGKKPIMYLNYVFSKAELKFSMLEKLLTTMHKALIKAMDLAMGQEILVYSPIVSMTKIQKTPLPERKALPIRWITWMTYLEDPRIQFHYDKTLPELKHIPDVYTSSQSPVKHPSQYEGVFYTDGSAIKSPDPTKSNNAGMGIVHATYKPEYQVLNQWSIPLGNHTAQMAEIAAVEFACKKALKIPGPVLVITDSFYVAESANKELPYWKSNGFVNNKKKPLKHISKWKSIAECLSMKPDITIQHEKGISLQIPVFILKGNALADKLATQGSYVVNAGKRTADGSEFEKRTADGSEFESPKKKAKVE

SEQ ID NO: 6209 - protein, 2195 aa, synthetic construct
MPAAKRVKLDGGDKKYSIGLDIGTNSVGWAVITDEYKVPSKKFKVLGNTDRHSIKKNLIGALLFDSGETAEATRLKRTARRRYTRRKNRICYLQEIFSNEMAKVDDSFFHRLEESFLVEEDKKHERHPIFGNIVDEVAYHEKYPTIYHLRKKLVDSTDKADLRLIYLALAHMIKFRGHFLIEGDLNPDNSDVDKLFIQLVQTYNQLFEENPINASGVDAKAILSARLSKSRRLENLIAQLPGEKKNGLFGNLIALSLGLTPNFKSNFDLAEDAKLQLSKDTYDDDLDNLLAQIGDQYADLFLAAKNLSDAILLSDILRVNTEITKAPLSASMIKRYDEHHQDLTLLKALVRQQLPEKYKEIFFDQSKNGYAGYIDGGASQEEFYKFIKPILEKMDGTEELLVKLNREDLLRKQRTFDNGSIPHQIHLGELHAILRRQEDFYPFLKDNREKIEKILTFRIPYYVGPLARGNSRFAWMTRKSEETITPWNFEEVVDKGASAQSFIERMTNFDKNLPNEKVLPKHSLLYEYFTVYNELTKVKYVTEGMRKPAFLSGEQKKAIVDLLFKTNRKVTVKQLKEDYFKKIECFDSVEISGVEDRFNASLGTYHDLLKIIKDKDFLDNEENEDILEDIVLTLTLFEDREMIEERLKTYAHLFDDKVMKQLKRRRYTGWGRLSRKLINGIRDKQSGKTILDFLKSDGFANRNFMQLIHDDSLTFKEDIQKAQVSGQGDSLHEHIANLAGSPAIKKGILQTVKVVDELVKVMGRHKPENIVIEMARENQTTQKGQKNSRERMKRIEEGIKELGSQILKEHPVENTQLQNEKLYLYYLQNGRDMYVDQELDINRLSDYDVDHIVPQSFLKDDSIDNKVLTRSDKARGKSDNVPSEEVVKKMKNYWRQLLNAKLITQRKFDNLTKAERGGLSELDKAGFIKRQLVETRQITKHVAQILDSRMNTKYDENDKLIREVKVITLKSKLVSDFRKDFQFYKVREINNYHHAHDAYLNAVVGTALIKKYPKLESEFVYGDYKVYDVRKMIAKSEQEIGKATAKYFFYSNIMNFFKTEITLANGEIRKRPLIETNGETGEIVWDKGRDFATVRKVLSMPQVNIVKKTEVQTGGFSKESILPKRNSDKLIARKKDWDPKKYGGFDSPTVAYSVLVVAKVEKGKSKKLKSVKELLGITIMERSSFEKNPIDFLEAKGYKEVKKDLIIKLPKYSLFELENGRKRMLASAGELQKGNELALPSKYVNFLYLASHYEKLKGSPEDNEQKQLFVEQHKHYLDEIIEQISEFSKRVILADANLDKVLSAYNKHRDKPIREQAENIIHLFTLTNLGAPAAFKYFDTTIDRKRYTSTKEVLDATLIHQSITGLYETRIDLSQLGGDGGGGGGSGGGGSGGGGSGGGGSGGGGSGGGGSGGMNPLQLLQPLPAEIKGTKLLAHWNSGATITCIPESFLEDEQPIKKTLIKTIHGEKQQNVYYVTFKVKGRKVEAEVIASPYEYILLSPTDVPWLTQQPLQLTILVPLQEYQEKILSKTALPEDQKQQLKTLFVKYDNLWQHWENQVGHRKIRPHNIATGDYPPRPQKQYPINPKAKPSIQIVIDDLLKQGVLTPQNSTMNTPVYPVPKPDGRWRMVLDYREVNKTIPLTAAQNQHSAGILATIVRQKYKTTLDLANGFWAHPITPESYWLTAFTWQGKQYCWTRLPQGFLNSPALFNADVVDLLKEIPNVQVYVDDIYLSHDDPKEHVQQLEKVFQILLQAGYVVSLKKSEIGQKTVEFLGFNITKEGRGLTDTFKTKLLNITPPKDLKQLQSILGKLNFARNFIPNFAELVQPLYNLIAPAKGKYIEWSEENTKQLNMVIEALNTASNLEERLPEQRLVIKVNTSPSAGYVRYYNETGKKPIMYLNYVFSKAELKFSMLEKLLTTMHKALIKAMDLAMGQEILVYSPIVSMTKIQKTPLPERKALPIRWITWMTYLEDPRIQFHYDKTLPELKHIPDVYTSSQSPVKHPSQYEGVFYTDGSAIKSPDPTKSNNAGMGIVHATYKPEYQVLNQWSIPLGNHTAQMAEIAAVEFACKKALKIPGPVLVITDSFYVAESANKELPYWKSNGFVNNKKKPLKHISKWKSIAECLSMKPDITIQHEKGISLQIPVFILKGNALADKLATQGSYVVNAGKRTADGSEFEKRTADGSEFESPKKKAKVE

SEQ ID NO: 6210 - protein, 2113 aa, synthetic construct
MPAAKRVKLDGGDKKYSIGLDIGTNSVGWAVITDEYKVPSKKFKVLGNTDRHSIKKNLIGALLFDSGETAEATRLKRTARRRYTRRKNRICYLQEIFSNEMAKVDDSFFHRLEESFLVEEDKKHERHPIFGNIVDEVAYHEKYPTIYHLRKKLVDSTDKADLRLIYLALAHMIKFRGHFLIEGDLNPDNSDVDKLFIQLVQTYNQLFEENPINASGVDAKAILSARLSKSRRLENLIAQLPGEKKNGLFGNLIALSLGLTPNFKSNFDLAEDAKLQLSKDTYDDDLDNLLAQIGDQYADLFLAAKNLSDAILLSDILRVNTEITKAPLSASMIKRYDEHHQDLTLLKALVRQQLPEKYKEIFFDQSKNGYAGYIDGGASQEEFYKFIKPILEKMDGTEELLVKLNREDLLRKQRTFDNGSIPHQIHLGELHAILRRQEDFYPFLKDNREKIEKILTFRIPYYVGPLARGNSRFAWMTRKSEETITPWNFEEVVDKGASAQSFIERMTNFDKNLPNEKVLPKHSLLYEYFTVYNELTKVKYVTEGMRKPAFLSGEQKKAIVDLLFKTNRKVTVKQLKEDYFKKIECFDSVEISGVEDRFNASLGTYHDLLKIIKDKDFLDNEENEDILEDIVLTLTLFEDREMIEERLKTYAHLFDDKVMKQLKRRRYTGWGRLSRKLINGIRDKQSGKTILDFLKSDGFANRNFMQLIHDDSLTFKEDIQKAQVSGQGDSLHEHIANLAGSPAIKKGILQTVKVVDELVKVMGRHKPENIVIEMARENQTTQKGQKNSRERMKRIEEGIKELGSQILKEHPVENTQLQNEKLYLYYLQNGRDMYVDQELDINRLSDYDVDHIVPQSFLKDDSIDNKVLTRSDKARGKSDNVPSEEVVKKMKNYWRQLLNAKLITQRKFDNLTKAERGGLSELDKAGFIKRQLVETRQITKHVAQILDSRMNTKYDENDKLIREVKVITLKSKLVSDFRKDFQFYKVREINNYHHAHDAYLNAVVGTALIKKYPKLESEFVYGDYKVYDVRKMIAKSEQEIGKATAKYFFYSNIMNFFKTEITLANGEIRKRPLIETNGETGEIVWDKGRDFATVRKVLSMPQVNIVKKTEVQTGGFSKESILPKRNSDKLIARKKDWDPKKYGGFDSPTVAYSVLVVAKVEKGKSKKLKSVKELLGITIMERSSFEKNPIDFLEAKGYKEVKKDLIIKLPKYSLFELENGRKRMLASAGELQKGNELALPSKYVNFLYLASHYEKLKGSPEDNEQKQLFVEQHKHYLDEIIEQISEFSKRVILADANLDKVLSAYNKHRDKPIREQAENIIHLFTLTNLGAPAAFKYFDTTIDRKRYTSTKEVLDATLIHQSITGLYETRIDLSQLGGDGGGGGGSGGGGSGGGGSGGGGSGGGGSGGGGSGGVLNLEEEYRLHEKPVPSSIDPSWLQLFPTVWAERAGMGLANQVPPVVVELRSGASPVAVRQYPMSKEAREGIRPHIQKFLDLGVLVPCRSPWNTPLLPVKKPGTNDYRPVQDLREINKRVQDIHPTVPNPYNLLSSLPPSYTWYSVLDLKDAFFCLRLHPNSQPLFAFEWKDPEKGNTGQLTWTRLPQGFKNSPTLFDEALHRDLAPFRALNPQVVLLQYVDDLLVAAPTYEDCKKGTQKLLQELSKLGYRVSAKKAQLCQREVTYLGYLLKEGKRWLTPARKATVMKIPVPTTPRQVREFLGTAGFCRLWIPGFASLAAPLYPLTKESIPFIWTEEHQQAFDHIKKALLSAPALALPDLTKPFTLYIDERAGVARGVLTQTLGPWRRPVAYLSKKLDPVASGWPTCLKAVAAVALLLKDADKLTLGQNVTVIASHSLESIVRQPPDRWMTNARMTHYQSLLLNERVSFAPPAVLNPATLLPVESEATPVHRCSEILAEETGTRRDLEDQPLPGVPTWYTDGSSFITEGKRRAGAPIVDGKRTVWASSLPEGTSAQKAELVALTQALRLAEGKNINIYTDSRYAFATAHIHGAIYKQRGLLTSAGKDIKNKEEILALLEAIHLPRRVAIIHCPGHQRGSNPVATGNRRADEAAKQAALSTRVLAGTTKPAGKRTADGSEFEKRTADGSEFESPKKKAKVE

SEQ ID NO: 6211 - protein, 2113 aa, synthetic construct
MPAAKRVKLDGGDKKYSIGLDIGTNSVGWAVITDEYKVPSKKFKVLGNTDRHSIKKNLIGALLFDSGETAEATRLKRTARRRYTRRKNRICYLQEIFSNEMAKVDDSFFHRLEESFLVEEDKKHERHPIFGNIVDEVAYHEKYPTIYHLRKKLVDSTDKADLRLIYLALAHMIKFRGHFLIEGDLNPDNSDVDKLFIQLVQTYNQLFEENPINASGVDAKAILSARLSKSRRLENLIAQLPGEKKNGLFGNLIALSLGLTPNFKSNFDLAEDAKLQLSKDTYDDDLDNLLAQIGDQYADLFLAAKNLSDAILLSDILRVNTEITKAPLSASMIKRYDEHHQDLTLLKALVRQQLPEKYKEIFFDQSKNGYAGYIDGGASQEEFYKFIKPILEKMDGTEELLVKLNREDLLRKQRTFDNGSIPHQIHLGELHAILRRQEDFYPFLKDNREKIEKILTFRIPYYVGPLARGNSRFAWMTRKSEETITPWNFEEVVDKGASAQSFIERMTNFDKNLPNEKVLPKHSLLYEYFTVYNELTKVKYVTEGMRKPAFLSGEQKKAIVDLLFKTNRKVTVKQLKEDYFKKIECFDSVEISGVEDRFNASLGTYHDLLKIIKDKDFLDNEENEDILEDIVLTLTLFEDREMIEERLKTYAHLFDDKVMKQLKRRRYTGWGRLSRKLINGIRDKQSGKTILDFLKSDGFANRNFMQLIHDDSLTFKEDIQKAQVSGQGDSLHEHIANLAGSPAIKKGILQTVKVVDELVKVMGRHKPENIVIEMARENQTTQKGQKNSRERMKRIEEGIKELGSQILKEHPVENTQLQNEKLYLYYLQNGRDMYVDQELDINRLSDYDVDHIVPQSFLKDDSIDNKVLTRSDKARGKSDNVPSEEVVKKMKNYWRQLLNAKLITQRKFDNLTKAERGGLSELDKAGFIKRQLVETRQITKHVAQILDSRMNTKYDENDKLIREVKVITLKSKLVSDFRKDFQFYKVREINNYHHAHDAYLNAVVGTALIKKYPKLESEFVYGDYKVYDVRKMIAKSEQEIGKATAKYFFYSNIMNFFKTEITLANGEIRKRPLIETNGETGEIVWDKGRDFATVRKVLSMPQVNIVKKTEVQTGGFSKESILPKRNSDKLIARKKDWDPKKYGGFDSPTVAYSVLVVAKVEKGKSKKLKSVKELLGITIMERSSFEKNPIDFLEAKGYKEVKKDLIIKLPKYSLFELENGRKRMLASAGELQKGNELALPSKYVNFLYLASHYEKLKGSPEDNEQKQLFVEQHKHYLDEIIEQISEFSKRVILADANLDKVLSAYNKHRDKPIREQAENIIHLFTLTNLGAPAAFKYFDTTIDRKRYTSTKEVLDATLIHQSITGLYETRIDLSQLGGDGGGGGGSGGGGSGGGGSGGGGSGGGGSGGGGSGGVLNLEEEYRLHEKPVPSSIDPSWLQLFPTVWAERAGMGLANQVPPVVVELRSGASPVAVRQYPMSKEAREGIRPHIQKFLDLGVLVPCRSPWNTPLLPVKKPGTNDYRPVQDLREINKRVQDIHPTVPNPYNLLSSLPPSYTWYSVLDLKDAFFCLRLHPNSQPLFAFEWKDPEKGNTGQLTWTRLPQGFKNSPTLFNEALHRDLAPFRALNPQVVLLQYVDDLLVAAPTYEDCKKGTQKLLQELSKLGYRVSAKKAQLCQREVTYLGYLLKEGKRWLTPARKATVMKIPVPTTPRQVREFLGKAGFCRLFIPGFASLAAPLYPLTKPSIPFIWTEEHQQAFDHIKKALLSAPALALPDLTKPFTLYIDERAGVARGVLTQTLGPWRRPVAYLSKKLDPVASGWPTCLKAVAAVALLLKDADKLTLGQNVTVIASHSLESIVRQPPDRWMTNARMTHYQSLLLNERVSFAPPAVLNPATLLPVESEATPVHRCSEILAEETGTRRDLEDQPLPGVPTWYTDGSSFITEGKRRAGAPIVDGKRTVWASSLPEGTSAQKAELVALTQALRLAEGKNINIYTDSRYAFATAHIHGAIYKQRGWLTSAGKDIKNKEEILALLEAIHLPRRVAIIHCPGHQRGSNPVATGNRRADEAAKQAALSTRVLAGTTKPAGKRTADGSEFEKRTADGSEFESPKKKAKVE

SEQ ID NO: 6212 - protein, 2146 aa, synthetic construct
MPAAKRVKLDGGDKKYSIGLDIGTNSVGWAVITDEYKVPSKKFKVLGNTDRHSIKKNLIGALLFDSGETAEATRLKRTARRRYTRRKNRICYLQEIFSNEMAKVDDSFFHRLEESFLVEEDKKHERHPIFGNIVDEVAYHEKYPTIYHLRKKLVDSTDKADLRLIYLALAHMIKFRGHFLIEGDLNPDNSDVDKLFIQLVQTYNQLFEENPINASGVDAKAILSARLSKSRRLENLIAQLPGEKKNGLFGNLIALSLGLTPNFKSNFDLAEDAKLQLSKDTYDDDLDNLLAQIGDQYADLFLAAKNLSDAILLSDILRVNTEITKAPLSASMIKRYDEHHQDLTLLKALVRQQLPEKYKEIFFDQSKNGYAGYIDGGASQEEFYKFIKPILEKMDGTEELLVKLNREDLLRKQRTFDNGSIPHQIHLGELHAILRRQEDFYPFLKDNREKIEKILTFRIPYYVGPLARGNSRFAWMTRKSEETITPWNFEEVVDKGASAQSFIERMTNFDKNLPNEKVLPKHSLLYEYFTVYNELTKVKYVTEGMRKPAFLSGEQKKAIVDLLFKTNRKVTVKQLKEDYFKKIECFDSVEISGVEDRFNASLGTYHDLLKIIKDKDFLDNEENEDILEDIVLTLTLFEDREMIEERLKTYAHLFDDKVMKQLKRRRYTGWGRLSRKLINGIRDKQSGKTILDFLKSDGFANRNFMQLIHDDSLTFKEDIQKAQVSGQGDSLHEHIANLAGSPAIKKGILQTVKVVDELVKVMGRHKPENIVIEMARENQTTQKGQKNSRERMKRIEEGIKELGSQILKEHPVENTQLQNEKLYLYYLQNGRDMYVDQELDINRLSDYDVDHIVPQSFLKDDSIDNKVLTRSDKARGKSDNVPSEEVVKKMKNYWRQLLNAKLITQRKFDNLTKAERGGLSELDKAGFIKRQLVETRQITKHVAQILDSRMNTKYDENDKLIREVKVITLKSKLVSDFRKDFQFYKVREINNYHHAHDAYLNAVVGTALIKKYPKLESEFVYGDYKVYDVRKMIAKSEQEIGKATAKYFFYSNIMNFFKTEITLANGEIRKRPLIETNGETGEIVWDKGRDFATVRKVLSMPQVNIVKKTEVQTGGFSKESILPKRNSDKLIARKKDWDPKKYGGFDSPTVAYSVLVVAKVEKGKSKKLKSVKELLGITIMERSSFEKNPIDFLEAKGYKEVKKDLIIKLPKYSLFELENGRKRMLASAGELQKGNELALPSKYVNFLYLASHYEKLKGSPEDNEQKQLFVEQHKHYLDEIIEQISEFSKRVILADANLDKVLSAYNKHRDKPIREQAENIIHLFTLTNLGAPAAFKYFDTTIDRKRYTSTKEVLDATLIHQSITGLYETRIDLSQLGGDGGGGGGSGGGGSGGGGSGGGGSGGGGSGGGGSGGLLGRDLLTKLKAQIQFSTEGPQVTWEDRPAMCLVLNLEEEYRLHEKPVPPSIDPSWLQLFPMVWAEKAGMGLANQVPPVVVELKSDASPVAVRQYPMSKEAREGIRPHIQRFLDLGILVPCQSPWNTPLLPVKKPGTNDYRPVQDLREVNKRVQDIHPTVPNPYNLLSSLPPSHTWYSVLDLKDAFFCLKLHPNSQPLFAFEWRDPEKGNTGQLTWTRLPQGFKNSPTLFNEALHRDLASFRALNPQVVMLQYVDDLLVAAPTYRDCKEGTRRLLQELSKLGYRVSAKKAQLCREEVTYLGYLLKGGKRWLTPARKATVMKIPTPTTPRQVREFLGTAGFCRLWIPGFASLAAPLYPLTRPKVPFTWTEAHQEAFGRIKEALLSAPALALPDLTKPFALYVDEKEGVARGVLTQTLGPWRRPVAYLSKKLDPVASGWPTCLKAIAAVALLLKDADKLTLGQNVLVIAPHNLESIVRQPPDRWMTNARMTHYQSLLLNERVSFAPPAILNPATLLPVESDDTPIHICSEILAEETGTRPDLRDQPLPGVPAWYTDGSSFIMDGRRQAGAAIVDNKRTVWASNLPEGTSAQKAELIALTQALRLAEGKSINIYTDSRYAFATAHVHGAIYKQRGWLTSAGKDIKNKEEILALLEAIHLPKRVAIIHCPGHQRGTDPVATGNRKADEAAKQAAQSTRILTETTKNAGKRTADGSEFEKRTADGSEFESPKKKAKVE

SEQ ID NO: 6213 - protein, 2115 aa, synthetic construct
MPAAKRVKLDGGDKKYSIGLDIGTNSVGWAVITDEYKVPSKKFKVLGNTDRHSIKKNLIGALLFDSGETAEATRLKRTARRRYTRRKNRICYLQEIFSNEMAKVDDSFFHRLEESFLVEEDKKHERHPIFGNIVDEVAYHEKYPTIYHLRKKLVDSTDKADLRLIYLALAHMIKFRGHFLIEGDLNPDNSDVDKLFIQLVQTYNQLFEENPINASGVDAKAILSARLSKSRRLENLIAQLPGEKKNGLFGNLIALSLGLTPNFKSNFDLAEDAKLQLSKDTYDDDLDNLLAQIGDQYADLFLAAKNLSDAILLSDILRVNTEITKAPLSASMIKRYDEHHQDLTLLKALVRQQLPEKYKEIFFDQSKNGYAGYIDGGASQEEFYKFIKPILEKMDGTEELLVKLNREDLLRKQRTFDNGSIPHQIHLGELHAILRRQEDFYPFLKDNREKIEKILTFRIPYYVGPLARGNSRFAWMTRKSEETITPWNFEEVVDKGASAQSFIERMTNFDKNLPNEKVLPKHSLLYEYFTVYNELTKVKYVTEGMRKPAFLSGEQKKAIVDLLFKTNRKVTVKQLKEDYFKKIECFDSVEISGVEDRFNASLGTYHDLLKIIKDKDFLDNEENEDILEDIVLTLTLFEDREMIEERLKTYAHLFDDKVMKQLKRRRYTGWGRLSRKLINGIRDKQSGKTILDFLKSDGFANRNFMQLIHDDSLTFKEDIQKAQVSGQGDSLHEHIANLAGSPAIKKGILQTVKVVDELVKVMGRHKPENIVIEMARENQTTQKGQKNSRERMKRIEEGIKELGSQILKEHPVENTQLQNEKLYLYYLQNGRDMYVDQELDINRLSDYDVDHIVPQSFLKDDSIDNKVLTRSDKARGKSDNVPSEEVVKKMKNYWRQLLNAKLITQRKFDNLTKAERGGLSELDKAGFIKRQLVETRQITKHVAQILDSRMNTKYDENDKLIREVKVITLKSKLVSDFRKDFQFYKVREINNYHHAHDAYLNAVVGTALIKKYPKLESEFVYGDYKVYDVRKMIAKSEQEIGKATAKYFFYSNIMNFFKTEITLANGEIRKRPLIETNGETGEIVWDKGRDFATVRKVLSMPQVNIVKKTEVQTGGFSKESILPKRNSDKLIARKKDWDPKKYGGFDSPTVAYSVLVVAKVEKGKSKKLKSVKELLGITIMERSSFEKNPIDFLEAKGYKEVKKDLIIKLPKYSLFELENGRKRMLASAGELQKGNELALPSKYVNFLYLASHYEKLKGSPEDNEQKQLFVEQHKHYLDEIIEQISEFSKRVILADANLDKVLSAYNKHRDKPIREQAENIIHLFTLTNLGAPAAFKYFDTTIDRKRYTSTKEVLDATLIHQSITGLYETRIDLSQLGGDGGGGGGSGGGGSGGGGSGGGGSGGGGSGGGGSGGTLNLEDEYRLYETSAEPEVSPGSTWLSDFPQAWAETGGMGLAVRQAPLIIPLKATSTPVSIKQYPMSQEAKLGIKPHIQRLLDQGILVPCQSPWNTPLLPVKKPGTNDYRPVQDLREVNKRVEDIHPTVPNPYNLLSGLPPSHRWYTVLDLKDAFFCLRLHPTSQPLFAFEWRDPGMGISGQLTWTRLPQGFKNSPTLFNEALHRDLADFRIQHPDLILLQYVDDILLAATSELDCQQGTRALLLTLGNLGYRASAKKAQLCQKQVKYLGYLLKEGQRWLTEARKETVMGQPTPKTPRQLREFLGKAGFCRLFIPGFAEMAAPLYPLTKPGTLFNWGPDQQKAYQEIKQALLTAPALGLPDLTKPFELFVDEKQGYAKGVLTQKLGPWRRPVAYLSKKLDPVAAGWPPCLRMVAAIAVLRKDAGKLTMGQPLVILAPHAVEALVKQPPDRWLSNARMTHYQAMLLDTDRVQFGPVVALNPATLLPLPEEGAPHDCLEILAETHGTRPDLTDQPIPDADHTWYTDGSSFLQEGQRKAGAAVTTETEVIWARALPAGTSAQRAELIALTQALKMAEGKRLNVYTDSRYAFATAHIHGEIYRRRGWLTSEGREIKNKSEILALLKALFLPKRLSIIHCLGHQKGDSAEARGNRLADQAAREAAIKTPPDTSTLLAGKRTADGSEFEKRTADGSEFESPKKKAKVE

SEQ ID NO: 6214 - protein, 2115 aa, synthetic construct
MPAAKRVKLDGGDKKYSIGLDIGTNSVGWAVITDEYKVPSKKFKVLGNTDRHSIKKNLIGALLFDSGETAEATRLKRTARRRYTRRKNRICYLQEIFSNEMAKVDDSFFHRLEESFLVEEDKKHERHPIFGNIVDEVAYHEKYPTIYHLRKKLVDSTDKADLRLIYLALAHMIKFRGHFLIEGDLNPDNSDVDKLFIQLVQTYNQLFEENPINASGVDAKAILSARLSKSRRLENLIAQLPGEKKNGLFGNLIALSLGLTPNFKSNFDLAEDAKLQLSKDTYDDDLDNLLAQIGDQYADLFLAAKNLSDAILLSDILRVNTEITKAPLSASMIKRYDEHHQDLTLLKALVRQQLPEKYKEIFFDQSKNGYAGYIDGGASQEEFYKFIKPILEKMDGTEELLVKLNREDLLRKQRTFDNGSIPHQIHLGELHAILRRQEDFYPFLKDNREKIEKILTFRIPYYVGPLARGNSRFAWMTRKSEETITPWNFEEVVDKGASAQSFIERMTNFDKNLPNEKVLPKHSLLYEYFTVYNELTKVKYVTEGMRKPAFLSGEQKKAIVDLLFKTNRKVTVKQLKEDYFKKIECFDSVEISGVEDRFNASLGTYHDLLKIIKDKDFLDNEENEDILEDIVLTLTLFEDREMIEERLKTYAHLFDDKVMKQLKRRRYTGWGRLSRKLINGIRDKQSGKTILDFLKSDGFANRNFMQLIHDDSLTFKEDIQKAQVSGQGDSLHEHIANLAGSPAIKKGILQTVKVVDELVKVMGRHKPENIVIEMARENQTTQKGQKNSRERMKRIEEGIKELGSQILKEHPVENTQLQNEKLYLYYLQNGRDMYVDQELDINRLSDYDVDHIVPQSFLKDDSIDNKVLTRSDKARGKSDNVPSEEVVKKMKNYWRQLLNAKLITQRKFDNLTKAERGGLSELDKAGFIKRQLVETRQITKHVAQILDSRMNTKYDENDKLIREVKVITLKSKLVSDFRKDFQFYKVREINNYHHAHDAYLNAVVGTALIKKYPKLESEFVYGDYKVYDVRKMIAKSEQEIGKATAKYFFYSNIMNFFKTEITLANGEIRKRPLIETNGETGEIVWDKGRDFATVRKVLSMPQVNIVKKTEVQTGGFSKESILPKRNSDKLIARKKDWDPKKYGGFDSPTVAYSVLVVAKVEKGKSKKLKSVKELLGITIMERSSFEKNPIDFLEAKGYKEVKKDLIIKLPKYSLFELENGRKRMLASAGELQKGNELALPSKYVNFLYLASHYEKLKGSPEDNEQKQLFVEQHKHYLDEIIEQISEFSKRVILADANLDKVLSAYNKHRDKPIREQAENIIHLFTLTNLGAPAAFKYFDTTIDRKRYTSTKEVLDATLIHQSITGLYETRIDLSQLGGDGGGGGGSGGGGSGGGGSGGGGSGGGGSGGGGSGGTLNIEDEYRLHETSKGPDVPLGSTWLSDFPQAWAETGGMGLAVRQAPLIIPLKATSTPVSIKQYPMSQEARLGIKPHIQRLLDQGILVPCQSPWNTPLLPVKKPGTNDYRPVQDLREVNKRVEDIHPTVPNPYNLLSGLPPSHQWYTVLDLKDAFFCLRLHPTSQSLFAFEWRDPEMGISGQLTWTRLPQGFKNSPTLFNEALHRDLADFRIQHPDLILLQYVDDLLLAATSELDCQQGTRALLQTLGDLGYRASAKKAQICQKQVKYLGYLLKEGQRWLTEARKETVMGQPTPKTPRQLREFLGTAGFCRLWIPGFAEMAAPLYPLTKPGTLFEWGPDQQKAYQEIKQALLTAPALGLPDLTKPFELFVDEKQGYAKGVLTQKLGPWRRPVAYLSKKLDPVAAGWPPCLRMVAAIAVLTKDAGKLTMGQPLVILAPHAVEALVKQPPDRWLSNARMTHYQALLLDTDRVQFGPIVALNPATLLPLPEEGLQHDCLDILAEAHGTRPDLTDQPLPDADHTWYTDGSSFLQEGQRKAGAAVTTETEVVWAKALPAGTSAQRAELIALTQALKMAEGKKLNVYTDSRYAFATAHIHGEIYRRRGWLTSEGKEIKNKDEILALLKALFLPKRLSIIHCPGHQKGNRAEARGNRMADQAAREVATRETPETSTLLAGKRTADGSEFEKRTADGSEFESPKKKAKVE

SEQ ID NO: 6215 - protein, 2115 aa, synthetic construct
MPAAKRVKLDGGDKKYSIGLDIGTNSVGWAVITDEYKVPSKKFKVLGNTDRHSIKKNLIGALLFDSGETAEATRLKRTARRRYTRRKNRICYLQEIFSNEMAKVDDSFFHRLEESFLVEEDKKHERHPIFGNIVDEVAYHEKYPTIYHLRKKLVDSTDKADLRLIYLALAHMIKFRGHFLIEGDLNPDNSDVDKLFIQLVQTYNQLFEENPINASGVDAKAILSARLSKSRRLENLIAQLPGEKKNGLFGNLIALSLGLTPNFKSNFDLAEDAKLQLSKDTYDDDLDNLLAQIGDQYADLFLAAKNLSDAILLSDILRVNTEITKAPLSASMIKRYDEHHQDLTLLKALVRQQLPEKYKEIFFDQSKNGYAGYIDGGASQEEFYKFIKPILEKMDGTEELLVKLNREDLLRKQRTFDNGSIPHQIHLGELHAILRRQEDFYPFLKDNREKIEKILTFRIPYYVGPLARGNSRFAWMTRKSEETITPWNFEEVVDKGASAQSFIERMTNFDKNLPNEKVLPKHSLLYEYFTVYNELTKVKYVTEGMRKPAFLSGEQKKAIVDLLFKTNRKVTVKQLKEDYFKKIECFDSVEISGVEDRFNASLGTYHDLLKIIKDKDFLDNEENEDILEDIVLTLTLFEDREMIEERLKTYAHLFDDKVMKQLKRRRYTGWGRLSRKLINGIRDKQSGKTILDFLKSDGFANRNFMQLIHDDSLTFKEDIQKAQVSGQGDSLHEHIANLAGSPAIKKGILQTVKVVDELVKVMGRHKPENIVIEMARENQTTQKGQKNSRERMKRIEEGIKELGSQILKEHPVENTQLQNEKLYLYYLQNGRDMYVDQELDINRLSDYDVDHIVPQSFLKDDSIDNKVLTRSDKARGKSDNVPSEEVVKKMKNYWRQLLNAKLITQRKFDNLTKAERGGLSELDKAGFIKRQLVETRQITKHVAQILDSRMNTKYDENDKLIREVKVITLKSKLVSDFRKDFQFYKVREINNYHHAHDAYLNAVVGTALIKKYPKLESEFVYGDYKVYDVRKMIAKSEQEIGKATAKYFFYSNIMNFFKTEITLANGEIRKRPLIETNGETGEIVWDKGRDFATVRKVLSMPQVNIVKKTEVQTGGFSKESILPKRNSDKLIARKKDWDPKKYGGFDSPTVAYSVLVVAKVEKGKSKKLKSVKELLGITIMERSSFEKNPIDFLEAKGYKEVKKDLIIKLPKYSLFELENGRKRMLASAGELQKGNELALPSKYVNFLYLASHYEKLKGSPEDNEQKQLFVEQHKHYLDEIIEQISEFSKRVILADANLDKVLSAYNKHRDKPIREQAENIIHLFTLTNLGAPAAFKYFDTTIDRKRYTSTKEVLDATLIHQSITGLYETRIDLSQLGGDGGGGGGSGGGGSGGGGSGGGGSGGGGSGGGGSGGTLNIEDEHRLHETSKEPDVSLGSTWLSDFPQAWAETGGMGLAVRQAPLIIPLKATSTPVSIKQYPMSQEARLGIKPHIQRLLDQGILVPCQSPWNTPLLPVKKPGTNDYRPVQDLREVNKRVEDIHPTVPNPYNLLSGLPPSHQWYTVLDLKDAFFCLRLHPTSQPLFAFEWRDPEMGISGQLTWTRLPQGFKNSPTLFDEALHRDLADFRIQHPDLILLQYVDDLLLAATSELDCQQGTRALLQTLGNLGYRASAKKAQICQKQVKYLGYLLKEGQRWLTEARKETVMGQPTPKTPRQLREFLGTAGFCRLWIPGFAEMAAPLYPLTKTGTLFNWGPDQQKAYQEIKQALLTAPALGLPDLTKPFELFVDEKQGYAKGVLTQKLGPWRRPVAYLSKKLDPVAAGWPPCLRMVAAIAVLTKDAGKLTMGQPLVILAPHAVEALVKQPPDRWLSNARMTHYQALLLDTDRVQFGPVVALNPATLLPLPEEGLQHNCLDILAEAHGTRPDLTDQPLPDADHTWYTDGSSLLQEGQRKAGAAVTTETEVIWAKALPAGTSAQRAELIALTQALKMAEGKKLNVYTDSRYAFATAHIHGEIYRRRGLLTSEGKEIKNKDEILALLKALFLPKRLSIIHCPGHQKGHSAEARGNRMADQAARKAAITETPDTSTLLAGKRTADGSEFEKRTADGSEFESPKKKAKVE

SEQ ID NO: 6216 - protein, 2115 aa, synthetic construct; identical to SEQ ID NO: 6215

SEQ ID NO: 6217 - protein, 2115 aa, synthetic construct
MPAAKRVKLDGGDKKYSIGLDIGTNSVGWAVITDEYKVPSKKFKVLGNTDRHSIKKNLIGALLFDSGETAEATRLKRTARRRYTRRKNRICYLQEIFSNEMAKVDDSFFHRLEESFLVEEDKKHERHPIFGNIVDEVAYHEKYPTIYHLRKKLVDSTDKADLRLIYLALAHMIKFRGHFLIEGDLNPDNSDVDKLFIQLVQTYNQLFEENPINASGVDAKAILSARLSKSRRLENLIAQLPGEKKNGLFGNLIALSLGLTPNFKSNFDLAEDAKLQLSKDTYDDDLDNLLAQIGDQYADLFLAAKNLSDAILLSDILRVNTEITKAPLSASMIKRYDEHHQDLTLLKALVRQQLPEKYKEIFFDQSKNGYAGYIDGGASQEEFYKFIKPILEKMDGTEELLVKLNREDLLRKQRTFDNGSIPHQIHLGELHAILRRQEDFYPFLKDNREKIEKILTFRIPYYVGPLARGNSRFAWMTRKSEETITPWNFEEVVDKGASAQSFIERMTNFDKNLPNEKVLPKHSLLYEYFTVYNELTKVKYVTEGMRKPAFLSGEQKKAIVDLLFKTNRKVTVKQLKEDYFKKIECFDSVEISGVEDRFNASLGTYHDLLKIIKDKDFLDNEENEDILEDIVLTLTLFEDREMIEERLKTYAHLFDDKVMKQLKRRRYTGWGRLSRKLINGIRDKQSGKTILDFLKSDGFANRNFMQLIHDDSLTFKEDIQKAQVSGQGDSLHEHIANLAGSPAIKKGILQTVKVVDELVKVMGRHKPENIVIEMARENQTTQKGQKNSRERMKRIEEGIKELGSQILKEHPVENTQLQNEKLYLYYLQNGRDMYVDQELDINRLSDYDVDHIVPQSFLKDDSIDNKVLTRSDKARGKSDNVPSEEVVKKMKNYWRQLLNAKLITQRKFDNLTKAERGGLSELDKAGFIKRQLVETRQITKHVAQILDSRMNTKYDENDKLIREVKVITLKSKLVSDFRKDFQFYKVREINNYHHAHDAYLNAVVGTALIKKYPKLESEFVYGDYKVYDVRKMIAKSEQEIGKATAKYFFYSNIMNFFKTEITLANGEIRKRPLIETNGETGEIVWDKGRDFATVRKVLSMPQVNIVKKTEVQTGGFSKESILPKRNSDKLIARKKDWDPKKYGGFDSPTVAYSVLVVAKVEKGKSKKLKSVKELLGITIMERSSFEKNPIDFLEAKGYKEVKKDLIIKLPKYSLFELENGRKRMLASAGELQKGNELALPSKYVNFLYLASHYEKLKGSPEDNEQKQLFVEQHKHYLDEIIEQISEFSKRVILADANLDKVLSAYNKHRDKPIREQAENIIHLFTLTNLGAPAAFKYFDTTIDRKRYTSTKEVLDATLIHQSITGLYETRIDLSQLGGDGGGGGGSGGGGSGGGGSGGGGSGGGGSGGGGSGGTLNIEDEYRLHEISTEPDVSPGSTWLSDFPQAWAETGGMGLAVRQAPLIIPLKATSTPVSIKQYPMSQEAKLGIKPHIQRLLDQGILVPCQSPWNTPLLPVKKPGTNDYRPVQGLREVNKRVEDIHPTVPNPYNLLSGLPTSHRWYTVLDLKDAFFCLRLHPTSQPLFASEWRDPGMGISGQLTWTRLPQGFKNSPTLFNEALHRGLADFRIQHPDLILLQYVDDLLLAATSELDCQQGTRALLKTLGNLGYRASAKKAQICQKQVKYLGYLLREGQRWLTEARKETVMGQPTPKTPRQLREFLGTAGFCRLWIPRFAEMAAPLYPLTKPGTLFNWGPDQQKAYHEIKQALLTAPALGLPDLTKPFELFVDEKQGYAKGVLTQKLGPWRRPVAYLSKKLDPVAAGWPPCLRMVAAIAVLTKDAGKLTMGQPLVILAPHAVEALVKQPPDRWLSNARMTHYQAMLLDTDRVQFGPVVALNPATLLPLPEEGAPHDCLEILAETHGTEPDLTDQPIPDADHTWYTDGSSFLQEGQRKAGAAVTTETEVIWARALPAGTSAQRAELIALTQALKMAEGKRLNVYTDSRYAFATAHIHGEIYKRRGWLTSEGREIKNKSEILALLKALFLPKRLSIIHCLGHQKGDSAEARGNRLADQAAREAAIKTPPDTSTLLAGKRTADGSEFEKRTADGSEFESPKKKAKVE

SEQ ID NO: 6218 - protein, 2109 aa, synthetic construct
MPAAKRVKLDGGDKKYSIGLDIGTNSVGWAVITDEYKVPSKKFKVLGNTDRHSIKKNLIGALLFDSGETAEATRLKRTARRRYTRRKNRICYLQEIFSNEMAKVDDSFFHRLEESFLVEEDKKHERHPIFGNIVDEVAYHEKYPTIYHLRKKLVDSTDKADLRLIYLALAHMIKFRGHFLIEGDLNPDNSDVDKLFIQLVQTYNQLFEENPINASGVDAKAILSARLSKSRRLENLIAQLPGEKKNGLFGNLIALSLGLTPNFKSNFDLAEDAKLQLSKDTYDDDLDNLLAQIGDQYADLFLAAKNLSDAILLSDILRVNTEITKAPLSASMIKRYDEHHQDLTLLKALVRQQLPEKYKEIFFDQSKNGYAGYIDGGASQEEFYKFIKPILEKMDGTEELLVKLNREDLLRKQRTFDNGSIPHQIHLGELHAILRRQEDFYPFLKDNREKIEKILTFRIPYYVGPLARGNSRFAWMTRKSEETITPWNFEEVVDKGASAQSFIERMTNFDKNLPNEKVLPKHSLLYEYFTVYNELTKVKYVTEGMRKPAFLSGEQKKAIVDLLFKTNRKVTVKQLKEDYFKKIECFDSVEISGVEDRFNASLGTYHDLLKIIKDKDFLDNEENEDILEDIVLTLTLFEDREMIEERLKTYAHLFDDKVMKQLKRRRYTGWGRLSRKLINGIRDKQSGKTILDFLKSDGFANRNFMQLIHDDSLTFKEDIQKAQVSGQGDSLHEHIANLAGSPAIKKGILQTVKVVDELVKVMGRHKPENIVIEMARENQTTQKGQKNSRERMKRIEEGIKELGSQILKEHPVENTQLQNEKLYLYYLQNGRDMYVDQELDINRLSDYDVDHIVPQSFLKDDSIDNKVLTRSDKARGKSDNVPSEEVVKKMKNYWRQLLNAKLITQRKFDNLTKAERGGLSELDKAGFIKRQLVETRQITKHVAQILDSRMNTKYDENDKLIREVKVITLKSKLVSDFRKDFQFYKVREINNYHHAHDAYLNAVVGTALIKKYPKLESEFVYGDYKVYDVRKMIAKSEQEIGKATAKYFFYSNIMNFFKTEITLANGEIRKRPLIETNGETGEIVWDKGRDFATVRKVLSMPQVNIVKKTEVQTGGFSKESILPKRNSDKLIARKKDWDPKKYGGFDSPTVAYSVLVVAKVEKGKSKKLKSVKELLGITIMERSSFEKNPIDFLEAKGYKEVKKDLIIKLPKYSLFELENGRKRMLASAGELQKGNELALPSKYVNFLYLASHYEKLKGSPEDNEQKQLFVEQHKHYLDEIIEQISEFSKRVILADANLDKVLSAYNKHRDKPIREQAENIIHLFTLTNLGAPAAFKYFDTTIDRKRYTSTKEVLDATLIHQSITGLYETRIDLSQLGGDGGGGGGSGGGGSGGGGSGGGGSGGGGSGGGGSGGTLQLDDEYRLYSPLVKPDQNIQFWLEQFPQAWAETAGMGLAKQVPPQVIQLKASATPVSVRQYPLSKEAQEGIRPHVQRLIQQGILVPVQSPWNTPLLPVRKPGTNDYRPVQDLREVNKRVQDIHPTVPNPYNLLCALPPQRSWYTVLDLKDAFFCLRLHPTSQPLFAFEWRDPGTGRTGQLTWTRLPQGFKNSPTIFDEALHRDLANFRIQHPQVTLLQYVDDLLLAGATKQDCLEGTKALLLELSDLGYRASAKKAQICRREVTYLGYSLRDGQRWLTEARKKTVVQIPAPTTAKQVREFLGTAGFCRLWIPGFATLAAPLYPLTKEKGEFSWAPEHQKAFDAIKKALLSAPALALPDVTKPFTLYVDERKGVARGVLTQTLGPWRRPVAYLSKKLDPVASGWPVCLKAIAAVAILVKDADKLTLGQNITVIAPHALENIVRQPPDRWMTNARMTHYQSLLLTERVTFAPPAALNPATLLPEETDEPVTHDCHQLLIEETGVRKDLTDIPLTGEVLTWFTDGSSYVVEGKRMAGAAVVDGTRTIWASSLPEGTSAQKAELMALTQALRLAEGKSINIYTDSRYAFATAHVHGAIYKQRGLLTSAGREIKNKEEILSLLEALHLPKRLAIIHCPGHQKAKDPISRGNQMADRVAKQAAQGVNLLAGKRTADGSEFEKRTADGSEFESPKKKAKVE

SEQ ID NO: 6219 - protein, 2109 aa, synthetic construct
MPAAKRVKLDGGDKKYSIGLDIGTNSVGWAVITDEYKVPSKKFKVLGNTDRHSIKKNLIGALLFDSGETAEATRLKRTARRRYTRRKNRICYLQEIFSNEMAKVDDSFFHRLEESFLVEEDKKHERHPIFGNIVDEVAYHEKYPTIYHLRKKLVDSTDKADLRLIYLALAHMIKFRGHFLIEGDLNPDNSDVDKLFIQLVQTYNQLFEENPINASGVDAKAILSARLSKSRRLENLIAQLPGEKKNGLFGNLIALSLGLTPNFKSNFDLAEDAKLQLSKDTYDDDLDNLLAQIGDQYADLFLAAKNLSDAILLSDILRVNTEITKAPLSASMIKRYDEHHQDLTLLKALVRQQLPEKYKEIFFDQSKNGYAGYIDGGASQEEFYKFIKPILEKMDGTEELLVKLNREDLLRKQRTFDNGSIPHQIHLGELHAILRRQEDFYPFLKDNREKIEKILTFRIPYYVGPLARGNSRFAWMTRKSEETITPWNFEEVVDKGASAQSFIERMTNFDKNLPNEKVLPKHSLLYEYFTVYNELTKVKYVTEGMRKPAFLSGEQKKAIVDLLFKTNRKVTVKQLKEDYFKKIECFDSVEISGVEDRFNASLGTYHDLLKIIKDKDFLDNEENEDILEDIVLTLTLFEDREMIEERLKTYAHLFDDKVMKQLKRRRYTGWGRLSRKLINGIRDKQSGKTILDFLKSDGFANRNFMQLIHDDSLTFKEDIQKAQVSGQGDSLHEHIANLAGSPAIKKGILQTVKVVDELVKVMGRHKPENIVIEMARENQTTQKGQKNSRERMKRIEEGIKELGSQILKEHPVENTQLQNEKLYLYYLQNGRDMYVDQELDINRLSDYDVDHIVPQSFLKDDSIDNKVLTRSDKARGKSDNVPSEEVVKKMKNYWRQLLNAKLITQRKFDNLTKAERGGLSELDKAGFIKRQLVETRQITKHVAQILDSRMNTKYDENDKLIREVKVITLKSKLVSDFRKDFQFYKVREINNYHHAHDAYLNAVVGTALIKKYPKLESEFVYGDYKVYDVRKMIAKSEQEIGKATAKYFFYSNIMNFFKTEITLANGEIRKRPLIETNGETGEIVWDKGRDFATVRKVLSMPQVNIVKKTEVQTGGFSKESILPKRNSDKLIARKKDWDPKKYGGFDSPTVAYSVLVVAKVEKGKSKKLKSVKELLGITIMERSSFEKNPIDFLEAKGYKEVKKDLIIKLPKYSLFELENGRKRMLASAGELQKGNELALPSKYVNFLYLASHYEKLKGSPEDNEQKQLFVEQHKHYLDEIIEQISEFSKRVILADANLDKVLSAYNKHRDKPIREQAENIIHLFTLTNLGAPAAFKYFDTTIDRKRYTSTKEVLDATLIHQSITGLYETRIDLSQLGGDGGGGGGSGGGGSGGGGSGGGGSGGGGSGGGGSGGTLQLDDEYRLYSPLVKPDQNIQFWLEQFPQAWAETAGMGLAKQVPPQVIQLKASATPVSVRQYPLSKEAQEGIRPHVQRLIQQGILVPVQSPWNTPLLPVRKPGTNDYRPVQDLREVNKRVQDIHPTVPNPYNLLCALPPQRSWYTVLDLKDAFFCLRLHPTSQPLFAFEWRDPGTGRTGQLTWTRLPQGFKNSPTIFNEALHRDLANFRIQHPQVTLLQYVDDLLLAGATKQDCLEGTKALLLELSDLGYRASAKKAQICRREVTYLGYSLRDGQRWLTEARKKTVVQIPAPTTAKQVREFLGTAGFCRLWIPGFATLAAPLYPLTKPKGEFSWAPEHQKAFDAIKKALLSAPALALPDVTKPFTLYVDERKGVARGVLTQTLGPWRRPVAYLSKKLDPVASGWPVCLKAIAAVAILVKDADKLTLGQNITVIAPHALENIVRQPPDRWMTNARMTHYQSLLLTERVTFAPPAALNPATLLPEETDEPVTHDCHQLLIEETGVRKDLTDIPLTGEVLTWFTDGSSYVVEGKRMAGAAVVDGTRTIWASSLPEGTSAQKAELMALTQALRLAEGKSINIYTDSRYAFATAHVHGAIYKQRGWLTSAGREIKNKEEILSLLEALHLPKRLAIIHCPGHQKAKDPISRGNQMADRVAKQAAQGVNLLAGKRTADGSEFEKRTADGSEFESPKKKAKVE

SEQ ID NO: 6220 - protein, 2106 aa, synthetic construct
MPAAKRVKLDGGDKKYSIGLDIGTNSVGWAVITDEYKVPSKKFKVLGNTDRHSIKKNLIGALLFDSGETAEATRLKRTARRRYTRRKNRICYLQEIFSNEMAKVDDSFFHRLEESFLVEEDKKHERHPIFGNIVDEVAYHEKYPTIYHLRKKLVDSTDKADLRLIYLALAHMIKFRGHFLIEGDLNPDNSDVDKLFIQLVQTYNQLFEENPINASGVDAKAILSARLSKSRRLENLIAQLPGEKKNGLFGNLIALSLGLTPNFKSNFDLAEDAKLQLSKDTYDDDLDNLLAQIGDQYADLFLAAKNLSDAILLSDILRVNTEITKAPLSASMIKRYDEHHQDLTLLKALVRQQLPEKYKEIFFDQSKNGYAGYIDGGASQEEFYKFIKPILEKMDGTEELLVKLNREDLLRKQRTFDNGSIPHQIHLGELHAILRRQEDFYPFLKDNREKIEKILTFRIPYYVGPLARGNSRFAWMTRKSEETITPWNFEEVVDKGASAQSFIERMTNFDKNLPNEKVLPKHSLLYEYFTVYNELTKVKYVTEGMRKPAFLSGEQKKAIVDLLFKTNRKVTVKQLKEDYFKKIECFDSVEISGVEDRFNASLGTYHDLLKIIKDKDFLDNEENEDILEDIVLTLTLFEDREMIEERLKTYAHLFDDKVMKQLKRRRYTGWGRLSRKLINGIRDKQSGKTILDFLKSDGFANRNFMQLIHDDSLTFKEDIQKAQVSGQGDSLHEHIANLAGSPAIKKGILQTVKVVDELVKVMGRHKPENIVIEMARENQTTQKGQKNSRERMKRIEEGIKELGSQILKEHPVENTQLQNEKLYLYYLQNGRDMYVDQELDINRLSDYDVDHIVPQSFLKDDSIDNKVLTRSDKARGKSDNVPSEEVVKKMKNYWRQLLNAKLITQRKFDNLTKAERGGLSELDKAGFIKRQLVETRQITKHVAQILDSRMNTKYDENDKLIREVKVITLKSKLVSDFRKDFQFYKVREINNYHHAHDAYLNAVVGTALIKKYPKLESEFVYGDYKVYDVRKMIAKSEQEIGKATAKYFFYSNIMNFFKTEITLANGEIRKRPLIETNGETGEIVWDKGRDFATVRKVLSMPQVNIVKKTEVQTGGFSKESILPKRNSDKLIARKKDWDPKKYGGFDSPTVAYSVLVVAKVEKGKSKKLKSVKELLGITIMERSSFEKNPIDFLEAKGYKEVKKDLIIKLPKYSLFELENGRKRMLASAGELQKGNELALPSKYVNFLYLASHYEKLKGSPEDNEQKQLFVEQHKHYLDEIIEQISEFSKRVILADANLDKVLSAYNKHRDKPIREQAENIIHLFTLTNLGAPAAFKYFDTTIDRKRYTSTKEVLDATLIHQSITGLYETRIDLSQLGGDGGGGGGSGGGGSGGGGSGGGGSGGGGSGGGGSGGVPWLMKKPLQLTVLVPLHEYQERLLQQTALPKEQKELLQKLFLKYDALWQHWENQVGHRRIKPHNIATGTLAPRPQKQYPINPKAKPSIQIVIDDLLKQGVLIQQNSTMNTPVYPVPKPDGKWRMVLDYREVNKTIPLIAAQNQHSAGILSSIYRGKYKTTLDLTNGFWAHPITPESYWLTAFTWQGKQYCWTRLPQGFLNSPALFNADVVDLLKEIPNVQAYVDDIYISHDDPQEHLEQLEKIFSILLNAGYVVSLKKSEIAQREVEFLGFNITKEGRGLTDTFKQKLLNITPPKDLKQLQSILGKLNFARNFIPNYSELVKPLYTIVAPANGKFISWTEDNSNQLQHIISVLNQADNLEERNPETRLIIKVNSSPSAGYIRYYNEGSKRPIMYVNYIFSKAEAKFTQTEKLLTTMHKGLIKAMDLAMGQEILVYSPIVSMTKIQRTPLPERKALPVRWITWMTYLEDPRIQFHYDKSLPELQQIPNVTEDVIAKTKHPSEFAMVFYTDGSAIKHPDVNKSHSAGMGIAQVQFIPEYKIVHQWSIPLGDHTAQLAEIAAVEFACKKALKISGPVLIVTDSFYVAESANKELPYWKSNGFLNNKKKPLRHVSKWKSIAECLQLKPDIIIMHEKGHQQPMTTLHTEGNNLADKLATQGSYVVHAGKRTADGSEFEKRTADGSEFESPKKKAKVE

SEQ ID NO: 6221 - protein, 2195 aa, synthetic construct
MPAAKRVKLDGGDKKYSIGLDIGTNSVGWAVITDEYKVPSKKFKVLGNTDRHSIKKNLIGALLFDSGETAEATRLKRTARRRYTRRKNRICYLQEIFSNEMAKVDDSFFHRLEESFLVEEDKKHERHPIFGNIVDEVAYHEKYPTIYHLRKKLVDSTDKADLRLIYLALAHMIKFRGHFLIEGDLNPDNSDVDKLFIQLVQTYNQLFEENPINASGVDAKAILSARLSKSRRLENLIAQLPGEKKNGLFGNLIALSLGLTPNFKSNFDLAEDAKLQLSKDTYDDDLDNLLAQIGDQYADLFLAAKNLSDAILLSDILRVNTEITKAPLSASMIKRYDEHHQDLTLLKALVRQQLPEKYKEIFFDQSKNGYAGYIDGGASQEEFYKFIKPILEKMDGTEELLVKLNREDLLRKQRTFDNGSIPHQIHLGELHAILRRQEDFYPFLKDNREKIEKILTFRIPYYVGPLARGNSRFAWMTRKSEETITPWNFEEVVDKGASAQSFIERMTNFDKNLPNEKVLPKHSLLYEYFTVYNELTKVKYVTEGMRKPAFLSGEQKKAIVDLLFKTNRKVTVKQLKEDYFKKIECFDSVEISGVEDRFNASLGTYHDLLKIIKDKDFLDNEENEDILEDIVLTLTLFEDREMIEERLKTYAHLFDDKVMKQLKRRRYTGWGRLSRKLINGIRDKQSGKTILDFLKSDGFANRNFMQLIHDDSLTFKEDIQKAQVSGQGDSLHEHIANLAGSPAIKKGILQTVKVVDELVKVMGRHKPENIVIEMARENQTTQKGQKNSRERMKRIEEGIKELGSQILKEHPVENTQLQNEKLYLYYLQNGRDMYVDQELDINRLSDYDVDHIVPQSFLKDDSIDNKVLTRSDKARGKSDNVPSEEVVKKMKNYWRQLLNAKLITQRKFDNLTKAERGGLSELDKAGFIKRQLVETRQITKHVAQILDSRMNTKYDENDKLIREVKVITLKSKLVSDFRKDFQFYKVREINNYHHAHDAYLNAVVGTALIKKYPKLESEFVYGDYKVYDVRKMIAKSEQEIGKATAKYFFYSNIMNFFKTEITLANGEIRKRPLIETNGETGEIVWDKGRDFATVRKVLSMPQVNIVKKTEVQTGGFSKESILPKRNSDKLIARKKDWDPKKYGGFDSPTVAYSVLVVAKVEKGKSKKLKSVKELLGITIMERSSFEKNPIDFLEAKGYKEVKKDLIIKLPKYSLFELENGRKRMLASAGELQKGNELALPSKYVNFLYLASHYEKLKGSPEDNEQKQLFVEQHKHYLDEIIEQISEFSKRVILADANLDKVLSAYNKHRDKPIREQAENIIHLFTLTNLGAPAAFKYFDTTIDRKRYTSTKEVLDATLIHQSITGLYETRIDLSQLGGDGGGGGGSGGGGSGGGGSGGGGSGGGGSGGGGSGGMDPLQLLQPLEAEIKGTKLKAHWNSGATITCVPEAFLEDERPIQTMLIKTIHGEKQQDVYYLTFKVQGRKVEAEVLASPYDYILLNPSDVPWLMKKPLQLTVLVPLHEYQERLLQQTALPKEQKELLQKLFLKYDALWQHWENQVGHRRIKPHNIATGTLAPRPQKQYPINPKAKPSIQIVIDDLLKQGVLIQQNSTMNTPVYPVPKPDGKWRMVLDYREVNKTIPLIAAQNQHSAGILSSIYRGKYKTTLDLTNGFWAHPITPESYWLTAFTWQGKQYCWTRLPQGFLNSPALFNADVVDLLKEIPNVQAYVDDIYISHDDPQEHLEQLEKIFSILLNAGYVVSLKKSEIAQREVEFLGFNITKEGRGLTDTFKQKLLNITPPKDLKQLQSILGLLNFARNFIPNYSELVKPLYTIVAPANGKFISWTEDNSNQLQHIISVLNQADNLEERNPETRLIIKVNSSPSAGYIRYYNEGSKRPIMYVNYIFSKAEAKFTQTEKLLTTMHKGLIKAMDLAMGQEILVYSPIVSMTKIQRTPLPERKALPVRWITWMTYLEDPRIQFHYDKSLPELQQIPNVTEDVIAKTKHPSEFAMVFYTDGSAIKHPDVNKSHSAGMGIAQVQFIPEYKIVHQWSIPLGDHTAQLAEIAAVEFACKKALKISGPVLIVTDSFYVAESANKELPYWKSNGFLNNKKKPLRHVSKWKSIAECLQLKPDIIIMHEKGHQQPMTTLHTEGNNLADKLATQGSYVVHAGKRTADGSEFEKRTADGSEFESPKKKAKVE

SEQ ID NO: 6222 - protein, 2195 aa, synthetic construct
MPAAKRVKLDGGDKKYSIGLDIGTNSVGWAVITDEYKVPSKKFKVLGNTDRHSIKKNLIGALLFDSGETAEATRLKRTARRRYTRRKNRICYLQEIFSNEMAKVDDSFFHRLEESFLVEEDKKHERHPIFGNIVDEVAYHEKYPTIYHLRKKLVDSTDKADLRLIYLALAHMIKFRGHFLIEGDLNPDNSDVDKLFIQLVQTYNQLFEENPINASGVDAKAILSARLSKSRRLENLIAQLPGEKKNGLFGNLIALSLGLTPNFKSNFDLAEDAKLQLSKDTYDDDLDNLLAQIGDQYADLFLAAKNLSDAILLSDILRVNTEITKAPLSASMIKRYDEHHQDLTLLKALVRQQLPEKYKEIFFDQSKNGYAGYIDGGASQEEFYKFIKPILEKMDGTEELLVKLNREDLLRKQRTFDNGSIPHQIHLGELHAILRRQEDFYPFLKDNREKIEKILTFRIPYYVGPLARGNSRFAWMTRKSEETITPWNFEEVVDKGASAQSFIERMTNFDKNLPNEKVLPKHSLLYEYFTVYNELTKVKYVTEGMRKPAFLSGEQKKAIVDLLFKTNRKVTVKQLKEDYFKKIECFDSVEISGVEDRFNASLGTYHDLLKIIKDKDFLDNEENEDILEDIVLTLTLFEDREMIEERLKTYAHLFDDKVMKQLKRRRYTGWGRLSRKLINGIRDKQSGKTILDFLKSDGFANRNFMQLIHDDSLTFKEDIQKAQVSGQGDSLHEHIANLAGSPAIKKGILQTVKVVDELVKVMGRHKPENIVIEMARENQTTQKGQKNSRERMKRIEEGIKELGSQILKEHPVENTQLQNEKLYLYYLQNGRDMYVDQELDINRLSDYDVDHIVPQSFLKDDSIDNKVLTRSDKARGKSDNVPSEEVVKKMKNYWRQLLNAKLITQRKFDNLTKAERGGLSELDKAGFIKRQLVETRQITKHVAQILDSRMNTKYDENDKLIREVKVITLKSKLVSDFRKDFQFYKVREINNYHHAHDAYLNAVVGTALIKKYPKLESEFVYGDYKVYDVRKMIAKSEQEIGKATAKYFFYSNIMNFFKTEITLANGEIRKRPLIETNGETGEIVWDKGRDFATVRKVLSMPQVNIVKKTEVQTGGFSKESILPKRNSDKLIARKKDWDPKKYGGFDSPTVAYSVLVVAKVEKGKSKKLKSVKELLGITIMERSSFEKNPIDFLEAKGYKEVKKDLIIKLPKYSLFELENGRKRMLASAGELQKGNELALPSKYVNFLYLASHYEKLKGSPEDNEQKQLFVEQHKHYLDEIIEQISEFSKRVILADANLDKVLSAYNKHRDKPIREQAENIIHLFTLTNLGAPAAFKYFDTTIDRKRYTSTKEVLDATLIHQSITGLYETRIDLSQLGGDGGGGGGSGGGGSGGGGSGGGGSGGGGSGGGGSGGMDPLQLLQPLEAEIKGTKLKAHWNSGATITCVPQAFLEEEVPIKNIWIKTIHGEKEQPVYYLTFKIQGRKVEAEVISSPYDYILVSPSDIPWLMKKPLQLTTLVPLQEYEERLLKQTMLTGSYKEKLQSLFLKYDALWQHWENQVGHRRIKPHHIATGTVNPRPQKQYPINPKAKASIQTVINDLLKQGVLIQQNSIMNTPVYPVPKPDGKWRMVLDYREVNKTIPLIAAQNQHSAGILSSIFRGKYKTTLDLSNGFWAHSITPESYWLTAFTWLGQQYCWTRLPQGFLNSPALFTADVVDLLKEVPNVQVYVDDIYISHDDPREHLEQLEKVFSLLLNAGYVVSLKKSEIAQHEVEFLGFNITKEGRGLTETFKQKLLNITPPRDLKQLQSILGLLNFARNFIPNFSELVKPLYNIIATANGKYITWTTDNSQQLQNIISMLNSAENLEERNPEVRLIMKVNTSPSAGYIRFYNEFAKRPIMYLNYVYTKAEVKFTNTEKLLTTIHKGLIKALDLGMGQEILVYSPIVSMTKIQKTPLPERKALPIRWITWMSYLEDPRIQFHYDKTLPELQQVPTVTDDIIAKIKHPSEFSMVFYTDGSAIKHPNVNKSHNAGMGIAQVQFKPEFTVINTWSIPLGDHTAQLAEVAAVEFACKKALKIDGPVLIVTDSFYVAESVNKELPYWQSNGFFNNKKKPLKHVSKWKSIADCIQLKPDIIIIHEKGHQPTASTFHTEGNNLADKLATQGSYVVNAGKRTADGSEFEKRTADGSEFESPKKKAKVE

SEQ ID NO: 6223 - protein, 2106 aa, synthetic construct
MPAAKRVKLDGGDKKYSIGLDIGTNSVGWAVITDEYKVPSKKFKVLGNTDRHSIKKNLIGALLFDSGETAEATRLKRTARRRYTRRKNRICYLQEIFSNEMAKVDDSFFHRLEESFLVEEDKKHERHPIFGNIVDEVAYHEKYPTIYHLRKKLVDSTDKADLRLIYLALAHMIKFRGHFLIEGDLNPDNSDVDKLFIQLVQTYNQLFEENPINASGVDAKAILSARLSKSRRLENLIAQLPGEKKNGLFGNLIALSLGLTPNFKSNFDLAEDAKLQLSKDTYDDDLDNLLAQIGDQYADLFLAAKNLSDAILLSDILRVNTEITKAPLSASMIKRYDEHHQDLTLLKALVRQQLPEKYKEIFFDQSKNGYAGYIDGGASQEEFYKFIKPILEKMDGTEELLVKLNREDLLRKQRTFDNGSIPHQIHLGELHAILRRQEDFYPFLKDNREKIEKILTFRIPYYVGPLARGNSRFAWMTRKSEETITPWNFEEVVDKGASAQSFIERMTNFDKNLPNEKVLPKHSLLYEYFTVYNELTKVKYVTEGMRKPAFLSGEQKKAIVDLLFKTNRKVTVKQLKEDYFKKIECFDSVEISGVEDRFNASLGTYHDLLKIIKDKDFLDNEENEDILEDIVLTLTLFEDREMIEERLKTYAHLFDDKVMKQLKRRRYTGWGRLSRKLINGIRDKQSGKTILDFLKSDGFANRNFMQLIHDDSLTFKEDIQKAQVSGQGDSLHEHIANLAGSPAIKKGILQTVKVVDELVKVMGRHKPENIVIEMARENQTTQKGQKNSRERMKRIEEGIKELGSQILKEHPVENTQLQNEKLYLYYLQNGRDMYVDQELDINRLSDYDVDHIVPQSFLKDDSIDNKVLTRSDKARGKSDNVPSEEVVKKMKNYWRQLLNAKLITQRKFDNLTKAERGGLSELDKAGFIKRQLVETRQITKHVAQILDSRMNTKYDENDKLIREVKVITLKSKLVSDFRKDFQFYKVREINNYHHAHDAYLNAVVGTALIKKYPKLESEFVYGDYKVYDVRKMIAKSEQEIGKATAKYFFYSNIMNFFKTEITLANGEIRKRPLIETNGETGEIVWDKGRDFATVRKVLSMPQVNIVKKTEVQTGGFSKESILPKRNSDKLIARKKDWDPKKYGGFDSPTVAYSVLVVAKVEKGKSKKLKSVKELLGITIMERSSFEKNPIDFLEAKGYKEVKKDLIIKLPKYSLFELENGRKRMLASAGELQKGNELALPSKYVNFLYLASHYEKLKGSPEDNEQKQLFVEQHKHYLDEIIEQISEFSKRVILADANLDKVLSAYNKHRDKPIREQAENIIHLFTLTNLGAPAAFKYFDTTIDRKRYTSTKEVLDATLIHQSITGLYETRIDLSQLGGDGGGGGGSGGGGSGGGGSGGGGSGGGGSGGGGSGGIPWLMKKPLQLTTLVPLQEYEERLLKQTMLTGSYKEKLQSLFLKYDALWQHWENQVGHRRIKPHHIATGTVNPRPQKQYPINPKAKASIQTVINDLLKQGVLIQQNSIMNTPVYPVPKPDGKWRMVLDYREVNKTIPLIAAQNQHSAGILSSIFRGKYKTTLDLSNGFWAHSITPESYWLTAFTWLGQQYCWTRLPQGFLNSPALFNADVVDLLKEVPNVQVYVDDIYISHDDPREHLEQLEKVFSLLLNAGYVVSLKKSEIAQHEVEFLGFNITKEGRGLTETFKQKLLNITPPRDLKQLQSILGKLNFARNFIPNFSELVKPLYNIIATAPGKYITWTTDNSQQLQNIISMLNSAENLEERNPEVRLIMKVNTSPSAGYIRFYNEFAKRPIMYLNYVYTKAEVKFTNTEKLLTTIHKGLIKALDLGMGQEILVYSPIVSMTKIQKTPLPERKALPIRWITWMSYLEDPRIQFHYDKTLPELQQVPTVTDDIIAKIKHPSEFSMVFYTDGSAIKHPNVNKSHNAGMGIAQVQFKPEFTVINTWSIPLGDHTAQLAEVAAVEFACKKALKIDGPVLIVTDSFYVAESVNKELPYWQSNGFFNNKKKPLKHVSKWKSIADCIQLKPDIIIIHEKGHQPTASTFHTEGNNLADKLATQGSYVVNAGKRTADGSEFEKRTADGSEFESPKKKAKVE

SEQ ID NO: 6224 - protein, 2106 aa, synthetic construct
MPAAKRVKLDGGDKKYSIGLDIGTNSVGWAVITDEYKVPSKKFKVLGNTDRHSIKKNLIGALLFDSGETAEATRLKRTARRRYTRRKNRICYLQEIFSNEMAKVDDSFFHRLEESFLVEEDKKHERHPIFGNIVDEVAYHEKYPTIYHLRKKLVDSTDKADLRLIYLALAHMIKFRGHFLIEGDLNPDNSDVDKLFIQLVQTYNQLFEENPINASGVDAKAILSARLSKSRRLENLIAQLPGEKKNGLFGNLIALSLGLTPNFKSNFDLAEDAKLQLSKDTYDDDLDNLLAQIGDQYADLFLAAKNLSDAILLSDILRVNTEITKAPLSASMIKRYDEHHQDLTLLKALVRQQLPEKYKEIFFDQSKNGYAGYIDGGASQEEFYKFIKPILEKMDGTEELLVKLNREDLLRKQRTFDNGSIPHQIHLGELHAILRRQEDFYPFLKDNREKIEKILTFRIPYYVGPLARGNSRFAWMTRKSEETITPWNFEEVVDKGASAQSFIERMTNFDKNLPNEKVLPKHSLLYEYFTVYNELTKVKYVTEGMRKPAFLSGEQKKAIVDLLFKTNRKVTVKQLKEDYFKKIECFDSVEISGVEDRFNASLGTYHDLLKIIKDKDFLDNEENEDILEDIVLTLTLFEDREMIEERLKTYAHLFDDKVMKQLKRRRYTGWGRLSRKLINGIRDKQSGKTILDFLKSDGFANRNFMQLIHDDSLTFKEDIQKAQVSGQGDSLHEHIANLAGSPAIKKGILQTVKVVDELVKVMGRHKPENIVIEMARENQTTQKGQKNSRERMKRIEEGIKELGSQILKEHPVENTQLQNEKLYLYYLQNGRDMYVDQELDINRLSDYDVDHIVPQSFLKDDSIDNKVLTRSDKARGKSDNVPSEEVVKKMKNYWRQLLNAKLITQRKFDNLTKAERGGLSELDKAGFIKRQLVETRQITKHVAQILDSRMNTKYDENDKLIREVKVITLKSKLVSDFRKDFQFYKVREINNYHHAHDAYLNAVVGTALIKKYPKLESEFVYGDYKVYDVRKMIAKSEQEIGKATAKYFFYSNIMNFFKTEITLANGEIRKRPLIETNGETGEIVWDKGRDFATVRKVLSMPQVNIVKKTEVQTGGFSKESILPKRNSDKLIARKKDWDPKKYGGFDSPTVAYSVLVVAKVEKGKSKKLKSVKELLGITIMERSSFEKNPIDFLEAKGYKEVKKDLIIKLPKYSLFELENGRKRMLASAGELQKGNELALPSKYVNFLYLASHYEKLKGSPEDNEQKQLFVEQHKHYLDEIIEQISEFSKRVILADANLDKVLSAYNKHRDKPIREQAENIIHLFTLTNLGAPAAFKYFDTTIDRKRYTSTKEVLDATLIHQSITGLYETRIDLSQLGGDGGGGGGSGGGGSGGGGSGGGGSGGGGSGGGGSGGVPWLTQQPLQLTILVPLQEYQDRILNKTALPEEQKQQLKALFTKYDNLWQHWENQVGHRKIRPHNIATGDYPPRPQKQYPINPKAKPSIQIVIDDLLKQGVLTPQNSTMNTPVYPVPKPDGRWRMVLDYREVNKTIPLTAAQNQHSAGILATIVRQKYKTTLDLANGFWAHPITPDSYWLTAFTWQGKQYCWTRLPQGFLNSPALFNADAVDLLKEVPNVQVYVDDIYLSHDNPHEHIQQLEKVFQILLQAGYVVSLKKSEIGQRTVEFLGFNITKEGRGLTDTFKTKLLNVTPPKDLKQLQSILGKLNFARNFIPNFAELVQTLYNLIASSPGKYIEWTEDNTKQLNKVIEALNTASNLEERLPDQRLVIKVNTSPSAGYVRYYNESGKKPIMYLNYVFSKAELKFSMLEKLLTTMHKALIKAMDLAMGQEILVYSPIVSMTKIQKTPLPERKALPIRWITWMTYLEDPRIQFHYDKTLPELKHIPDVYTSSIPPLKHPSQYEGVFCTDGSAIKSPDPTKSNNAGMGIVHAIYNPEYKILNQWSIPLGHHTAQMAEIAAVEFACKKALKVPGPVLVITDSFYVAESANKELPYWKSNGFVNNKKEPLKHISKWKSIAECLSIKPDITIQHEKGHQPINTSIHTEGNALADKLATQGSYVVNAGKRTADGSEFEKRTADGSEFESPKKKAKVE

SEQ ID NO: 6225 - protein, 2113 aa, synthetic construct
MPAAKRVKLDGGDKKYSIGLDIGTNSVGWAVITDEYKVPSKKFKVLGNTDRHSIKKNLIGALLFDSGETAEATRLKRTARRRYTRRKNRICYLQEIFSNEMAKVDDSFFHRLEESFLVEEDKKHERHPIFGNIVDEVAYHEKYPTIYHLRKKLVDSTDKADLRLIYLALAHMIKFRGHFLIEGDLNPDNSDVDKLFIQLVQTYNQLFEENPINASGVDAKAILSARLSKSRRLENLIAQLPGEKKNGLFGNLIALSLGLTPNFKSNFDLAEDAKLQLSKDTYDDDLDNLLAQIGDQYADLFLAAKNLSDAILLSDILRVNTEITKAPLSASMIKRYDEHHQDLTLLKALVRQQLPEKYKEIFFDQSKNGYAGYIDGGASQEEFYKFIKPILEKMDGTEELLVKLNREDLLRKQRTFDNGSIPHQIHLGELHAILRRQEDFYPFLKDNREKIEKILTFRIPYYVGPLARGNSRFAWMTRKSEETITPWNFEEVVDKGASAQSFIERMTNFDKNLPNEKVLPKHSLLYEYFTVYNELTKVKYVTEGMRKPAFLSGEQKKAIVDLLFKTNRKVTVKQLKEDYFKKIECFDSVEISGVEDRFNASLGTYHDLLKIIKDKDFLDNEENEDILEDIVLTLTLFEDREMIEERLKTYAHLFDDKVMKQLKRRRYTGWGRLSRKLINGIRDKQSGKTILDFLKSDGFANRNFMQLIHDDSLTFKEDIQKAQVSGQGDSLHEHIANLAGSPAIKKGILQTVKVVDELVKVMGRHKPENIVIEMARENQTTQKGQKNSRERMKRIEEGIKELGSQILKEHPVENTQLQNEKLYLYYLQNGRDMYVDQELDINRLSDYDVDHIVPQSFLKDDSIDNKVLTRSDKARGKSDNVPSEEVVKKMKNYWRQLLNAKLITQRKFDNLTKAERGGLSELDKAGFIKRQLVETRQITKHVAQILDSRMNTKYDENDKLIREVKVITLKSKLVSDFRKDFQFYKVREINNYHHAHDAYLNAVVGTALIKKYPKLESEFVYGDYKVYDVRKMIAKSEQEIGKATAKYFFYSNIMNFFKTEITLANGEIRKRPLIETNGETGEIVWDKGRDFATVRKVLSMPQVNIVKKTEVQTGGFSKESILPKRNSDKLIARKKDWDPKKYGGFDSPTVAYSVLVVAKVEKGKSKKLKSVKELLGITIMERSSFEKNPIDFLEAKGYKEVKKDLIIKLPKYSLFELENGRKRMLASAGELQKGNELALPSKYVNFLYLASHYEKLKGSPEDNEQKQLFVEQHKHYLDEIIEQISEFSKRVILADANLDKVLSAYNKHRDKPIREQAENIIHLFTLTNLGAPAAFKYFDTTIDRKRYTSTKEVLDATLIHQSITGLYETRIDLSQLGGDGGGGGGSGGGGSGGGGSGGGGSGGGGSGGGGSGGVLNLEEEYRLHEKPVPSSIDPSWLQLFPTVWAERAGMGLANQVPPVVVELRSGASPVAVRQYPMSKEAREGIRPHIQRFLDLGVLVPCQSPWNTPLLPVKKPGTNDYRPVQDLREINKRVQDIHPTVPNPYNLLSSLPPSHTWYSVLDLKDAFFCLKLHPNSQPLFAFEWRDPEKGNTGQLTWTRLPQGFKNSPTLFNEALHRDLAPFRALNPQVVLLQYVDDLLVAAPTYRDCKEGTQKLLQELSKLGYRVSAKKAQLCQKEVTYLGYLLKEGKRWLTPARKATVMKIPPPTTPRQVREFLGTAGFCRLWIPGFASLAAPLYPLTKPSIPFIWTEEHQKAFDRIKEALLSAPALALPDLTKPFTLYVDERAGVARGVLTQTLGPWRRPVAYLSKKLDPVASGWPTCLKAVAAVALLLKDADKLTLGQNVTVIASHSLESIVRQPPDRWMTNARMTHYQSLLLNERVSFAPPAVLNPATLLPVESEATPVHRCSEILAEETGTRRDLKDQPLPGVPAWYTDGSSFIAEGKRRAGAAIVDGKRTVWASSLPEGTSAQKAELVALTQALRLAEGKDINIYTDSRYAFATAHIHGAIYKQRGWLTSAGKDIKNKEEILALLEAIHLPKRVAIIHCPGHQKGNDPVATGNRRADEAAKQAALSTRVLAETTKPAGKRTADGSEFEKRTADGSEFESPKKKAKVE

SEQ ID NO: 6226 - protein, 2113 aa, synthetic construct
MPAAKRVKLDGGDKKYSIGLDIGTNSVGWAVITDEYKVPSKKFKVLGNTDRHSIKKNLIGALLFDSGETAEATRLKRTARRRYTRRKNRICYLQEIFSNEMAKVDDSFFHRLEESFLVEEDKKHERHPIFGNIVDEVAYHEKYPTIYHLRKKLVDSTDKADLRLIYLALAHMIKFRGHFLIEGDLNPDNSDVDKLFIQLVQTYNQLFEENPINASGVDAKAILSARLSKSRRLENLIAQLPGEKKNGLFGNLIALSLGLTPNFKSNFDLAEDAKLQLSKDTYDDDLDNLLAQIGDQYADLFLAAKNLSDAILLSDILRVNTEITKAPLSASMIKRYDEHHQDLTLLKALVRQQLPEKYKEIFFDQSKNGYAGYIDGGASQEEFYKFIKPILEKMDGTEELLVKLNREDLLRKQRTFDNGSIPHQIHLGELHAILRRQEDFYPFLKDNREKIEKILTFRIPYYVGPLARGNSRFAWMTRKSEETITPWNFEEVVDKGASAQSFIERMTNFDKNLPNEKVLPKHSLLYEYFTVYNELTKVKYVTEGMRKPAFLSGEQKKAIVDLLFKTNRKVTVKQLKEDYFKKIECFDSVEISGVEDRFNASLGTYHDLLKIIKDKDFLDNEENEDILEDIVLTLTLFEDREMIEERLKTYAHLFDDKVMKQLKRRRYTGWGRLSRKLINGIRDKQSGKTILDFLKSDGFANRNFMQLIHDDSLTFKEDIQKAQVSGQGDSLHEHIANLAGSPAIKKGILQTVKVVDELVKVMGRHKPENIVIEMARENQTTQKGQKNSRERMKRIEEGIKELGSQILKEHPVENTQLQNEKLYLYYLQNGRDMYVDQELDINRLSDYDVDHIVPQSFLKDDSIDNKVLTRSDKARGKSDNVPSEEVVKKMKNYWRQLLNAKLITQRKFDNLTKAERGGLSELDKAGFIKRQLVETRQITKHVAQILDSRMNTKYDENDKLIREVKVITLKSKLVSDFRKDFQFYKVREINNYHHAHDAYLNAVVGTALIKKYPKLESEFVYGDYKVYDVRKMIAKSEQEIGKATAKYFFYSNIMNFFKTEITLANGEIRKRPLIETNGETGEIVWDKGRDFATVRKVLSMPQVNIVKKTEVQTGGFSKESILPKRNSDKLIARKKDWDPKKYGGFDSPTVAYSVLVVAKVEKGKSKKLKSVKELLGITIMERSSFEKNPIDFLEAKGYKEVKKDLIIKLPKYSLFELENGRKRMLASAGELQKGNELALPSKYVNFLYLASHYEKLKGSPEDNEQKQLFVEQHKHYLDEIIEQISEFSKRVILADANLDKVLSAYNKHRDKPIREQAENIIHLFTLTNLGAPAAFKYFDTTIDRKRYTSTKEVLDATLIHQSITGLYETRIDLSQLGGDGGGGGGSGGGGSGGGGSGGGGSGGGGSGGGGSGGVLNLEEEYRLHEKPVPSSIDPSWLQLFPTVWAERAGMGLANQVPPVVVELRSGASPVAVRQYPMSKEAREGIRPHIQRFLDLGVLVPCQSPWNTPLLPVKKPGTNDYRPVQDLREINKRVQDIHPTVPNPYNLLSSLPPSHTWYSVLDLKDAFFCLKLHPNSQPLFAFEWRDPEKGNTGQLTWTRLPQGFKNSPTLFNEALHRDLAPFRALNPQVVLLQYVDDLLVAAPTYRDCKEGTQKLLQELSKLGYRVSAKKAQLCQKEVTYLGYLLKEGKRWLTPARKATVMKIPPPTTPRQVREFLGKAGFCRLFIPGFASLAAPLYPLTKPSIPFIWTEEHQKAFDRIKEALLSAPALALPDLTKPFTLYVDERAGVARGVLTQTLGPWRRPVAYLSKKLDPVASGWPTCLKAVAAVALLLKDADKLTLGQNVTVIASHSLESIVRQPPDRWMTNARMTHYQSLLLNERVSFAPPAVLNPATLLPVESEATPVHRCSEILAEETGTRRDLKDQPLPGVPAWYTDGSSFIAEGKRRAGAAIVDGKRTVWASSLPEGTSAQKAELVALTQALRLAEGKDINIYTDSRYAFATAHIHGAIYKQRGWLTSAGKDIKNKEEILALLEAIHLPKRVAIIHCPGHQKGNDPVATGNRRADEAAKQAALSTRVLAETTKPAGKRTADGSEFEKRTADGSEFESPKKKAKVE

SEQ ID NO: 6227 - protein, 2090 aa, synthetic construct
MPAAKRVKLDGGDKKYSIGLDIGTNSVGWAVITDEYKVPSKKFKVLGNTDRHSIKKNLIGALLFDSGETAEATRLKRTARRRYTRRKNRICYLQEIFSNEMAKVDDSFFHRLEESFLVEEDKKHERHPIFGNIVDEVAYHEKYPTIYHLRKKLVDSTDKADLRLIYLALAHMIKFRGHFLIEGDLNPDNSDVDKLFIQLVQTYNQLFEENPINASGVDAKAILSARLSKSRRLENLIAQLPGEKKNGLFGNLIALSLGLTPNFKSNFDLAEDAKLQLSKDTYDDDLDNLLAQIGDQYADLFLAAKNLSDAILLSDILRVNTEITKAPLSASMIKRYDEHHQDLTLLKALVRQQLPEKYKEIFFDQSKNGYAGYIDGGASQEEFYKFIKPILEKMDGTEELLVKLNREDLLRKQRTFDNGSIPHQIHLGELHAILRRQEDFYPFLKDNREKIEKILTFRIPYYVGPLARGNSRFAWMTRKSEETITPWNFEEVVDKGASAQSFIERMTNFDKNLPNEKVLPKHSLLYEYFTVYNELTKVKYVTEGMRKPAFLSGEQKKAIVDLLFKTNRKVTVKQLKEDYFKKIECFDSVEISGVEDRFNASLGTYHDLLKIIKDKDFLDNEENEDILEDIVLTLTLFEDREMIEERLKTYAHLFDDKVMKQLKRRRYTGWGRLSRKLINGIRDKQSGKTILDFLKSDGFANRNFMQLIHDDSLTFKEDIQKAQVSGQGDSLHEHIANLAGSPAIKKGILQTVKVVDELVKVMGRHKPENIVIEMARENQTTQKGQKNSRERMKRIEEGIKELGSQILKEHPVENTQLQNEKLYLYYLQNGRDMYVDQELDINRLSDYDVDHIVPQSFLKDDSIDNKVLTRSDKARGKSDNVPSEEVVKKMKNYWRQLLNAKLITQRKFDNLTKAERGGLSELDKAGFIKRQLVETRQITKHVAQILDSRMNTKYDENDKLIREVKVITLKSKLVSDFRKDFQFYKVREINNYHHAHDAYLNAVVGTALIKKYPKLESEFVYGDYKVYDVRKMIAKSEQEIGKATAKYFFYSNIMNFFKTEITLANGEIRKRPLIETNGETGEIVWDKGRDFATVRKVLSMPQVNIVKKTEVQTGGFSKESILPKRNSDKLIARKKDWDPKKYGGFDSPTVAYSVLVVAKVEKGKSKKLKSVKELLGITIMERSSFEKNPIDFLEAKGYKEVKKDLIIKLPKYSLFELENGRKRMLASAGELQKGNELALPSKYVNFLYLASHYEKLKGSPEDNEQKQLFVEQHKHYLDEIIEQISEFSKRVILADANLDKVLSAYNKHRDKPIREQAENIIHLFTLTNLGAPAAFKYFDTTIDRKRYTSTKEVLDATLIHQSITGLYETRIDLSQLGGDGGGGGGGTAPLEEEYRLFLEAPIQNVTLLEQWKREIPKVWAEINPPGLASTQAPIHVQLLSTALPVRVRQYPITLEAKRSLRETIRKFRAAGILRPVHSPWNTPLLPVRKSGTSEYRMVQDLREVNKRVETIHPTVPNPYTLLSLLPPDRIWYSVLDLKDAFFCIPLAPESQLIFAFEWADAEEGESGQLTWTRLPQGFKNSPTLFNEALNRDLQGFRLDHPSVSLLQYVDDLLIAADTQAACLSATRDLLMTLAELGYRVSGKKAQLCQEEVTYLGFKIHKGSRSLSNSRTQAILQIPVPKTKRQVREFLGTIGYCRLWIPGFAELAQPLYAATRPGNDPLVWGEKEEEAFQSLKLALTQPPALALPSLDKPFQLFVEETSGAAKGVLTQALGPWKRPVAYLSKRLDPVAAGWPRCLRAIAAAALLTREASKLTFGQDIEITSSHNLESLLRSPPDKWLTNARITQYQVLLLDPPRVRFKQTAALNPATLLPETDDTLPIHHCLDTLDSLTSTRPDLTDQPLAQAEATLFTDGSSYIRDGKRYAGAAVVTLDSVIWAEPLPIGTSAQKAELIALTKALEWSKDKSVNIYTDSRYAFATLHVHGMIYRERGWLTAGGKAIKNAPEILALLTAVWLPKRVAVMHCKGHQKDDAPTSTGNRRADEVAREVAIRPLSTQATISAGKRTADGSEFEKRTADGSEFESPKKKAKVE

SEQ ID NO: 6228 - protein, 2094 aa, synthetic construct
MPAAKRVKLDGGDKKYSIGLDIGTNSVGWAVITDEYKVPSKKFKVLGNTDRHSIKKNLIGALLFDSGETAEATRLKRTARRRYTRRKNRICYLQEIFSNEMAKVDDSFFHRLEESFLVEEDKKHERHPIFGNIVDEVAYHEKYPTIYHLRKKLVDSTDKADLRLIYLALAHMIKFRGHFLIEGDLNPDNSDVDKLFIQLVQTYNQLFEENPINASGVDAKAILSARLSKSRRLENLIAQLPGEKKNGLFGNLIALSLGLTPNFKSNFDLAEDAKLQLSKDTYDDDLDNLLAQIGDQYADLFLAAKNLSDAILLSDILRVNTEITKAPLSASMIKRYDEHHQDLTLLKALVRQQLPEKYKEIFFDQSKNGYAGYIDGGASQEEFYKFIKPILEKMDGTEELLVKLNREDLLRKQRTFDNGSIPHQIHLGELHAILRRQEDFYPFLKDNREKIEKILTFRIPYYVGPLARGNSRFAWMTRKSEETITPWNFEEVVDKGASAQSFIERMTNFDKNLPNEKVLPKHSLLYEYFTVYNELTKVKYVTEGMRKPAFLSGEQKKAIVDLLFKTNRKVTVKQLKEDYFKKIECFDSVEISGVEDRFNASLGTYHDLLKIIKDKDFLDNEENEDILEDIVLTLTLFEDREMIEERLKTYAHLFDDKVMKQLKRRRYTGWGRLSRKLINGIRDKQSGKTILDFLKSDGFANRNFMQLIHDDSLTFKEDIQKAQVSGQGDSLHEHIANLAGSPAIKKGILQTVKVVDELVKVMGRHKPENIVIEMARENQTTQKGQKNSRERMKRIEEGIKELGSQILKEHPVENTQLQNEKLYLYYLQNGRDMYVDQELDINRLSDYDVDHIVPQSFLKDDSIDNKVLTRSDKARGKSDNVPSEEVVKKMKNYWRQLLNAKLITQRKFDNLTKAERGGLSELDKAGFIKRQLVETRQITKHVAQILDSRMNTKYDENDKLIREVKVITLKSKLVSDFRKDFQFYKVREINNYHHAHDAYLNAVVGTALIKKYPKLESEFVYGDYKVYDVRKMIAKSEQEIGKATAKYFFYSNIMNFFKTEITLANGEIRKRPLIETNGETGEIVWDKGRDFATVRKVLSMPQVNIVKKTEVQTGGFSKESILPKRNSDKLIARKKDWDPKKYGGFDSPTVAYSVLVVAKVEKGKSKKLKSVKELLGITIMERSSFEKNPIDFLEAKGYKEVKKDLIIKLPKYSLFELENGRKRMLASAGELQKGNELALPSKYVNFLYLASHYEKLKGSPEDNEQKQLFVEQHKHYLDEIIEQISEFSKRVILADANLDKVLSAYNKHRDKPIREQAENIIHLFTLTNLGAPAAFKYFDTTIDRKRYTSTKEVLDATLIHQSITGLYETRIDLSQLGGDGGGGGGGTVSLQDEHRLFDIPVTTSLPDVWLQDFPQAWAETGGLGRAKCQAPIIIDLKPTAVPVSIKQYPMSLEAHMGIRQHIIKFLELGVLRPCRSPWNTPLLPVKKPGTQDYRPVQDLREINKRTVDIHPTVPNPYNLLSTLKPDYSWYTVLDLKDAFFCLPLAPQSQELFAFEWKDPERGISGQLTWTRLPQGFKNSPTLFNEALHRDLTDFRTQHPEVTLLQYVDDLLLAAPTKKACTQGTRHLLQELGEKGYRASAKKAQICQTKVTYLGYILSEGKRWLTPGRIETVARIPPPRNPREVREFLGTAGFCRLWIPGFAELAAPLYALTKPSTPFTWQTEHQLAFEALKKALLSAPALGLPDTSKPFTLFLDERQGIAKGVLTQKLGPWKRPVAYLSKKLDPVAAGWPPCLRIMAATAMLVKDSAKLTLGQPLTVITPHTLEAIVRQPPDRWITNARLTHYQALLLDTDRVQFGPPVTLNPATLLPVPENQPSPHDCRQVLAETHGTREDLKDQELPDADHTWYTDGSSYLDSGTRRAGAAVVDGHNTIWAQSLPPGTSAQKAELIALTKALELSKGKKANIYTDSRYAFATAHTHGSIYERRGWLTSEGKEIKNKAEIIALLKALFLPQEVAIIHCPGHQKGQDPVAVGNRQADRVARQAAMAEVLTLATEPDNTSHITAGKRTADGSEFEKRTADGSEFESPKKKAKVE

SEQ ID NO: 6229 - protein, 2094 aa, synthetic construct
MPAAKRVKLDGGDKKYSIGLDIGTNSVGWAVITDEYKVPSKKFKVLGNTDRHSIKKNLIGALLFDSGETAEATRLKRTARRRYTRRKNRICYLQEIFSNEMAKVDDSFFHRLEESFLVEEDKKHERHPIFGNIVDEVAYHEKYPTIYHLRKKLVDSTDKADLRLIYLALAHMIKFRGHFLIEGDLNPDNSDVDKLFIQLVQTYNQLFEENPINASGVDAKAILSARLSKSRRLENLIAQLPGEKKNGLFGNLIALSLGLTPNFKSNFDLAEDAKLQLSKDTYDDDLDNLLAQIGDQYADLFLAAKNLSDAILLSDILRVNTEITKAPLSASMIKRYDEHHQDLTLLKALVRQQLPEKYKEIFFDQSKNGYAGYIDGGASQEEFYKFIKPILEKMDGTEELLVKLNREDLLRKQRTFDNGSIPHQIHLGELHAILRRQEDFYPFLKDNREKIEKILTFRIPYYVGPLARGNSRFAWMTRKSEETITPWNFEEVVDKGASAQSFIERMTNFDKNLPNEKVLPKHSLLYEYFTVYNELTKVKYVTEGMRKPAFLSGEQKKAIVDLLFKTNRKVTVKQLKEDYFKKIECFDSVEISGVEDRFNASLGTYHDLLKIIKDKDFLDNEENEDILEDIVLTLTLFEDREMIEERLKTYAHLFDDKVMKQLKRRRYTGWGRLSRKLINGIRDKQSGKTILDFLKSDGFANRNFMQLIHDDSLTFKEDIQKAQVSGQGDSLHEHIANLAGSPAIKKGILQTVKVVDELVKVMGRHKPENIVIEMARENQTTQKGQKNSRERMKRIEEGIKELGSQILKEHPVENTQLQNEKLYLYYLQNGRDMYVDQELDINRLSDYDVDHIVPQSFLKDDSIDNKVLTRSDKARGKSDNVPSEEVVKKMKNYWRQLLNAKLITQRKFDNLTKAERGGLSELDKAGFIKRQLVETRQITKHVAQILDSRMNTKYDENDKLIREVKVITLKSKLVSDFRKDFQFYKVREINNYHHAHDAYLNAVVGTALIKKYPKLESEFVYGDYKVYDVRKMIAKSEQEIGKATAKYFFYSNIMNFFKTEITLANGEIRKRPLIETNGETGEIVWDKGRDFATVRKVLSMPQVNIVKKTEVQTGGFSKESILPKRNSDKLIARKKDWDPKKYGGFDSPTVAYSVLVVAKVEKGKSKKLKSVKELLGITIMERSSFEKNPIDFLEAKGYKEVKKDLIIKLPKYSLFELENGRKRMLASAGELQKGNELALPSKYVNFLYLASHYEKLKGSPEDNEQKQLFVEQHKHYLDEIIEQISEFSKRVILADANLDKVLSAYNKHRDKPIREQAENIIHLFTLTNLGAPAAFKYFDTTIDRKRYTSTKEVLDATLIHQSITGLYETRIDLSQLGGDGGGGGGGTVSLQDEHRLFDIPVTTSLPDVWLQDFPQAWAETGGLGRAKCQAPIIIDLKPTAVPVSIKQYPMSLEAHMGIRQHIIKFLELGVLRPCRSPWNTPLLPVKKPGTQDYRPVQDLREINKRTVDIHPTVPNPYNLLSTLKPDYSWYTVLDLKDAFFCLPLAPQSQELFAFEWKDPERGISGQLTWTRLPQGFKNSPTLFNEALHRDLTDFRTQHPEVTLLQYVDDLLLAAPTKKACTQGTRHLLQELGEKGYRASAKKAQICQTKVTYLGYILSEGKRWLTPGRIETVARIPPPRNPREVREFLGKAGFCRLFIPGFAELAAPLYALTKPSTPFTWQTEHQLAFEALKKALLSAPALGLPDTSKPFTLFLDERQGIAKGVLTQKLGPWKRPVAYLSKKLDPVAAGWPPCLRIMAATAMLVKDSAKLTLGQPLTVITPHTLEAIVRQPPDRWITNARLTHYQALLLDTDRVQFGPPVTLNPATLLPVPENQPSPHDCRQVLAETHGTREDLKDQELPDADHTWYTDGSSYLDSGTRRAGAAVVDGHNTIWAQSLPPGTSAQKAELIALTKALELSKGKKANIYTDSRYAFATAHTHGSIYERRGWLTSEGKEIKNKAEIIALLKALFLPQEVAIIHCPGHQKGQDPVAVGNRQADRVARQAAMAEVLTLATEPDNTSHITAGKRTADGSEFEKRTADGSEFESPKKKAKVE

SEQ ID NO: 6230 - protein, 2165 aa, synthetic construct
MPAAKRVKLDGGDKKYSIGLDIGTNSVGWAVITDEYKVPSKKFKVLGNTDRHSIKKNLIGALLFDSGETAEATRLKRTARRRYTRRKNRICYLQEIFSNEMAKVDDSFFHRLEESFLVEEDKKHERHPIFGNIVDEVAYHEKYPTIYHLRKKLVDSTDKADLRLIYLALAHMIKFRGHFLIEGDLNPDNSDVDKLFIQLVQTYNQLFEENPINASGVDAKAILSARLSKSRRLENLIAQLPGEKKNGLFGNLIALSLGLTPNFKSNFDLAEDAKLQLSKDTYDDDLDNLLAQIGDQYADLFLAAKNLSDAILLSDILRVNTEITKAPLSASMIKRYDEHHQDLTLLKALVRQQLPEKYKEIFFDQSKNGYAGYIDGGASQEEFYKFIKPILEKMDGTEELLVKLNREDLLRKQRTFDNGSIPHQIHLGELHAILRRQEDFYPFLKDNREKIEKILTFRIPYYVGPLARGNSRFAWMTRKSEETITPWNFEEVVDKGASAQSFIERMTNFDKNLPNEKVLPKHSLLYEYFTVYNELTKVKYVTEGMRKPAFLSGEQKKAIVDLLFKTNRKVTVKQLKEDYFKKIECFDSVEISGVEDRFNASLGTYHDLLKIIKDKDFLDNEENEDILEDIVLTLTLFEDREMIEERLKTYAHLFDDKVMKQLKRRRYTGWGRLSRKLINGIRDKQSGKTILDFLKSDGFANRNFMQLIHDDSLTFKEDIQKAQVSGQGDSLHEHIANLAGSPAIKKGILQTVKVVDELVKVMGRHKPENIVIEMARENQTTQKGQKNSRERMKRIEEGIKELGSQILKEHPVENTQLQNEKLYLYYLQNGRDMYVDQELDINRLSDYDVDHIVPQSFLKDDSIDNKVLTRSDKARGKSDNVPSEEVVKKMKNYWRQLLNAKLITQRKFDNLTKAERGGLSELDKAGFIKRQLVETRQITKHVAQILDSRMNTKYDENDKLIREVKVITLKSKLVSDFRKDFQFYKVREINNYHHAHDAYLNAVVGTALIKKYPKLESEFVYGDYKVYDVRKMIAKSEQEIGKATAKYFFYSNIMNFFKTEITLANGEIRKRPLIETNGETGEIVWDKGRDFATVRKVLSMPQVNIVKKTEVQTGGFSKESILPKRNSDKLIARKKDWDPKKYGGFDSPTVAYSVLVVAKVEKGKSKKLKSVKELLGITIMERSSFEKNPIDFLEAKGYKEVKKDLIIKLPKYSLFELENGRKRMLASAGELQKGNELALPSKYVNFLYLASHYEKLKGSPEDNEQKQLFVEQHKHYLDEIIEQISEFSKRVILADANLDKVLSAYNKHRDKPIREQAENIIHLFTLTNLGAPAAFKYFDTTIDRKRYTSTKEVLDATLIHQSITGLYETRIDLSQLGGDGGGGGGGMDLLKPLTVERKGVKIKGYWNSQADITCVPKDLLQGEEPVRQQNVTTIHGTQEGDVYYVNLKIDGRRINTEVIGTTLDYAIITPGDVPWILKKPLELTIKLDLEEQQGTLLNNSILSKKGKEELKQLFEKYSALWQSWENQVGHRRIRPHKIATGTVKPTPQKQYHINPKAKPDIQIVINDLLKQGVLIQKESTMNTPVYPVPKPNGRWRMVLDYRAVNKVTPLIAVQNQHSYGILGSLFKGRYKTTIDLSNGFWAHPIVPEDYWITAFTWQGKQYCWTVLPQGFLNSPGLFNGDVVDLLQGIPNVEVYVDDVYISHDSEKEHLEYLDILFNRLKEAGYIISLKKSNIANSIVDFLGFQITNEGRGLTDTFKEKLENITAPTTLKQLQSILGLLNFARNFIPDFTELIAPLYALIPKSPKNYVPWQIEHSTTLETLITKLNGAEYLQGRKGDKTLIMKVNASYTTGYIRYYNEGEKKPISYVSIVFSKTELKFTELEKLLTTVHKGLLKALDLSMGQNIHVYSPIVSMQNIQKTPQTAKKALASRWLSWLSYLEDPRIRFFYDPQMPALKDLPAVDTGKDNKKHPSNFQHIFYTDGSAITSPTKEGHLNAGMGIVYFINKDGNLQKQQEWSISLGNHTAQFAEIAAFEFALKKCLPLGGNILVVTDSNYVAKAYNEELDVWASNGFVNNRKKPLKHISKWKSVADLKRLRPDVVVTHEPGHQKLDSSPHAYGNNLADQLATQASFKVHAGKRTADGSEFEKRTADGSEFESPKKKAKVE

SEQ ID NO: 6231 - protein, 2086 aa, synthetic construct
MPAAKRVKLDGGDKKYSIGLDIGTNSVGWAVITDEYKVPSKKFKVLGNTDRHSIKKNLIGALLFDSGETAEATRLKRTARRRYTRRKNRICYLQEIFSNEMAKVDDSFFHRLEESFLVEEDKKHERHPIFGNIVDEVAYHEKYPTIYHLRKKLVDSTDKADLRLIYLALAHMIKFRGHFLIEGDLNPDNSDVDKLFIQLVQTYNQLFEENPINASGVDAKAILSARLSKSRRLENLIAQLPGEKKNGLFGNLIALSLGLTPNFKSNFDLAEDAKLQLSKDTYDDDLDNLLAQIGDQYADLFLAAKNLSDAILLSDILRVNTEITKAPLSASMIKRYDEHHQDLTLLKALVRQQLPEKYKEIFFDQSKNGYAGYIDGGASQEEFYKFIKPILEKMDGTEELLVKLNREDLLRKQRTFDNGSIPHQIHLGELHAILRRQEDFYPFLKDNREKIEKILTFRIPYYVGPLARGNSRFAWMTRKSEETITPWNFEEVVDKGASAQSFIERMTNFDKNLPNEKVLPKHSLLYEYFTVYNELTKVKYVTEGMRKPAFLSGEQKKAIVDLLFKTNRKVTVKQLKEDYFKKIECFDSVEISGVEDRFNASLGTYHDLLKIIKDKDFLDNEENEDILEDIVLTLTLFEDREMIEERLKTYAHLFDDKVMKQLKRRRYTGWGRLSRKLINGIRDKQSGKTILDFLKSDGFANRNFMQLIHDDSLTFKEDIQKAQVSGQGDSLHEHIANLAGSPAIKKGILQTVKVVDELVKVMGRHKPENIVIEMARENQTTQKGQKNSRERMKRIEEGIKELGSQILKEHPVENTQLQNEKLYLYYLQNGRDMYVDQELDINRLSDYDVDHIVPQSFLKDDSIDNKVLTRSDKARGKSDNVPSEEVVKKMKNYWRQLLNAKLITQRKFDNLTKAERGGLSELDKAGFIKRQLVETRQITKHVAQILDSRMNTKYDENDKLIREVKVITLKSKLVSDFRKDFQFYKVREINNYHHAHDAYLNAVVGTALIKKYPKLESEFVYGDYKVYDVRKMIAKSEQEIGKATAKYFFYSNIMNFFKTEITLANGEIRKRPLIETNGETGEIVWDKGRDFATVRKVLSMPQVNIVKKTEVQTGGFSKESILPKRNSDKLIARKKDWDPKKYGGFDSPTVAYSVLVVAKVEKGKSKKLKSVKELLGITIMERSSFEKNPIDFLEAKGYKEVKKDLIIKLPKYSLFELENGRKRMLASAGELQKGNELALPSKYVNFLYLASHYEKLKGSPEDNEQKQLFVEQHKHYLDEIIEQISEFSKRVILADANLDKVLSAYNKHRDKPIREQAENIIHLFTLTNLGAPAAFKYFDTTIDRKRYTSTKEVLDATLIHQSITGLYETRIDLSQLGGDGGGGGGGVLNLEEEYRLHEKPVPSSIDPSWLQLFPTVWAERAGMGLANQVPPVVVELRSGASPVAVRQYPMSKEAREGIRPHIQKFLDLGVLVPCRSPWNTPLLPVKKPGTNDYRPVQDLREINKRVQDIHPTVPNPYNLLSSLPPSYTWYSVLDLKDAFFCLRLHPNSQPLFAFEWKDPEKGNTGQLTWTRLPQGFKNSPTLFNEALHRDLAPFRALNPQVVLLQYVDDLLVAAPTYEDCKKGTQKLLQELSKLGYRVSAKKAQLCQREVTYLGYLLKEGKRWLTPARKATVMKIPVPTTPRQVREFLGTAGFCRLWIPGFASLAAPLYPLTKPSIPFIWTEEHQQAFDHIKKALLSAPALALPDLTKPFTLYIDERAGVARGVLTQTLGPWRRPVAYLSKKLDPVASGWPTCLKAVAAVALLLKDADKLTLGQNVTVIASHSLESIVRQPPDRWMTNARMTHYQSLLLNERVSFAPPAVLNPATLLPVESEATPVHRCSEILAEETGTRRDLEDQPLPGVPTWYTDGSSFITEGKRRAGAPIVDGKRTVWASSLPEGTSAQKAELVALTQALRLAEGKNINIYTDSRYAFATAHIHGAIYKQRGWLTSAGKDIKNKEEILALLEAIHLPRRVAIIHCPGHQRGSNPVATGNRRADEAAKQAALSTRVLAGTTKPAGKRTADGSEFEKRTADGSEFESPKKKAKVE

SEQ ID NO: 6232 - protein, 2086 aa, synthetic construct
MPAAKRVKLDGGDKKYSIGLDIGTNSVGWAVITDEYKVPSKKFKVLGNTDRHSIKKNLIGALLFDSGETAEATRLKRTARRRYTRRKNRICYLQEIFSNEMAKVDDSFFHRLEESFLVEEDKKHERHPIFGNIVDEVAYHEKYPTIYHLRKKLVDSTDKADLRLIYLALAHMIKFRGHFLIEGDLNPDNSDVDKLFIQLVQTYNQLFEENPINASGVDAKAILSARLSKSRRLENLIAQLPGEKKNGLFGNLIALSLGLTPNFKSNFDLAEDAKLQLSKDTYDDDLDNLLAQIGDQYADLFLAAKNLSDAILLSDILRVNTEITKAPLSASMIKRYDEHHQDLTLLKALVRQQLPEKYKEIFFDQSKNGYAGYIDGGASQEEFYKFIKPILEKMDGTEELLVKLNREDLLRKQRTFDNGSIPHQIHLGELHAILRRQEDFYPFLKDNREKIEKILTFRIPYYVGPLARGNSRFAWMTRKSEETITPWNFEEVVDKGASAQSFIERMTNFDKNLPNEKVLPKHSLLYEYFTVYNELTKVKYVTEGMRKPAFLSGEQKKAIVDLLFKTNRKVTVKQLKEDYFKKIECFDSVEISGVEDRFNASLGTYHDLLKIIKDKDFLDNEENEDILEDIVLTLTLFEDREMIEERLKTYAHLFDDKVMKQLKRRRYTGWGRLSRKLINGIRDKQSGKTILDFLKSDGFANRNFMQLIHDDSLTFKEDIQKAQVSGQGDSLHEHIANLAGSPAIKKGILQTVKVVDELVKVMGRHKPENIVIEMARENQTTQKGQKNSRERMKRIEEGIKELGSQILKEHPVENTQLQNEKLYLYYLQNGRDMYVDQELDINRLSDYDVDHIVPQSFLKDDSIDNKVLTRSDKARGKSDNVPSEEVVKKMKNYWRQLLNAKLITQRKFDNLTKAERGGLSELDKAGFIKRQLVETRQITKHVAQILDSRMNTKYDENDKLIREVKVITLKSKLVSDFRKDFQFYKVREINNYHHAHDAYLNAVVGTALIKKYPKLESEFVYGDYKVYDVRKMIAKSEQEIGKATAKYFFYSNIMNFFKTEITLANGEIRKRPLIETNGETGEIVWDKGRDFATVRKVLSMPQVNIVKKTEVQTGGFSKESILPKRNSDKLIARKKDWDPKKYGGFDSPTVAYSVLVVAKVEKGKSKKLKSVKELLGITIMERSSFEKNPIDFLEAKGYKEVKKDLIIKLPKYSLFELENGRKRMLASAGELQKGNELALPSKYVNFLYLASHYEKLKGSPEDNEQKQLFVEQHKHYLDEIIEQISEFSKRVILADANLDKVLSAYNKHRDKPIREQAENIIHLFTLTNLGAPAAFKYFDTTIDRKRYTSTKEVLDATLIHQSITGLYETRIDLSQLGGDGGGGGGGVLNLEEEYRLHEKPVPSSIDPSWLQLFPTVWAERAGMGLANQVPPVVVELRSGASPVAVRQYPMSKEAREGIRPHIQKFLDLGVLVPCRSPWNTPLLPVKKPGTNDYRPVQDLREINKRVQDIHPTVPNPYNLLSSLPPSYTWYSVLDLKDAFFCLRLHPNSQPLFAFEWKDPEKGNTGQLTWTRLPQGFKNSPTLFNEALHRDLAPFRALNPQVVLLQYVDDLLVAAPTYEDCKKGTQKLLQELSKLGYRVSAKKAQLCQREVTYLGYLLKEGKRWLTPARKATVMKIPVPTTPRQVREFLGKAGFCRLFIPGFASLAAPLYPLTKPSIPFIWTEEHQQAFDHIKKALLSAPALALPDLTKPFTLYIDERAGVARGVLTQTLGPWRRPVAYLSKKLDPVASGWPTCLKAVAAVALLLKDADKLTLGQNVTVIASHSLESIVRQPPDRWMTNARMTHYQSLLLNERVSFAPPAVLNPATLLPVESEATPVHRCSEILAEETGTRRDLEDQPLPGVPTWYTDGSSFITEGKRRAGAPIVDGKRTVWASSLPEGTSAQKAELVALTQALRLAEGKNINIYTDSRYAFATAHIHGAIYKQRGWLTSAGKDIKNKEEILALLEAIHLPRRVAIIHCPGHQRGSNPVATGNRRADEAAKQAALSTRVLAGTTKPAGKRTADGSEFEKRTADGSEFESPKKKAKVE

SEQ ID NO: 6233 - protein, 2119 aa, synthetic construct
MPAAKRVKLDGGDKKYSIGLDIGTNSVGWAVITDEYKVPSKKFKVLGNTDRHSIKKNLIGALLFDSGETAEATRLKRTARRRYTRRKNRICYLQEIFSNEMAKVDDSFFHRLEESFLVEEDKKHERHPIFGNIVDEVAYHEKYPTIYHLRKKLVDSTDKADLRLIYLALAHMIKFRGHFLIEGDLNPDNSDVDKLFIQLVQTYNQLFEENPINASGVDAKAILSARLSKSRRLENLIAQLPGEKKNGLFGNLIALSLGLTPNFKSNFDLAEDAKLQLSKDTYDDDLDNLLAQIGDQYADLFLAAKNLSDAILLSDILRVNTEITKAPLSASMIKRYDEHHQDLTLLKALVRQQLPEKYKEIFFDQSKNGYAGYIDGGASQEEFYKFIKPILEKMDGTEELLVKLNREDLLRKQRTFDNGSIPHQIHLGELHAILRRQEDFYPFLKDNREKIEKILTFRIPYYVGPLARGNSRFAWMTRKSEETITPWNFEEVVDKGASAQSFIERMTNFDKNLPNEKVLPKHSLLYEYFTVYNELTKVKYVTEGMRKPAFLSGEQKKAIVDLLFKTNRKVTVKQLKEDYFKKIECFDSVEISGVEDRFNASLGTYHDLLKIIKDKDFLDNEENEDILEDIVLTLTLFEDREMIEERLKTYAHLFDDKVMKQLKRRRYTGWGRLSRKLINGIRDKQSGKTILDFLKSDGFANRNFMQLIHDDSLTFKEDIQKAQVSGQGDSLHEHIANLAGSPAIKKGILQTVKVVDELVKVMGRHKPENIVIEMARENQTTQKGQKNSRERMKRIEEGIKELGSQILKEHPVENTQLQNEKLYLYYLQNGRDMYVDQELDINRLSDYDVDHIVPQSFLKDDSIDNKVLTRSDKARGKSDNVPSEEVVKKMKNYWRQLLNAKLITQRKFDNLTKAERGGLSELDKAGFIKRQLVETRQITKHVAQILDSRMNTKYDENDKLIREVKVITLKSKLVSDFRKDFQFYKVREINNYHHAHDAYLNAVVGTALIKKYPKLESEFVYGDYKVYDVRKMIAKSEQEIGKATAKYFFYSNIMNFFKTEITLANGEIRKRPLIETNGETGEIVWDKGRDFATVRKVLSMPQVNIVKKTEVQTGGFSKESILPKRNSDKLIARKKDWDPKKYGGFDSPTVAYSVLVVAKVEKGKSKKLKSVKELLGITIMERSSFEKNPIDFLEAKGYKEVKKDLIIKLPKYSLFELENGRKRMLASAGELQKGNELALPSKYVNFLYLASHYEKLKGSPEDNEQKQLFVEQHKHYLDEIIEQISEFSKRVILADANLDKVLSAYNKHRDKPIREQAENIIHLFTLTNLGAPAAFKYFDTTIDRKRYTSTKEVLDATLIHQSITGLYETRIDLSQLGGDGGGGGGGLLGRDLLTKLKAQIQFSTEGPQVTWEDRPAMCLVLNLEEEYRLHEKPVPPSIDPSWLQLFPMVWAEKAGMGLANQVPPVVVELKSDASPVAVRQYPMSKEAREGIRPHIQRFLDLGILVPCQSPWNTPLLPVKKPGTNDYRPVQDLREVNKRVQDIHPTVPNPYNLLSSLPPSHTWYSVLDLKDAFFCLKLHPNSQPLFAFEWRDPEKGNTGQLTWTRLPQGFKNSPTLFNEALHRDLASFRALNPQVVMLQYVDDLLVAAPTYRDCKEGTRRLLQELSKLGYRVSAKKAQLCREEVTYLGYLLKGGKRWLTPARKATVMKIPTPTTPRQVREFLGKAGFCRLFIPGFASLAAPLYPLTRPKVPFTWTEAHQEAFGRIKEALLSAPALALPDLTKPFALYVDEKEGVARGVLTQTLGPWRRPVAYLSKKLDPVASGWPTCLKAIAAVALLLKDADKLTLGQNVLVIAPHNLESIVRQPPDRWMTNARMTHYQSLLLNERVSFAPPAILNPATLLPVESDDTPIHICSEILAEETGTRPDLRDQPLPGVPAWYTDGSSFIMDGRRQAGAAIVDNKRTVWASNLPEGTSAQKAELIALTQALRLAEGKSINIYTDSRYAFATAHVHGAIYKQRGWLTSAGKDIKNKEEILALLEAIHLPKRVAIIHCPGHQRGTDPVATGNRKADEAAKQAAQSTRILTETTKNAGKRTADGSEFEKRTADGSEFESPKKKAKVE

SEQ ID NO: 6234 - protein, 2210 aa, synthetic construct
MPAAKRVKLDGGDKKYSIGLDIGTNSVGWAVITDEYKVPSKKFKVLGNTDRHSIKKNLIGALLFDSGETAEATRLKRTARRRYTRRKNRICYLQEIFSNEMAKVDDSFFHRLEESFLVEEDKKHERHPIFGNIVDEVAYHEKYPTIYHLRKKLVDSTDKADLRLIYLALAHMIKFRGHFLIEGDLNPDNSDVDKLFIQLVQTYNQLFEENPINASGVDAKAILSARLSKSRRLENLIAQLPGEKKNGLFGNLIALSLGLTPNFKSNFDLAEDAKLQLSKDTYDDDLDNLLAQIGDQYADLFLAAKNLSDAILLSDILRVNTEITKAPLSASMIKRYDEHHQDLTLLKALVRQQLPEKYKEIFFDQSKNGYAGYIDGGASQEEFYKFIKPILEKMDGTEELLVKLNREDLLRKQRTFDNGSIPHQIHLGELHAILRRQEDFYPFLKDNREKIEKILTFRIPYYVGPLARGNSRFAWMTRKSEETITPWNFEEVVDKGASAQSFIERMTNFDKNLPNEKVLPKHSLLYEYFTVYNELTKVKYVTEGMRKPAFLSGEQKKAIVDLLFKTNRKVTVKQLKEDYFKKIECFDSVEISGVEDRFNASLGTYHDLLKIIKDKDFLDNEENEDILEDIVLTLTLFEDREMIEERLKTYAHLFDDKVMKQLKRRRYTGWGRLSRKLINGIRDKQSGKTILDFLKSDGFANRNFMQLIHDDSLTFKEDIQKAQVSGQGDSLHEHIANLAGSPAIKKGILQTVKVVDELVKVMGRHKPENIVIEMARENQTTQKGQKNSRERMKRIEEGIKELGSQILKEHPVENTQLQNEKLYLYYLQNGRDMYVDQELDINRLSDYDVDHIVPQSFLKDDSIDNKVLTRSDKARGKSDNVPSEEVVKKMKNYWRQLLNAKLITQRKFDNLTKAERGGLSELDKAGFIKRQLVETRQITKHVAQILDSRMNTKYDENDKLIREVKVITLKSKLVSDFRKDFQFYKVREINNYHHAHDAYLNAVVGTALIKKYPKLESEFVYGDYKVYDVRKMIAKSEQEIGKATAKYFFYSNIMNFFKTEITLANGEIRKRPLIETNGETGEIVWDKGRDFATVRKVLSMPQVNIVKKTEVQTGGFSKESILPKRNSDKLIARKKDWDPKKYGGFDSPTVAYSVLVVAKVEKGKSKKLKSVKELLGITIMERSSFEKNPIDFLEAKGYKEVKKDLIIKLPKYSLFELENGRKRMLASAGELQKGNELALPSKYVNFLYLASHYEKLKGSPEDNEQKQLFVEQHKHYLDEIIEQISEFSKRVILADANLDKVLSAYNKHRDKPIREQAENIIHLFTLTNLGAPAAFKYFDTTIDRKRYTSTKEVLDATLIHQSITGLYETRIDLSQLGGDGGGGGGGTLGDQGSRGSDPLPEPRVTLTVEGIPTEFLVNTGAEHSVLTKPMGKMGSKRTVVAGATGSKVYPWTTKRLLKIGQKQVTHSFLVIPECPAPLLGRDLLTKLKAQIQFSTEGPQVTWEDRPAMCLVLNLEEEYRLHEKPVPPSIDPSWLQLFPMVWAEKAGMGLANQVPPVVVELKSDASPVAVRQYPMSKEAREGIRPHIQRFLDLGILVPCQSPWNTPLLPVKKPGTNDYRPVQDLREVNKRVQDIHPTVPNPYNLLSSLPPSHTWYSVLDLKDAFFCLKLHPNSQPLFAFEWRDPEKGNTGQLTWTRLPQGFKNSPTLFNEALHRDLASFRALNPQVVMLQYVDDLLVAAPTYRDCKEGTRRLLQELSKLGYRVSAKKAQLCREEVTYLGYLLKGGKRWLTPARKATVMKIPTPTTPRQVREFLGTAGFCRLWIPGFASLAAPLYPLTRPKVPFTWTEAHQEAFGRIKEALLSAPALALPDLTKPFALYVDEKEGVARGVLTQTLGPWRRPVAYLSKKLDPVASGWPTCLKAIAAVALLLKDADKLTLGQNVLVIAPHNLESIVRQPPDRWMTNARMTHYQSLLLNERVSFAPPAILNPATLLPVESDDTPIHICSEILAEETGTRPDLRDQPLPGVPAWYTDGSSFIMDGRRQAGAAIVDNKRTVWASNLPEGTSAQKAELIALTQALRLAEGKSINIYTDSRYAFATAHVHGAIYKQRGWLTSAGKDIKNKEEILALLEAIHLPKRVAIIHCPGHQRGTDPVATGNRKADEAAKQAAQSTRILTETTKNAGKRTADGSEFEKRTADGSEFESPKKKAKVE

SEQ ID NO: 6235 - protein, 2088 aa, synthetic construct
MPAAKRVKLDGGDKKYSIGLDIGTNSVGWAVITDEYKVPSKKFKVLGNTDRHSIKKNLIGALLFDSGETAEATRLKRTARRRYTRRKNRICYLQEIFSNEMAKVDDSFFHRLEESFLVEEDKKHERHPIFGNIVDEVAYHEKYPTIYHLRKKLVDSTDKADLRLIYLALAHMIKFRGHFLIEGDLNPDNSDVDKLFIQLVQTYNQLFEENPINASGVDAKAILSARLSKSRRLENLIAQLPGEKKNGLFGNLIALSLGLTPNFKSNFDLAEDAKLQLSKDTYDDDLDNLLAQIGDQYADLFLAAKNLSDAILLSDILRVNTEITKAPLSASMIKRYDEHHQDLTLLKALVRQQLPEKYKEIFFDQSKNGYAGYIDGGASQEEFYKFIKPILEKMDGTEELLVKLNREDLLRKQRTFDNGSIPHQIHLGELHAILRRQEDFYPFLKDNREKIEKILTFRIPYYVGPLARGNSRFAWMTRKSEETITPWNFEEVVDKGASAQSFIERMTNFDKNLPNEKVLPKHSLLYEYFTVYNELTKVKYVTEGMRKPAFLSGEQKKAIVDLLFKTNRKVTVKQLKEDYFKKIECFDSVEISGVEDRFNASLGTYHDLLKIIKDKDFLDNEENEDILEDIVLTLTLFEDREMIEERLKTYAHLFDDKVMKQLKRRRYTGWGRLSRKLINGIRDKQSGKTILDFLKSDGFANRNFMQLIHDDSLTFKEDIQKAQVSGQGDSLHEHIANLAGSPAIKKGILQTVKVVDELVKVMGRHKPENIVIEMARENQTTQKGQKNSRERMKRIEEGIKELGSQILKEHPVENTQLQNEKLYLYYLQNGRDMYVDQELDINRLSDYDVDHIVPQSFLKDDSIDNKVLTRSDKARGKSDNVPSEEVVKKMKNYWRQLLNAKLITQRKFDNLTKAERGGLSELDKAGFIKRQLVETRQITKHVAQILDSRMNTKYDENDKLIREVKVITLKSKLVSDFRKDFQFYKVREINNYHHAHDAYLNAVVGTALIKKYPKLESEFVYGDYKVYDVRKMIAKSEQEIGKATAKYFFYSNIMNFFKTEITLANGEIRKRPLIETNGETGEIVWDKGRDFATVRKVLSMPQVNIVKKTEVQTGGFSKESILPKRNSDKLIARKKDWDPKKYGGFDSPTVAYSVLVVAKVEKGKSKKLKSVKELLGITIMERSSFEKNPIDFLEAKGYKEVKKDLIIKLPKYSLFELENGRKRMLASAGELQKGNELALPSKYVNFLYLASHYEKLKGSPEDNEQKQLFVEQHKHYLDEIIEQISEFSKRVILADANLDKVLSAYNKHRDKPIREQAENIIHLFTLTNLGAPAAFKYFDTTIDRKRYTSTKEVLDATLIHQSITGLYETRIDLSQLGGDGGGGGGGTLNLEDEYRLYETSAEPEVSPGSTWLSDFPQAWAETGGMGLAVRQAPLIIPLKATSTPVSIKQYPMSQEAKLGIKPHIQRLLDQGILVPCQSPWNTPLLPVKKPGTNDYRPVQDLREVNKRVEDIHPTVPNPYNLLSGLPPSHRWYTVLDLKDAFFCLRLHPTSQPLFAFEWRDPGMGISGQLTWTRLPQGFKNSPTLFNEALHRDLADFRIQHPDLILLQYVDDILLAATSELDCQQGTRALLLTLGNLGYRASAKKAQLCQKQVKYLGYLLKEGQRWLTEARKETVMGQPTPKTPRQLREFLGKAGFCRLFIPGFAEMAAPLYPLTKPGTLFNWGPDQQKAYQEIKQALLTAPALGLPDLTKPFELFVDEKQGYAKGVLTQKLGPWRRPVAYLSKKLDPVAAGWPPCLRMVAAIAVLRKDAGKLTMGQPLVILAPHAVEALVKQPPDRWLSNARMTHYQAMLLDTDRVQFGPVVALNPATLLPLPEEGAPHDCLEILAETHGTRPDLTDQPIPDADHTWYTDGSSFLQEGQRKAGAAVTTETEVIWARALPAGTSAQRAELIALTQALKMAEGKRLNVYTDSRYAFATAHIHGEIYRRRGWLTSEGREIKNKSEILALLKALFLPKRLSIIHCLGHQKGDSAEARGNRLADQAAREAAIKTPPDTSTLLAGKRTADGSEFEKRTADGSEFESPKKKAKVE

SEQ ID NO: 6236 - protein, 2088 aa, synthetic construct
MPAAKRVKLDGGDKKYSIGLDIGTNSVGWAVITDEYKVPSKKFKVLGNTDRHSIKKNLIGALLFDSGETAEATRLKRTARRRYTRRKNRICYLQEIFSNEMAKVDDSFFHRLEESFLVEEDKKHERHPIFGNIVDEVAYHEKYPTIYHLRKKLVDSTDKADLRLIYLALAHMIKFRGHFLIEGDLNPDNSDVDKLFIQLVQTYNQLFEENPINASGVDAKAILSARLSKSRRLENLIAQLPGEKKNGLFGNLIALSLGLTPNFKSNFDLAEDAKLQLSKDTYDDDLDNLLAQIGDQYADLFLAAKNLSDAILLSDILRVNTEITKAPLSASMIKRYDEHHQDLTLLKALVRQQLPEKYKEIFFDQSKNGYAGYIDGGASQEEFYKFIKPILEKMDGTEELLVKLNREDLLRKQRTFDNGSIPHQIHLGELHAILRRQEDFYPFLKDNREKIEKILTFRIPYYVGPLARGNSRFAWMTRKSEETITPWNFEEVVDKGASAQSFIERMTNFDKNLPNEKVLPKHSLLYEYFTVYNELTKVKYVTEGMRKPAFLSGEQKKAIVDLLFKTNRKVTVKQLKEDYFKKIECFDSVEISGVEDRFNASLGTYHDLLKIIKDKDFLDNEENEDILEDIVLTLTLFEDREMIEERLKTYAHLFDDKVMKQLKRRRYTGWGRLSRKLINGIRDKQSGKTILDFLKSDGFANRNFMQLIHDDSLTFKEDIQKAQVSGQGDSLHEHIANLAGSPAIKKGILQTVKVVDELVKVMGRHKPENIVIEMARENQTTQKGQKNSRERMKRIEEGIKELGSQILKEHPVENTQLQNEKLYLYYLQNGRDMYVDQELDINRLSDYDVDHIVPQSFLKDDSIDNKVLTRSDKARGKSDNVPSEEVVKKMKNYWRQLLNAKLITQRKFDNLTKAERGGLSELDKAGFIKRQLVETRQITKHVAQILDSRMNTKYDENDKLIREVKVITLKSKLVSDFRKDFQFYKVREINNYHHAHDAYLNAVVGTALIKKYPKLESEFVYGDYKVYDVRKMIAKSEQEIGKATAKYFFYSNIMNFFKTEITLANGEIRKRPLIETNGETGEIVWDKGRDFATVRKVLSMPQVNIVKKTEVQTGGFSKESILPKRNSDKLIARKKDWDPKKYGGFDSPTVAYSVLVVAKVEKGKSKKLKSVKELLGITIMERSSFEKNPIDFLEAKGYKEVKKDLIIKLPKYSLFELENGRKRMLASAGELQKGNELALPSKYVNFLYLASHYEKLKGSPEDNEQKQLFVEQHKHYLDEIIEQISEFSKRVILADANLDKVLSAYNKHRDKPIREQAENIIHLFTLTNLGAPAAFKYFDTTIDRKRYTSTKEVLDATLIHQSITGLYETRIDLSQLGGDGGGGGGGTLNIEDEYRLHETSKGPDVPLGSTWLSDFPQAWAETGGMGLAVRQAPLIIPLKATSTPVSIKQYPMSQEARLGIKPHIQRLLDQGILVPCQSPWNTPLLPVKKPGTNDYRPVQDLREVNKRVEDIHPTVPNPYNLLSGLPPSHQWYTVLDLKDAFFCLRLHPTSQSLFAFEWRDPEMGISGQLTWTRLPQGFKNSPTLFNEALHRDLADFRIQHPDLILLQYVDDLLLAATSELDCQQGTRALLQTLGDLGYRASAKKAQICQKQVKYLGYLLKEGQRWLTEARKETVMGQPTPKTPRQLREFLGTAGFCRLWIPGFAEMAAPLYPLTKPGTLFEWGPDQQKAYQEIKQALLTAPALGLPDLTKPFELFVDEKQGYAKGVLTQKLGPWRRPVAYLSKKLDPVAAGWPPCLRMVAAIAVLTKDAGKLTMGQPLVILAPHAVEALVKQPPDRWLSNARMTHYQALLLDTDRVQFGPIVALNPATLLPLPEEGLQHDCLDILAEAHGTRPDLTDQPLPDADHTWYTDGSSFLQEGQRKAGAAVTTETEVVWAKALPAGTSAQRAELIALTQALKMAEGKKLNVYTDSRYAFATAHIHGEIYRRRGWLTSEGKEIKNKDEILALLKALFLPKRLSIIHCPGHQKGNRAEARGNRMADQAAREVATRETPETSTLLAGKRTADGSEFEKRTADGSEFESPKKKAKVE

SEQ ID NO: 6237 - protein, 2088 aa, synthetic construct
MPAAKRVKLDGGDKKYSIGLDIGTNSVGWAVITDEYKVPSKKFKVLGNTDRHSIKKNLIGALLFDSGETAEATRLKRTARRRYTRRKNRICYLQEIFSNEMAKVDDSFFHRLEESFLVEEDKKHERHPIFGNIVDEVAYHEKYPTIYHLRKKLVDSTDKADLRLIYLALAHMIKFRGHFLIEGDLNPDNSDVDKLFIQLVQTYNQLFEENPINASGVDAKAILSARLSKSRRLENLIAQLPGEKKNGLFGNLIALSLGLTPNFKSNFDLAEDAKLQLSKDTYDDDLDNLLAQIGDQYADLFLAAKNLSDAILLSDILRVNTEITKAPLSASMIKRYDEHHQDLTLLKALVRQQLPEKYKEIFFDQSKNGYAGYIDGGASQEEFYKFIKPILEKMDGTEELLVKLNREDLLRKQRTFDNGSIPHQIHLGELHAILRRQEDFYPFLKDNREKIEKILTFRIPYYVGPLARGNSRFAWMTRKSEETITPWNFEEVVDKGASAQSFIERMTNFDKNLPNEKVLPKHSLLYEYFTVYNELTKVKYVTEGMRKPAFLSGEQKKAIVDLLFKTNRKVTVKQLKEDYFKKIECFDSVEISGVEDRFNASLGTYHDLLKIIKDKDFLDNEENEDILEDIVLTLTLFEDREMIEERLKTYAHLFDDKVMKQLKRRRYTGWGRLSRKLINGIRDKQSGKTILDFLKSDGFANRNFMQLIHDDSLTFKEDIQKAQVSGQGDSLHEHIANLAGSPAIKKGILQTVKVVDELVKVMGRHKPENIVIEMARENQTTQKGQKNSRERMKRIEEGIKELGSQILKEHPVENTQLQNEKLYLYYLQNGRDMYVDQELDINRLSDYDVDHIVPQSFLKDDSIDNKVLTRSDKARGKSDNVPSEEVVKKMKNYWRQLLNAKLITQRKFDNLTKAERGGLSELDKAGFIKRQLVETRQITKHVAQILDSRMNTKYDENDKLIREVKVITLKSKLVSDFRKDFQFYKVREINNYHHAHDAYLNAVVGTALIKKYPKLESEFVYGDYKVYDVRKMIAKSEQEIGKATAKYFFYSNIMNFFKTEITLANGEIRKRPLIETNGETGEIVWDKGRDFATVRKVLSMPQVNIVKKTEVQTGGFSKESILPKRNSDKLIARKKDWDPKKYGGFDSPTVAYSVLVVAKVEKGKSKKLKSVKELLGITIMERSSFEKNPIDFLEAKGYKEVKKDLIIKLPKYSLFELENGRKRMLASAGELQKGNELALPSKYVNFLYLASHYEKLKGSPEDNEQKQLFVEQHKHYLDEIIEQISEFSKRVILADANLDKVLSAYNKHRDKPIREQAENIIHLFTLTNLGAPAAFKYFDTTIDRKRYTSTKEVLDATLIHQSITGLYETRIDLSQLGGDGGGGGGGTLNIEDEHRLHETSKEPDVSLGSTWLSDFPQAWAETGGMGLAVRQAPLIIPLKATSTPVSIKQYPMSQEARLGIKPHIQRLLDQGILVPCQSPWNTPLLPVKKPGTNDYRPVQDLREVNKRVEDIHPTVPNPYNLLSGLPPSHQWYTVLDLKDAFFCLRLHPTSQPLFAFEWRDPEMGISGQLTWTRLPQGFKNSPTLFNEALHRDLADFRIQHPDLILLQYVDDLLLAATSELDCQQGTRALLQTLGNLGYRASAKKAQICQKQVKYLGYLLKEGQRWLTEARKETVMGQPTPKTPRQLREFLGTAGFCRLWIPGFAEMAAPLYPLTKPGTLFNWGPDQQKAYQEIKQALLTAPALGLPDLTKPFELFVDEKQGYAKGVLTQKLGPWRRPVAYLSKKLDPVAAGWPPCLRMVAAIAVLTKDAGKLTMGQPLVILAPHAVEALVKQPPDRWLSNARMTHYQALLLDTDRVQFGPVVALNPATLLPLPEEGLQHNCLDILAEAHGTRPDLTDQPLPDADHTWYTDGSSLLQEGQRKAGAAVTTETEVIWAKALPAGTSAQRAELIALTQALKMAEGKKLNVYTDSRYAFATAHIHGEIYRRRGWLTSEGKEIKNKDEILALLKALFLPKRLSIIHCPGHQKGHSAEARGNRMADQAARKAAITETPDTSTLLAGKRTADGSEFEKRTADGSEFESPKKKAKVE

SEQ ID NO: 6238 - protein, 2088 aa, synthetic construct; identical to SEQ ID NO: 6237

SEQ ID NO: 6239 - protein, 2088 aa, synthetic construct
MPAAKRVKLDGGDKKYSIGLDIGTNSVGWAVITDEYKVPSKKFKVLGNTDRHSIKKNLIGALLFDSGETAEATRLKRTARRRYTRRKNRICYLQEIFSNEMAKVDDSFFHRLEESFLVEEDKKHERHPIFGNIVDEVAYHEKYPTIYHLRKKLVDSTDKADLRLIYLALAHMIKFRGHFLIEGDLNPDNSDVDKLFIQLVQTYNQLFEENPINASGVDAKAILSARLSKSRRLENLIAQLPGEKKNGLFGNLIALSLGLTPNFKSNFDLAEDAKLQLSKDTYDDDLDNLLAQIGDQYADLFLAAKNLSDAILLSDILRVNTEITKAPLSASMIKRYDEHHQDLTLLKALVRQQLPEKYKEIFFDQSKNGYAGYIDGGASQEEFYKFIKPILEKMDGTEELLVKLNREDLLRKQRTFDNGSIPHQIHLGELHAILRRQEDFYPFLKDNREKIEKILTFRIPYYVGPLARGNSRFAWMTRKSEETITPWNFEEVVDKGASAQSFIERMTNFDKNLPNEKVLPKHSLLYEYFTVYNELTKVKYVTEGMRKPAFLSGEQKKAIVDLLFKTNRKVTVKQLKEDYFKKIECFDSVEISGVEDRFNASLGTYHDLLKIIKDKDFLDNEENEDILEDIVLTLTLFEDREMIEERLKTYAHLFDDKVMKQLKRRRYTGWGRLSRKLINGIRDKQSGKTILDFLKSDGFANRNFMQLIHDDSLTFKEDIQKAQVSGQGDSLHEHIANLAGSPAIKKGILQTVKVVDELVKVMGRHKPENIVIEMARENQTTQKGQKNSRERMKRIEEGIKELGSQILKEHPVENTQLQNEKLYLYYLQNGRDMYVDQELDINRLSDYDVDHIVPQSFLKDDSIDNKVLTRSDKARGKSDNVPSEEVVKKMKNYWRQLLNAKLITQRKFDNLTKAERGGLSELDKAGFIKRQLVETRQITKHVAQILDSRMNTKYDENDKLIREVKVITLKSKLVSDFRKDFQFYKVREINNYHHAHDAYLNAVVGTALIKKYPKLESEFVYGDYKVYDVRKMIAKSEQEIGKATAKYFFYSNIMNFFKTEITLANGEIRKRPLIETNGETGEIVWDKGRDFATVRKVLSMPQVNIVKKTEVQTGGFSKESILPKRNSDKLIARKKDWDPKKYGGFDSPTVAYSVLVVAKVEKGKSKKLKSVKELLGITIMERSSFEKNPIDFLEAKGYKEVKKDLIIKLPKYSLFELENGRKRMLASAGELQKGNELALPSKYVNFLYLASHYEKLKGSPEDNEQKQLFVEQHKHYLDEIIEQISEFSKRVILADANLDKVLSAYNKHRDKPIREQAENIIHLFTLTNLGAPAAFKYFDTTIDRKRYTSTKEVLDATLIHQSITGLYETRIDLSQLGGDGGGGGGGTLNIEDEYRLHEISTEPDVSPGSTWLSDFPQAWAETGGMGLAVRQAPLIIPLKATSTPVSIKQYPMSQEAKLGIKPHIQRLLDQGILVPCQSPWNTPLLPVKKPGTNDYRPVQGLREVNKRVEDIHPTVPNPYNLLSGLPTSHRWYTVLDLKDAFFCLRLHPTSQPLFASEWRDPGMGISGQLTWTRLPQGFKNSPTLFNEALHRGLADFRIQHPDLILLQYVDDLLLAATSELDCQQGTRALLKTLGNLGYRASAKKAQICQKQVKYLGYLLREGQRWLTEARKETVMGQPTPKTPRQLREFLGTAGFCRLWIPRFAEMAAPLYPLTKPGTLFNWGPDQQKAYHEIKQALLTAPALGLPDLTKPFELFVDEKQGYAKGVLTQKLGPWRRPVAYLSKKLDPVAAGWPPCLRMVAAIAVLTKDAGKLTMGQPLVILAPHAVEALVKQPPDRWLSNARMTHYQAMLLDTDRVQFGPVVALNPATLLPLPEEGAPHDCLEILAETHGTEPDLTDQPIPDADHTWYTDGSSFLQEGQRKAGAAVTTETEVIWARALPAGTSAQRAELIALTQALKMAEGKRLNVYTDSRYAFATAHIHGEIYKRRGWLTSEGREIKNKSEILALLKALFLPKRLSIIHCLGHQKGDSAEARGNRLADQAAREAAIKTPPDTSTLLAGKRTADGSEFEKRTADGSEFESPKKKAKVE

SEQ ID NO: 6240 - protein, 2082 aa, synthetic construct
MPAAKRVKLDGGDKKYSIGLDIGTNSVGWAVITDEYKVPSKKFKVLGNTDRHSIKKNLIGALLFDSGETAEATRLKRTARRRYTRRKNRICYLQEIFSNEMAKVDDSFFHRLEESFLVEEDKKHERHPIFGNIVDEVAYHEKYPTIYHLRKKLVDSTDKADLRLIYLALAHMIKFRGHFLIEGDLNPDNSDVDKLFIQLVQTYNQLFEENPINASGVDAKAILSARLSKSRRLENLIAQLPGEKKNGLFGNLIALSLGLTPNFKSNFDLAEDAKLQLSKDTYDDDLDNLLAQIGDQYADLFLAAKNLSDAILLSDILRVNTEITKAPLSASMIKRYDEHHQDLTLLKALVRQQLPEKYKEIFFDQSKNGYAGYIDGGASQEEFYKFIKPILEKMDGTEELLVKLNREDLLRKQRTFDNGSIPHQIHLGELHAILRRQEDFYPFLKDNREKIEKILTFRIPYYVGPLARGNSRFAWMTRKSEETITPWNFEEVVDKGASAQSFIERMTNFDKNLPNEKVLPKHSLLYEYFTVYNELTKVKYVTEGMRKPAFLSGEQKKAIVDLLFKTNRKVTVKQLKEDYFKKIECFDSVEISGVEDRFNASLGTYHDLLKIIKDKDFLDNEENEDILEDIVLTLTLFEDREMIEERLKTYAHLFDDKVMKQLKRRRYTGWGRLSRKLINGIRDKQSGKTILDFLKSDGFANRNFMQLIHDDSLTFKEDIQKAQVSGQGDSLHEHIANLAGSPAIKKGILQTVKVVDELVKVMGRHKPENIVIEMARENQTTQKGQKNSRERMKRIEEGIKELGSQILKEHPVENTQLQNEKLYLYYLQNGRDMYVDQELDINRLSDYDVDHIVPQSFLKDDSIDNKVLTRSDKARGKSDNVPSEEVVKKMKNYWRQLLNAKLITQRKFDNLTKAERGGLSELDKAGFIKRQLVETRQITKHVAQILDSRMNTKYDENDKLIREVKVITLKSKLVSDFRKDFQFYKVREINNYHHAHDAYLNAVVGTALIKKYPKLESEFVYGDYKVYDVRKMIAKSEQEIGKATAKYFFYSNIMNFFKTEITLANGEIRKRPLIETNGETGEIVWDKGRDFATVRKVLSMPQVNIVKKTEVQTGGFSKESILPKRNSDKLIARKKDWDPKKYGGFDSPTVAYSVLVVAKVEKGKSKKLKSVKELLGITIMERSSFEKNPIDFLEAKGYKEVKKDLIIKLPKYSLFELENGRKRMLASAGELQKGNELALPSKYVNFLYLASHYEKLKGSPEDNEQKQLFVEQHKHYLDEIIEQISEFSKRVILADANLDKVLSAYNKHRDKPIREQAENIIHLFTLTNLGAPAAFKYFDTTIDRKRYTSTKEVLDATLIHQSITGLYETRIDLSQLGGDGGGGGGGTLQLDDEYRLYSPLVKPDQNIQFWLEQFPQAWAETAGMGLAKQVPPQVIQLKASATPVSVRQYPLSKEAQEGIRPHVQRLIQQGILVPVQSPWNTPLLPVRKPGTNDYRPVQDLREVNKRVQDIHPTVPNPYNLLCALPPQRSWYTVLDLKDAFFCLRLHPTSQPLFAFEWRDPGTGRTGQLTWTRLPQGFKNSPTIFNEALHRDLANFRIQHPQVTLLQYVDDLLLAGATKQDCLEGTKALLLELSDLGYRASAKKAQICRREVTYLGYSLRDGQRWLTEARKKTVVQIPAPTTAKQVREFLGTAGFCRLWIPGFATLAAPLYPLTKPKGEFSWAPEHQKAFDAIKKALLSAPALALPDVTKPFTLYVDERKGVARGVLTQTLGPWRRPVAYLSKKLDPVASGWPVCLKAIAAVAILVKDADKLTLGQNITVIAPHALENIVRQPPDRWMTNARMTHYQSLLLTERVTFAPPAALNPATLLPEETDEPVTHDCHQLLIEETGVRKDLTDIPLTGEVLTWFTDGSSYVVEGKRMAGAAVVDGTRTIWASSLPEGTSAQKAELMALTQALRLAEGKSINIYTDSRYAFATAHVHGAIYKQRGWLTSAGREIKNKEEILSLLEALHLPKRLAIIHCPGHQKAKDPISRGNQMADRVAKQAAQGVNLLAGKRTADGSEFEKRTADGSEFESPKKKAKVE

SEQ ID NO: 6241 - protein, 2079 aa, synthetic construct
MPAAKRVKLDGGDKKYSIGLDIGTNSVGWAVITDEYKVPSKKFKVLGNTDRHSIKKNLIGALLFDSGETAEATRLKRTARRRYTRRKNRICYLQEIFSNEMAKVDDSFFHRLEESFLVEEDKKHERHPIFGNIVDEVAYHEKYPTIYHLRKKLVDSTDKADLRLIYLALAHMIKFRGHFLIEGDLNPDNSDVDKLFIQLVQTYNQLFEENPINASGVDAKAILSARLSKSRRLENLIAQLPGEKKNGLFGNLIALSLGLTPNFKSNFDLAEDAKLQLSKDTYDDDLDNLLAQIGDQYADLFLAAKNLSDAILLSDILRVNTEITKAPLSASMIKRYDEHHQDLTLLKALVRQQLPEKYKEIFFDQSKNGYAGYIDGGASQEEFYKFIKPILEKMDGTEELLVKLNREDLLRKQRTFDNGSIPHQIHLGELHAILRRQEDFYPFLKDNREKIEKILTFRIPYYVGPLARGNSRFAWMTRKSEETITPWNFEEVVDKGASAQSFIERMTNFDKNLPNEKVLPKHSLLYEYFTVYNELTKVKYVTEGMRKPAFLSGEQKKAIVDLLFKTNRKVTVKQLKEDYFKKIECFDSVEISGVEDRFNASLGTYHDLLKIIKDKDFLDNEENEDILEDIVLTLTLFEDREMIEERLKTYAHLFDDKVMKQLKRRRYTGWGRLSRKLINGIRDKQSGKTILDFLKSDGFANRNFMQLIHDDSLTFKEDIQKAQVSGQGDSLHEHIANLAGSPAIKKGILQTVKVVDELVKVMGRHKPENIVIEMARENQTTQKGQKNSRERMKRIEEGIKELGSQILKEHPVENTQLQNEKLYLYYLQNGRDMYVDQELDINRLSDYDVDHIVPQSFLKDDSIDNKVLTRSDKARGKSDNVPSEEVVKKMKNYWRQLLNAKLITQRKFDNLTKAERGGLSELDKAGFIKRQLVETRQITKHVAQILDSRMNTKYDENDKLIREVKVITLKSKLVSDFRKDFQFYKVREINNYHHAHDAYLNAVVGTALIKKYPKLESEFVYGDYKVYDVRKMIAKSEQEIGKATAKYFFYSNIMNFFKTEITLANGEIRKRPLIETNGETGEIVWDKGRDFATVRKVLSMPQVNIVKKTEVQTGGFSKESILPKRNSDKLIARKKDWDPKKYGGFDSPTVAYSVLVVAKVEKGKSKKLKSVKELLGITIMERSSFEKNPIDFLEAKGYKEVKKDLIIKLPKYSLFELENGRKRMLASAGELQKGNELALPSKYVNFLYLASHYEKLKGSPEDNEQKQLFVEQHKHYLDEIIEQISEFSKRVILADANLDKVLSAYNKHRDKPIREQAENIIHLFTLTNLGAPAAFKYFDTTIDRKRYTSTKEVLDATLIHQSITGLYETRIDLSQLGGDGGGGGGGIPWLMKKPLQLTTLVPLQEYEERLLKQTMLTGSYKEKLQSLFLKYDALWQHWENQVGHRRIKPHHIATGTVNPRPQKQYPINPKAKASIQTVINDLLKQGVLIQQNSIMNTPVYPVPKPDGKWRMVLDYREVNKTIPLIAAQNQHSAGILSSIFRGKYKTTLDLSNGFWAHSITPESYWLTAFTWLGQQYCWTRLPQGFLNSPALFNADVVDLLKEVPNVQVYVDDIYISHDDPREHLEQLEKVFSLLLNAGYVVSLKKSEIAQHEVEFLGFNITKEGRGLTETFKQKLLNITPPRDLKQLQSILGKLNFARNFIPNFSELVKPLYNIIATAPGKYITWTTDNSQQLQNIISMLNSAENLEERNPEVRLIMKVNTSPSAGYIRFYNEFAKRPIMYLNYVYTKAEVKFTNTEKLLTTIHKGLIKALDLGMGQEILVYSPIVSMTKIQKTPLPERKALPIRWITWMSYLEDPRIQFHYDKTLPELQQVPTVTDDIIAKIKHPSEFSMVFYTDGSAIKHPNVNKSHNAGMGIAQVQFKPEFTVINTWSIPLGDHTAQLAEVAAVEFACKKALKIDGPVLIVTDSFYVAESVNKELPYWQSNGFFNNKKKPLKHVSKWKSIADCIQLKPDIIIIHEKGHQPTASTFHTEGNNLADKLATQGSYVVNAGKRTADGSEFEKRTADGSEFESPKKKAKVE

SEQ ID NO: 6242 - protein, 2086 aa, synthetic construct
MPAAKRVKLDGGDKKYSIGLDIGTNSVGWAVITDEYKVPSKKFKVLGNTDRHSIKKNLIGALLFDSGETAEATRLKRTARRRYTRRKNRICYLQEIFSNEMAKVDDSFFHRLEESFLVEEDKKHERHPIFGNIVDEVAYHEKYPTIYHLRKKLVDSTDKADLRLIYLALAHMIKFRGHFLIEGDLNPDNSDVDKLFIQLVQTYNQLFEENPINASGVDAKAILSARLSKSRRLENLIAQLPGEKKNGLFGNLIALSLGLTPNFKSNFDLAEDAKLQLSKDTYDDDLDNLLAQIGDQYADLFLAAKNLSDAILLSDILRVNTEITKAPLSASMIKRYDEHHQDLTLLKALVRQQLPEKYKEIFFDQSKNGYAGYIDGGASQEEFYKFIKPILEKMDGTEELLVKLNREDLLRKQRTFDNGSIPHQIHLGELHAILRRQEDFYPFLKDNREKIEKILTFRIPYYVGPLARGNSRFAWMTRKSEETITPWNFEEVVDKGASAQSFIERMTNFDKNLPNEKVLPKHSLLYEYFTVYNELTKVKYVTEGMRKPAFLSGEQKKAIVDLLFKTNRKVTVKQLKEDYFKKIECFDSVEISGVEDRFNASLGTYHDLLKIIKDKDFLDNEENEDILEDIVLTLTLFEDREMIEERLKTYAHLFDDKVMKQLKRRRYTGWGRLSRKLINGIRDKQSGKTILDFLKSDGFANRNFMQLIHDDSLTFKEDIQKAQVSGQGDSLHEHIANLAGSPAIKKGILQTVKVVDELVKVMGRHKPENIVIEMARENQTTQKGQKNSRERMKRIEEGIKELGSQILKEHPVENTQLQNEKLYLYYLQNGRDMYVDQELDINRLSDYDVDHIVPQSFLKDDSIDNKVLTRSDKARGKSDNVPSEEVVKKMKNYWRQLLNAKLITQRKFDNLTKAERGGLSELDKAGFIKRQLVETRQITKHVAQILDSRMNTKYDENDKLIREVKVITLKSKLVSDFRKDFQFYKVREINNYHHAHDAYLNAVVGTALIKKYPKLESEFVYGDYKVYDVRKMIAKSEQEIGKATAKYFFYSNIMNFFKTEITLANGEIRKRPLIETNGETGEIVWDKGRDFATVRKVLSMPQVNIVKKTEVQTGGFSKESILPKRNSDKLIARKKDWDPKKYGGFDSPTVAYSVLVVAKVEKGKSKKLKSVKELLGITIMERSSFEKNPIDFLEAKGYKEVKKDLIIKLPKYSLFELENGRKRMLASAGELQKGNELALPSKYVNFLYLASHYEKLKGSPEDNEQKQLFVEQHKHYLDEIIEQISEFSKRVILADANLDKVLSAYNKHRDKPIREQAENIIHLFTLTNLGAPAAFKYFDTTIDRKRYTSTKEVLDATLIHQSITGLYETRIDLSQLGGDGGGGGGGVLNLEEEYRLHEKPVPSSIDPSWLQLFPTVWAERAGMGLANQVPPVVVELRSGASPVAVRQYPMSKEAREGIRPHIQRFLDLGVLVPCQSPWNTPLLPVKKPGTNDYRPVQDLREINKRVQDIHPTVPNPYNLLSSLPPSHTWYSVLDLKDAFFCLKLHPNSQPLFAFEWRDPEKGNTGQLTWTRLPQGFKNSPTLFDEALHRDLAPFRALNPQVVLLQYVDDLLVAAPTYRDCKEGTQKLLQELSKLGYRVSAKKAQLCQKEVTYLGYLLKEGKRWLTPARKATVMKIPPPTTPRQVREFLGTAGFCRLWIPGFASLAAPLYPLTKESIPFIWTEEHQKAFDRIKEALLSAPALALPDLTKPFTLYVDERAGVARGVLTQTLGPWRRPVAYLSKKLDPVASGWPTCLKAVAAVALLLKDADKLTLGQNVTVIASHSLESIVRQPPDRWMTNARMTHYQSLLLNERVSFAPPAVLNPATLLPVESEATPVHRCSEILAEETGTRRDLKDQPLPGVPAWYTDGSSFIAEGKRRAGAAIVDGKRTVWASSLPEGTSAQKAELVALTQALRLAEGKDINIYTDSRYAFATAHIHGAIYKQRGLLTSAGKDIKNKEEILALLEAIHLPKRVAIIHCPGHQKGNDPVATGNRRADEAAKQAALSTRVLAETTKPAGKRTADGSEFEKRTADGSEFESPKKKAKVE

SEQ ID NO: 6243 - protein, 2086 aa, synthetic construct
MPAAKRVKLDGGDKKYSIGLDIGTNSVGWAVITDEYKVPSKKFKVLGNTDRHSIKKNLIGALLFDSGETAEATRLKRTARRRYTRRKNRICYLQEIFSNEMAKVDDSFFHRLEESFLVEEDKKHERHPIFGNIVDEVAYHEKYPTIYHLRKKLVDSTDKADLRLIYLALAHMIKFRGHFLIEGDLNPDNSDVDKLFIQLVQTYNQLFEENPINASGVDAKAILSARLSKSRRLENLIAQLPGEKKNGLFGNLIALSLGLTPNFKSNFDLAEDAKLQLSKDTYDDDLDNLLAQIGDQYADLFLAAKNLSDAILLSDILRVNTEITKAPLSASMIKRYDEHHQDLTLLKALVRQQLPEKYKEIFFDQSKNGYAGYIDGGASQEEFYKFIKPILEKMDGTEELLVKLNREDLLRKQRTFDNGSIPHQIHLGELHAILRRQEDFYPFLKDNREKIEKILTFRIPYYVGPLARGNSRFAWMTRKSEETITPWNFEEVVDKGASAQSFIERMTNFDKNLPNEKVLPKHSLLYEYFTVYNELTKVKYVTEGMRKPAFLSGEQKKAIVDLLFKTNRKVTVKQLKEDYFKKIECFDSVEISGVEDRFNASLGTYHDLLKIIKDKDFLDNEENEDILEDIVLTLTLFEDREMIEERLKTYAHLFDDKVMKQLKRRRYTGWGRLSRKLINGIRDKQSGKTILDFLKSDGFANRNFMQLIHDDSLTFKEDIQKAQVSGQGDSLHEHIANLAGSPAIKKGILQTVKVVDELVKVMGRHKPENIVIEMARENQTTQKGQKNSRERMKRIEEGIKELGSQILKEHPVENTQLQNEKLYLYYLQNGRDMYVDQELDINRLSDYDVDHIVPQSFLKDDSIDNKVLTRSDKARGKSDNVPSEEVVKKMKNYWRQLLNAKLITQRKFDNLTKAERGGLSELDKAGFIKRQLVETRQITKHVAQILDSRMNTKYDENDKLIREVKVITLKSKLVSDFRKDFQFYKVREINNYHHAHDAYLNAVVGTALIKKYPKLESEFVYGDYKVYDVRKMIAKSEQEIGKATAKYFFYSNIMNFFKTEITLANGEIRKRPLIETNGETGEIVWDKGRDFATVRKVLSMPQVNIVKKTEVQTGGFSKESILPKRNSDKLIARKKDWDPKKYGGFDSPTVAYSVLVVAKVEKGKSKKLKSVKELLGITIMERSSFEKNPIDFLEAKGYKEVKKDLIIKLPKYSLFELENGRKRMLASAGELQKGNELALPSKYVNFLYLASHYEKLKGSPEDNEQKQLFVEQHKHYLDEIIEQISEFSKRVILADANLDKVLSAYNKHRDKPIREQAENIIHLFTLTNLGAPAAFKYFDTTIDRKRYTSTKEVLDATLIHQSITGLYETRIDLSQLGGDGGGGGGGVLNLEEEYRLHEKPVPSSIDPSWLQLFPTVWAERAGMGLANQVPPVVVELRSGASPVAVRQYPMSKEAREGIRPHIQRFLDLGVLVPCQSPWNTPLLPVKKPGTNDYRPVQDLREINKRVQDIHPTVPNPYNLLSSLPPSHTWYSVLDLKDAFFCLKLHPNSQPLFAFEWRDPEKGNTGQLTWTRLPQGFKNSPTLFNEALHRDLAPFRALNPQVVLLQYVDDLLVAAPTYRDCKEGTQKLLQELSKLGYRVSAKKAQLCQKEVTYLGYLLKEGKRWLTPARKATVMKIPPPTTPRQVREFLGKAGFCRLFIPGFASLAAPLYPLTKPSIPFIWTEEHQKAFDRIKEALLSAPALALPDLTKPFTLYVDERAGVARGVLTQTLGPWRRPVAYLSKKLDPVASGWPTCLKAVAAVALLLKDADKLTLGQNVTVIASHSLESIVRQPPDRWMTNARMTHYQSLLLNERVSFAPPAVLNPATLLPVESEATPVHRCSEILAEETGTRRDLKDQPLPGVPAWYTDGSSFIAEGKRRAGAAIVDGKRTVWASSLPEGTSAQKAELVALTQALRLAEGKDINIYTDSRYAFATAHIHGAIYKQRGWLTSAGKDIKNKEEILALLEAIHLPKRVAIIHCPGHQKGNDPVATGNRRADEAAKQAALSTRVLAETTKPAGKRTADGSEFEKRTADGSEFESPKKKAKVE

SEQ ID NO: 6244 - protein, 2091 aa, synthetic construct
MPAAKRVKLDGGDKKYSIGLDIGTNSVGWAVITDEYKVPSKKFKVLGNTDRHSIKKNLIGALLFDSGETAEATRLKRTARRRYTRRKNRICYLQEIFSNEMAKVDDSFFHRLEESFLVEEDKKHERHPIFGNIVDEVAYHEKYPTIYHLRKKLVDSTDKADLRLIYLALAHMIKFRGHFLIEGDLNPDNSDVDKLFIQLVQTYNQLFEENPINASGVDAKAILSARLSKSRRLENLIAQLPGEKKNGLFGNLIALSLGLTPNFKSNFDLAEDAKLQLSKDTYDDDLDNLLAQIGDQYADLFLAAKNLSDAILLSDILRVNTEITKAPLSASMIKRYDEHHQDLTLLKALVRQQLPEKYKEIFFDQSKNGYAGYIDGGASQEEFYKFIKPILEKMDGTEELLVKLNREDLLRKQRTFDNGSIPHQIHLGELHAILRRQEDFYPFLKDNREKIEKILTFRIPYYVGPLARGNSRFAWMTRKSEETITPWNFEEVVDKGASAQSFIERMTNFDKNLPNEKVLPKHSLLYEYFTVYNELTKVKYVTEGMRKPAFLSGEQKKAIVDLLFKTNRKVTVKQLKEDYFKKIECFDSVEISGVEDRFNASLGTYHDLLKIIKDKDFLDNEENEDILEDIVLTLTLFEDREMIEERLKTYAHLFDDKVMKQLKRRRYTGWGRLSRKLINGIRDKQSGKTILDFLKSDGFANRNFMQLIHDDSLTFKEDIQKAQVSGQGDSLHEHIANLAGSPAIKKGILQTVKVVDELVKVMGRHKPENIVIEMARENQTTQKGQKNSRERMKRIEEGIKELGSQILKEHPVENTQLQNEKLYLYYLQNGRDMYVDQELDINRLSDYDVDHIVPQSFLKDDSIDNKVLTRSDKARGKSDNVPSEEVVKKMKNYWRQLLNAKLITQRKFDNLTKAERGGLSELDKAGFIKRQLVETRQITKHVAQILDSRMNTKYDENDKLIREVKVITLKSKLVSDFRKDFQFYKVREINNYHHAHDAYLNAVVGTALIKKYPKLESEFVYGDYKVYDVRKMIAKSEQEIGKATAKYFFYSNIMNFFKTEITLANGEIRKRPLIETNGETGEIVWDKGRDFATVRKVLSMPQVNIVKKTEVQTGGFSKESILPKRNSDKLIARKKDWDPKKYGGFDSPTVAYSVLVVAKVEKGKSKKLKSVKELLGITIMERSSFEKNPIDFLEAKGYKEVKKDLIIKLPKYSLFELENGRKRMLASAGELQKGNELALPSKYVNFLYLASHYEKLKGSPEDNEQKQLFVEQHKHYLDEIIEQISEFSKRVILADANLDKVLSAYNKHRDKPIREQAENIIHLFTLTNLGAPAAFKYFDTTIDRKRYTSTKEVLDATLIHQSITGLYETRIDLSQLGGDGGGGGGGGTAPLEEEYRLFLEAPIQNVTLLEQWKREIPKVWAEINPPGLASTQAPIHVQLLSTALPVRVRQYPITLEAKRSLRETIRKFRAAGILRPVHSPWNTPLLPVRKSGTSEYRMVQDLREVNKRVETIHPTVPNPYTLLSLLPPDRIWYSVLDLKDAFFCIPLAPESQLIFAFEWADAEEGESGQLTWTRLPQGFKNSPTLFNEALNRDLQGFRLDHPSVSLLQYVDDLLIAADTQAACLSATRDLLMTLAELGYRVSGKKAQLCQEEVTYLGFKIHKGSRSLSNSRTQAILQIPVPKTKRQVREFLGTIGYCRLWIPGFAELAQPLYAATRPGNDPLVWGEKEEEAFQSLKLALTQPPALALPSLDKPFQLFVEETSGAAKGVLTQALGPWKRPVAYLSKRLDPVAAGWPRCLRAIAAAALLTREASKLTFGQDIEITSSHNLESLLRSPPDKWLTNARITQYQVLLLDPPRVRFKQTAALNPATLLPETDDTLPIHHCLDTLDSLTSTRPDLTDQPLAQAEATLFTDGSSYIRDGKRYAGAAVVTLDSVIWAEPLPIGTSAQKAELIALTKALEWSKDKSVNIYTDSRYAFATLHVHGMIYRERGWLTAGGKAIKNAPEILALLTAVWLPKRVAVMHCKGHQKDDAPTSTGNRRADEVAREVAIRPLSTQATISAGKRTADGSEFEKRTADGSEFESPKKKAKVE

SEQ ID NO: 6245 - protein, 2095 aa, synthetic construct
MPAAKRVKLDGGDKKYSIGLDIGTNSVGWAVITDEYKVPSKKFKVLGNTDRHSIKKNLIGALLFDSGETAEATRLKRTARRRYTRRKNRICYLQEIFSNEMAKVDDSFFHRLEESFLVEEDKKHERHPIFGNIVDEVAYHEKYPTIYHLRKKLVDSTDKADLRLIYLALAHMIKFRGHFLIEGDLNPDNSDVDKLFIQLVQTYNQLFEENPINASGVDAKAILSARLSKSRRLENLIAQLPGEKKNGLFGNLIALSLGLTPNFKSNFDLAEDAKLQLSKDTYDDDLDNLLAQIGDQYADLFLAAKNLSDAILLSDILRVNTEITKAPLSASMIKRYDEHHQDLTLLKALVRQQLPEKYKEIFFDQSKNGYAGYIDGGASQEEFYKFIKPILEKMDGTEELLVKLNREDLLRKQRTFDNGSIPHQIHLGELHAILRRQEDFYPFLKDNREKIEKILTFRIPYYVGPLARGNSRFAWMTRKSEETITPWNFEEVVDKGASAQSFIERMTNFDKNLPNEKVLPKHSLLYEYFTVYNELTKVKYVTEGMRKPAFLSGEQKKAIVDLLFKTNRKVTVKQLKEDYFKKIECFDSVEISGVEDRFNASLGTYHDLLKIIKDKDFLDNEENEDILEDIVLTLTLFEDREMIEERLKTYAHLFDDKVMKQLKRRRYTGWGRLSRKLINGIRDKQSGKTILDFLKSDGFANRNFMQLIHDDSLTFKEDIQKAQVSGQGDSLHEHIANLAGSPAIKKGILQTVKVVDELVKVMGRHKPENIVIEMARENQTTQKGQKNSRERMKRIEEGIKELGSQILKEHPVENTQLQNEKLYLYYLQNGRDMYVDQELDINRLSDYDVDHIVPQSFLKDDSIDNKVLTRSDKARGKSDNVPSEEVVKKMKNYWRQLLNAKLITQRKFDNLTKAERGGLSELDKAGFIKRQLVETRQITKHVAQILDSRMNTKYDENDKLIREVKVITLKSKLVSDFRKDFQFYKVREINNYHHAHDAYLNAVVGTALIKKYPKLESEFVYGDYKVYDVRKMIAKSEQEIGKATAKYFFYSNIMNFFKTEITLANGEIRKRPLIETNGETGEIVWDKGRDFATVRKVLSMPQVNIVKKTEVQTGGFSKESILPKRNSDKLIARKKDWDPKKYGGFDSPTVAYSVLVVAKVEKGKSKKLKSVKELLGITIMERSSFEKNPIDFLEAKGYKEVKKDLIIKLPKYSLFELENGRKRMLASAGELQKGNELALPSKYVNFLYLASHYEKLKGSPEDNEQKQLFVEQHKHYLDEIIEQISEFSKRVILADANLDKVLSAYNKHRDKPIREQAENIIHLFTLTNLGAPAAFKYFDTTIDRKRYTSTKEVLDATLIHQSITGLYETRIDLSQLGGDGGGGGGGGTVSLQDEHRLFDIPVTTSLPDVWLQDFPQAWAETGGLGRAKCQAPIIIDLKPTAVPVSIKQYPMSLEAHMGIRQHIIKFLELGVLRPCRSPWNTPLLPVKKPGTQDYRPVQDLREINKRTVDIHPTVPNPYNLLSTLKPDYSWYTVLDLKDAFFCLPLAPQSQELFAFEWKDPERGISGQLTWTRLPQGFKNSPTLFNEALHRDLTDFRTQHPEVTLLQYVDDLLLAAPTKKACTQGTRHLLQELGEKGYRASAKKAQICQTKVTYLGYILSEGKRWLTPGRIETVARIPPPRNPREVREFLGTAGFCRLWIPGFAELAAPLYALTKPSTPFTWQTEHQLAFEALKKALLSAPALGLPDTSKPFTLFLDERQGIAKGVLTQKLGPWKRPVAYLSKKLDPVAAGWPPCLRIMAATAMLVKDSAKLTLGQPLTVITPHTLEAIVRQPPDRWITNARLTHYQALLLDTDRVQFGPPVTLNPATLLPVPENQPSPHDCRQVLAETHGTREDLKDQELPDADHTWYTDGSSYLDSGTRRAGAAVVDGHNTIWAQSLPPGTSAQKAELIALTKALELSKGKKANIYTDSRYAFATAHTHGSIYERRGWLTSEGKEIKNKAEIIALLKALFLPQEVAIIHCPGHQKGQDPVAVGNRQADRVARQAAMAEVLTLATEPDNTSHITAGKRTADGSEFEKRTADGSEFESPKKKAKVE

SEQ ID NO: 6246 - protein, 2087 aa, synthetic construct
MPAAKRVKLDGGDKKYSIGLDIGTNSVGWAVITDEYKVPSKKFKVLGNTDRHSIKKNLIGALLFDSGETAEATRLKRTARRRYTRRKNRICYLQEIFSNEMAKVDDSFFHRLEESFLVEEDKKHERHPIFGNIVDEVAYHEKYPTIYHLRKKLVDSTDKADLRLIYLALAHMIKFRGHFLIEGDLNPDNSDVDKLFIQLVQTYNQLFEENPINASGVDAKAILSARLSKSRRLENLIAQLPGEKKNGLFGNLIALSLGLTPNFKSNFDLAEDAKLQLSKDTYDDDLDNLLAQIGDQYADLFLAAKNLSDAILLSDILRVNTEITKAPLSASMIKRYDEHHQDLTLLKALVRQQLPEKYKEIFFDQSKNGYAGYIDGGASQEEFYKFIKPILEKMDGTEELLVKLNREDLLRKQRTFDNGSIPHQIHLGELHAILRRQEDFYPFLKDNREKIEKILTFRIPYYVGPLARGNSRFAWMTRKSEETITPWNFEEVVDKGASAQSFIERMTNFDKNLPNEKVLPKHSLLYEYFTVYNELTKVKYVTEGMRKPAFLSGEQKKAIVDLLFKTNRKVTVKQLKEDYFKKIECFDSVEISGVEDRFNASLGTYHDLLKIIKDKDFLDNEENEDILEDIVLTLTLFEDREMIEERLKTYAHLFDDKVMKQLKRRRYTGWGRLSRKLINGIRDKQSGKTILDFLKSDGFANRNFMQLIHDDSLTFKEDIQKAQVSGQGDSLHEHIANLAGSPAIKKGILQTVKVVDELVKVMGRHKPENIVIEMARENQTTQKGQKNSRERMKRIEEGIKELGSQILKEHPVENTQLQNEKLYLYYLQNGRDMYVDQELDINRLSDYDVDHIVPQSFLKDDSIDNKVLTRSDKARGKSDNVPSEEVVKKMKNYWRQLLNAKLITQRKFDNLTKAERGGLSELDKAGFIKRQLVETRQITKHVAQILDSRMNTKYDENDKLIREVKVITLKSKLVSDFRKDFQFYKVREINNYHHAHDAYLNAVVGTALIKKYPKLESEFVYGDYKVYDVRKMIAKSEQEIGKATAKYFFYSNIMNFFKTEITLANGEIRKRPLIETNGETGEIVWDKGRDFATVRKVLSMPQVNIVKKTEVQTGGFSKESILPKRNSDKLIARKKDWDPKKYGGFDSPTVAYSVLVVAKVEKGKSKKLKSVKELLGITIMERSSFEKNPIDFLEAKGYKEVKKDLIIKLPKYSLFELENGRKRMLASAGELQKGNELALPSKYVNFLYLASHYEKLKGSPEDNEQKQLFVEQHKHYLDEIIEQISEFSKRVILADANLDKVLSAYNKHRDKPIREQAENIIHLFTLTNLGAPAAFKYFDTTIDRKRYTSTKEVLDATLIHQSITGLYETRIDLSQLGGDGGGGGGGGVLNLEEEYRLHEKPVPSSIDPSWLQLFPTVWAERAGMGLANQVPPVVVELRSGASPVAVRQYPMSKEAREGIRPHIQKFLDLGVLVPCRSPWNTPLLPVKKPGTNDYRPVQDLREINKRVQDIHPTVPNPYNLLSSLPPSYTWYSVLDLKDAFFCLRLHPNSQPLFAFEWKDPEKGNTGQLTWTRLPQGFKNSPTLFNEALHRDLAPFRALNPQVVLLQYVDDLLVAAPTYEDCKKGTQKLLQELSKLGYRVSAKKAQLCQREVTYLGYLLKEGKRWLTPARKATVMKIPVPTTPRQVREFLGKAGFCRLFIPGFASLAAPLYPLTKPSIPFIWTEEHQQAFDHIKKALLSAPALALPDLTKPFTLYIDERAGVARGVLTQTLGPWRRPVAYLSKKLDPVASGWPTCLKAVAAVALLLKDADKLTLGQNVTVIASHSLESIVRQPPDRWMTNARMTHYQSLLLNERVSFAPPAVLNPATLLPVESEATPVHRCSEILAEETGTRRDLEDQPLPGVPTWYTDGSSFITEGKRRAGAPIVDGKRTVWASSLPEGTSAQKAELVALTQALRLAEGKNINIYTDSRYAFATAHIHGAIYKQRGWLTSAGKDIKNKEEILALLEAIHLPRRVAIIHCPGHQRGSNPVATGNRRADEAAKQAALSTRVLAGTTKPAGKRTADGSEFEKRTADGSEFESPKKKAKVE

SEQ ID NO: 6247 - protein, 2211 aa, synthetic construct
MPAAKRVKLDGGDKKYSIGLDIGTNSVGWAVITDEYKVPSKKFKVLGNTDRHSIKKNLIGALLFDSGETAEATRLKRTARRRYTRRKNRICYLQEIFSNEMAKVDDSFFHRLEESFLVEEDKKHERHPIFGNIVDEVAYHEKYPTIYHLRKKLVDSTDKADLRLIYLALAHMIKFRGHFLIEGDLNPDNSDVDKLFIQLVQTYNQLFEENPINASGVDAKAILSARLSKSRRLENLIAQLPGEKKNGLFGNLIALSLGLTPNFKSNFDLAEDAKLQLSKDTYDDDLDNLLAQIGDQYADLFLAAKNLSDAILLSDILRVNTEITKAPLSASMIKRYDEHHQDLTLLKALVRQQLPEKYKEIFFDQSKNGYAGYIDGGASQEEFYKFIKPILEKMDGTEELLVKLNREDLLRKQRTFDNGSIPHQIHLGELHAILRRQEDFYPFLKDNREKIEKILTFRIPYYVGPLARGNSRFAWMTRKSEETITPWNFEEVVDKGASAQSFIERMTNFDKNLPNEKVLPKHSLLYEYFTVYNELTKVKYVTEGMRKPAFLSGEQKKAIVDLLFKTNRKVTVKQLKEDYFKKIECFDSVEISGVEDRFNASLGTYHDLLKIIKDKDFLDNEENEDILEDIVLTLTLFEDREMIEERLKTYAHLFDDKVMKQLKRRRYTGWGRLSRKLINGIRDKQSGKTILDFLKSDGFANRNFMQLIHDDSLTFKEDIQKAQVSGQGDSLHEHIANLAGSPAIKKGILQTVKVVDELVKVMGRHKPENIVIEMARENQTTQKGQKNSRERMKRIEEGIKELGSQILKEHPVENTQLQNEKLYLYYLQNGRDMYVDQELDINRLSDYDVDHIVPQSFLKDDSIDNKVLTRSDKARGKSDNVPSEEVVKKMKNYWRQLLNAKLITQRKFDNLTKAERGGLSELDKAGFIKRQLVETRQITKHVAQILDSRMNTKYDENDKLIREVKVITLKSKLVSDFRKDFQFYKVREINNYHHAHDAYLNAVVGTALIKKYPKLESEFVYGDYKVYDVRKMIAKSEQEIGKATAKYFFYSNIMNFFKTEITLANGEIRKRPLIETNGETGEIVWDKGRDFATVRKVLSMPQVNIVKKTEVQTGGFSKESILPKRNSDKLIARKKDWDPKKYGGFDSPTVAYSVLVVAKVEKGKSKKLKSVKELLGITIMERSSFEKNPIDFLEAKGYKEVKKDLIIKLPKYSLFELENGRKRMLASAGELQKGNELALPSKYVNFLYLASHYEKLKGSPEDNEQKQLFVEQHKHYLDEIIEQISEFSKRVILADANLDKVLSAYNKHRDKPIREQAENIIHLFTLTNLGAPAAFKYFDTTIDRKRYTSTKEVLDATLIHQSITGLYETRIDLSQLGGDGGGGGGGGTLGDQGSRGSDPLPEPRVTLTVEGIPTEFLVNTGAEHSVLTKPMGKMGSKRTVVAGATGSKVYPWTTKRLLKIGQKQVTHSFLVIPECPAPLLGRDLLTKLKAQIQFSTEGPQVTWEDRPAMCLVLNLEEEYRLHEKPVPPSIDPSWLQLFPMVWAEKAGMGLANQVPPVVVELKSDASPVAVRQYPMSKEAREGIRPHIQRFLDLGILVPCQSPWNTPLLPVKKPGTNDYRPVQDLREVNKRVQDIHPTVPNPYNLLSSLPPSHTWYSVLDLKDAFFCLKLHPNSQPLFAFEWRDPEKGNTGQLTWTRLPQGFKNSPTLFNEALHRDLASFRALNPQVVMLQYVDDLLVAAPTYRDCKEGTRRLLQELSKLGYRVSAKKAQLCREEVTYLGYLLKGGKRWLTPARKATVMKIPTPTTPRQVREFLGTAGFCRLWIPGFASLAAPLYPLTRPKVPFTWTEAHQEAFGRIKEALLSAPALALPDLTKPFALYVDEKEGVARGVLTQTLGPWRRPVAYLSKKLDPVASGWPTCLKAIAAVALLLKDADKLTLGQNVLVIAPHNLESIVRQPPDRWMTNARMTHYQSLLLNERVSFAPPAILNPATLLPVESDDTPIHICSEILAEETGTRPDLRDQPLPGVPAWYTDGSSFIMDGRRQAGAAIVDNKRTVWASNLPEGTSAQKAELIALTQALRLAEGKSINIYTDSRYAFATAHVHGAIYKQRGWLTSAGKDIKNKEEILALLEAIHLPKRVAIIHCPGHQRGTDPVATGNRKADEAAKQAAQSTRILTETTKNAGKRTADGSEFEKRTADGSEFESPKKKAKVE

SEQ ID NO: 6248 - protein, 2089 aa, synthetic construct
MPAAKRVKLDGGDKKYSIGLDIGTNSVGWAVITDEYKVPSKKFKVLGNTDRHSIKKNLIGALLFDSGETAEATRLKRTARRRYTRRKNRICYLQEIFSNEMAKVDDSFFHRLEESFLVEEDKKHERHPIFGNIVDEVAYHEKYPTIYHLRKKLVDSTDKADLRLIYLALAHMIKFRGHFLIEGDLNPDNSDVDKLFIQLVQTYNQLFEENPINASGVDAKAILSARLSKSRRLENLIAQLPGEKKNGLFGNLIALSLGLTPNFKSNFDLAEDAKLQLSKDTYDDDLDNLLAQIGDQYADLFLAAKNLSDAILLSDILRVNTEITKAPLSASMIKRYDEHHQDLTLLKALVRQQLPEKYKEIFFDQSKNGYAGYIDGGASQEEFYKFIKPILEKMDGTEELLVKLNREDLLRKQRTFDNGSIPHQIHLGELHAILRRQEDFYPFLKDNREKIEKILTFRIPYYVGPLARGNSRFAWMTRKSEETITPWNFEEVVDKGASAQSFIERMTNFDKNLPNEKVLPKHSLLYEYFTVYNELTKVKYVTEGMRKPAFLSGEQKKAIVDLLFKTNRKVTVKQLKEDYFKKIECFDSVEISGVEDRFNASLGTYHDLLKIIKDKDFLDNEENEDILEDIVLTLTLFEDREMIEERLKTYAHLFDDKVMKQLKRRRYTGWGRLSRKLINGIRDKQSGKTILDFLKSDGFANRNFMQLIHDDSLTFKEDIQKAQVSGQGDSLHEHIANLAGSPAIKKGILQTVKVVDELVKVMGRHKPENIVIEMARENQTTQKGQKNSRERMKRIEEGIKELGSQILKEHPVENTQLQNEKLYLYYLQNGRDMYVDQELDINRLSDYDVDHIVPQSFLKDDSIDNKVLTRSDKARGKSDNVPSEEVVKKMKNYWRQLLNAKLITQRKFDNLTKAERGGLSELDKAGFIKRQLVETRQITKHVAQILDSRMNTKYDENDKLIREVKVITLKSKLVSDFRKDFQFYKVREINNYHHAHDAYLNAVVGTALIKKYPKLESEFVYGDYKVYDVRKMIAKSEQEIGKATAKYFFYSNIMNFFKTEITLANGEIRKRPLIETNGETGEIVWDKGRDFATVRKVLSMPQVNIVKKTEVQTGGFSKESILPKRNSDKLIARKKDWDPKKYGGFDSPTVAYSVLVVAKVEKGKSKKLKSVKELLGITIMERSSFEKNPIDFLEAKGYKEVKKDLIIKLPKYSLFELENGRKRMLASAGELQKGNELALPSKYVNFLYLASHYEKLKGSPEDNEQKQLFVEQHKHYLDEIIEQISEFSKRVILADANLDKVLSAYNKHRDKPIREQAENIIHLFTLTNLGAPAAFKYFDTTIDRKRYTSTKEVLDATLIHQSITGLYETRIDLSQLGGDGGGGGGGGTLNLEDEYRLYETSAEPEVSPGSTWLSDFPQAWAETGGMGLAVRQAPLIIPLKATSTPVSIKQYPMSQEAKLGIKPHIQRLLDQGILVPCQSPWNTPLLPVKKPGTNDYRPVQDLREVNKRVEDIHPTVPNPYNLLSGLPPSHRWYTVLDLKDAFFCLRLHPTSQPLFAFEWRDPGMGISGQLTWTRLPQGFKNSPTLFNEALHRDLADFRIQHPDLILLQYVDDILLAATSELDCQQGTRALLLTLGNLGYRASAKKAQLCQKQVKYLGYLLKEGQRWLTEARKETVMGQPTPKTPRQLREFLGKAGFCRLFIPGFAEMAAPLYPLTKPGTLFNWGPDQQKAYQEIKQALLTAPALGLPDLTKPFELFVDEKQGYAKGVLTQKLGPWRRPVAYLSKKLDPVAAGWPPCLRMVAAIAVLRKDAGKLTMGQPLVILAPHAVEALVKQPPDRWLSNARMTHYQAMLLDTDRVQFGPVVALNPATLLPLPEEGAPHDCLEILAETHGTRPDLTDQPIPDADHTWYTDGSSFLQEGQRKAGAAVTTETEVIWARALPAGTSAQRAELIALTQALKMAEGKRLNVYTDSRYAFATAHIHGEIYRRRGWLTSEGREIKNKSEILALLKALFLPKRLSIIHCLGHQKGDSAEARGNRLADQAAREAAIKTPPDTSTLLAGKRTADGSEFEKRTADGSEFESPKKKAKVE

SEQ ID NO: 6249 - protein, 2089 aa, synthetic construct
MPAAKRVKLDGGDKKYSIGLDIGTNSVGWAVITDEYKVPSKKFKVLGNTDRHSIKKNLIGALLFDSGETAEATRLKRTARRRYTRRKNRICYLQEIFSNEMAKVDDSFFHRLEESFLVEEDKKHERHPIFGNIVDEVAYHEKYPTIYHLRKKLVDSTDKADLRLIYLALAHMIKFRGHFLIEGDLNPDNSDVDKLFIQLVQTYNQLFEENPINASGVDAKAILSARLSKSRRLENLIAQLPGEKKNGLFGNLIALSLGLTPNFKSNFDLAEDAKLQLSKDTYDDDLDNLLAQIGDQYADLFLAAKNLSDAILLSDILRVNTEITKAPLSASMIKRYDEHHQDLTLLKALVRQQLPEKYKEIFFDQSKNGYAGYIDGGASQEEFYKFIKPILEKMDGTEELLVKLNREDLLRKQRTFDNGSIPHQIHLGELHAILRRQEDFYPFLKDNREKIEKILTFRIPYYVGPLARGNSRFAWMTRKSEETITPWNFEEVVDKGASAQSFIERMTNFDKNLPNEKVLPKHSLLYEYFTVYNELTKVKYVTEGMRKPAFLSGEQKKAIVDLLFKTNRKVTVKQLKEDYFKKIECFDSVEISGVEDRFNASLGTYHDLLKIIKDKDFLDNEENEDILEDIVLTLTLFEDREMIEERLKTYAHLFDDKVMKQLKRRRYTGWGRLSRKLINGIRDKQSGKTILDFLKSDGFANRNFMQLIHDDSLTFKEDIQKAQVSGQGDSLHEHIANLAGSPAIKKGILQTVKVVDELVKVMGRHKPENIVIEMARENQTTQKGQKNSRERMKRIEEGIKELGSQILKEHPVENTQLQNEKLYLYYLQNGRDMYVDQELDINRLSDYDVDHIVPQSFLKDDSIDNKVLTRSDKARGKSDNVPSEEVVKKMKNYWRQLLNAKLITQRKFDNLTKAERGGLSELDKAGFIKRQLVETRQITKHVAQILDSRMNTKYDENDKLIREVKVITLKSKLVSDFRKDFQFYKVREINNYHHAHDAYLNAVVGTALIKKYPKLESEFVYGDYKVYDVRKMIAKSEQEIGKATAKYFFYSNIMNFFKTEITLANGEIRKRPLIETNGETGEIVWDKGRDFATVRKVLSMPQVNIVKKTEVQTGGFSKESILPKRNSDKLIARKKDWDPKKYGGFDSPTVAYSVLVVAKVEKGKSKKLKSVKELLGITIMERSSFEKNPIDFLEAKGYKEVKKDLIIKLPKYSLFELENGRKRMLASAGELQKGNELALPSKYVNFLYLASHYEKLKGSPEDNEQKQLFVEQHKHYLDEIIEQISEFSKRVILADANLDKVLSAYNKHRDKPIREQAENIIHLFTLTNLGAPAAFKYFDTTIDRKRYTSTKEVLDATLIHQSITGLYETRIDLSQLGGDGGGGGGGGLGIEDEYRLHETSTEPDVSLGSTWLSDFPQAWAETGGMGLAVRQAPLIIPLKATSTPVSIQQYPMSHEARLGIKPHIQRLLDQGILVPCQSPWNTPLLPVKKPGTNDYRPVQDLREVNKRVEDIHPTVPNPYNLLSGLPPSHQWYTVLDLKDAFFCLRLHPTSQPLFAFEWRDPGMGISGQLTWTRLPQGFKNSPTLFNEALHRDLADFRIQHPDLILLQYVDDILLAATSELDCQQGTRALLQTLGDLGYRASAKKAQICQKQVKYLGYLLREGQRWLTEARKETVMGQPVPKTPRQLREFLGKAGFCRLFIPGFAEMAAPLYPLTKPGTLFSWGPDQQKAYQEIKQALLTAPALGLPDLTKPFELFVDEKQGYAKGVLTQKLGPWRRPVAYLSKKLDPVAAGWPPCLRMVAAIAVLTKDAGKLTMGQPLVILAPHAVEALVKQPPDRWLSNARMTHYQAMLLDTDRVQFGPVVALNPATLLPLPEEGAPHDCLEILAETHGTRPDLTDQPIPDADHTWYTDGSSFLQEGQRKAGAAVTTETEVIWAGALPAGTSAQRAELIALTQALKMAEGKRLNVYTDSRYAFATAHIHGEIYRRRGWLTSEGREIKNKSEILALLKALFLPKRLSIIHCLGHQKGDSAEARGNRLADQAAREAAIKTPPDTSTLLIAGKRTADGSEFEKRTADGSEFESPKKKAKVE

SEQ ID NO: 6250 - protein, 2092 aa, synthetic construct
MPAAKRVKLDGGDKKYSIGLDIGTNSVGWAVITDEYKVPSKKFKVLGNTDRHSIKKNLIGALLFDSGETAEATRLKRTARRRYTRRKNRICYLQEIFSNEMAKVDDSFFHRLEESFLVEEDKKHERHPIFGNIVDEVAYHEKYPTIYHLRKKLVDSTDKADLRLIYLALAHMIKFRGHFLIEGDLNPDNSDVDKLFIQLVQTYNQLFEENPINASGVDAKAILSARLSKSRRLENLIAQLPGEKKNGLFGNLIALSLGLTPNFKSNFDLAEDAKLQLSKDTYDDDLDNLLAQIGDQYADLFLAAKNLSDAILLSDILRVNTEITKAPLSASMIKRYDEHHQDLTLLKALVRQQLPEKYKEIFFDQSKNGYAGYIDGGASQEEFYKFIKPILEKMDGTEELLVKLNREDLLRKQRTFDNGSIPHQIHLGELHAILRRQEDFYPFLKDNREKIEKILTFRIPYYVGPLARGNSRFAWMTRKSEETITPWNFEEVVDKGASAQSFIERMTNFDKNLPNEKVLPKHSLLYEYFTVYNELTKVKYVTEGMRKPAFLSGEQKKAIVDLLFKTNRKVTVKQLKEDYFKKIECFDSVEISGVEDRFNASLGTYHDLLKIIKDKDFLDNEENEDILEDIVLTLTLFEDREMIEERLKTYAHLFDDKVMKQLKRRRYTGWGRLSRKLINGIRDKQSGKTILDFLKSDGFANRNFMQLIHDDSLTFKEDIQKAQVSGQGDSLHEHIANLAGSPAIKKGILQTVKVVDELVKVMGRHKPENIVIEMARENQTTQKGQKNSRERMKRIEEGIKELGSQILKEHPVENTQLQNEKLYLYYLQNGRDMYVDQELDINRLSDYDVDHIVPQSFLKDDSIDNKVLTRSDKARGKSDNVPSEEVVKKMKNYWRQLLNAKLITQRKFDNLTKAERGGLSELDKAGFIKRQLVETRQITKHVAQILDSRMNTKYDENDKLIREVKVITLKSKLVSDFRKDFQFYKVREINNYHHAHDAYLNAVVGTALIKKYPKLESEFVYGDYKVYDVRKMIAKSEQEIGKATAKYFFYSNIMNFFKTEITLANGEIRKRPLIETNGETGEIVWDKGRDFATVRKVLSMPQVNIVKKTEVQTGGFSKESILPKRNSDKLIARKKDWDPKKYGGFDSPTVAYSVLVVAKVEKGKSKKLKSVKELLGITIMERSSFEKNPIDFLEAKGYKEVKKDLIIKLPKYSLFELENGRKRMLASAGELQKGNELALPSKYVNFLYLASHYEKLKGSPEDNEQKQLFVEQHKHYLDEIIEQISEFSKRVILADANLDKVLSAYNKHRDKPIREQAENIIHLFTLTNLGAPAAFKYFDTTIDRKRYTSTKEVLDATLIHQSITGLYETRIDLSQLGGDGGGGGGGGGTAPLEEEYRLFLEAPIQNVTLLEQWKREIPKVWAEINPPGLASTQAPIHVQLLSTALPVRVRQYPITLEAKRSLRETIRKFRAAGILRPVHSPWNTPLLPVRKSGTSEYRMVQDLREVNKRVETIHPTVPNPYTLLSLLPPDRIWYSVLDLKDAFFCIPLAPESQLIFAFEWADAEEGESGQLTWTRLPQGFKNSPTLFNEALNRDLQGFRLDHPSVSLLQYVDDLLIAADTQAACLSATRDLLMTLAELGYRVSGKKAQLCQEEVTYLGFKIHKGSRSLSNSRTQAILQIPVPKTKRQVREFLGTIGYCRLWIPGFAELAQPLYAATRPGNDPLVWGEKEEEAFQSLKLALTQPPALALPSLDKPFQLFVEETSGAAKGVLTQALGPWKRPVAYLSKRLDPVAAGWPRCLRAIAAAALLTREASKLTFGQDIEITSSHNLESLLRSPPDKWLTNARITQYQVLLLDPPRVRFKQTAALNPATLLPETDDTLPIHHCLDTLDSLTSTRPDLTDQPLAQAEATLFTDGSSYIRDGKRYAGAAVVTLDSVIWAEPLPIGTSAQKAELIALTKALEWSKDKSVNIYTDSRYAFATLHVHGMIYRERGWLTAGGKAIKNAPEILALLTAVWLPKRVAVMHCKGHQKDDAPTSTGNRRADEVAREVAIRPLSTQATISAGKRTADGSEFEKRTADGSEFESPKKKAKVE

SEQ ID NO: 6251 - protein, 2212 aa, synthetic construct
MPAAKRVKLDGGDKKYSIGLDIGTNSVGWAVITDEYKVPSKKFKVLGNTDRHSIKKNLIGALLFDSGETAEATRLKRTARRRYTRRKNRICYLQEIFSNEMAKVDDSFFHRLEESFLVEEDKKHERHPIFGNIVDEVAYHEKYPTIYHLRKKLVDSTDKADLRLIYLALAHMIKFRGHFLIEGDLNPDNSDVDKLFIQLVQTYNQLFEENPINASGVDAKAILSARLSKSRRLENLIAQLPGEKKNGLFGNLIALSLGLTPNFKSNFDLAEDAKLQLSKDTYDDDLDNLLAQIGDQYADLFLAAKNLSDAILLSDILRVNTEITKAPLSASMIKRYDEHHQDLTLLKALVRQQLPEKYKEIFFDQSKNGYAGYIDGGASQEEFYKFIKPILEKMDGTEELLVKLNREDLLRKQRTFDNGSIPHQIHLGELHAILRRQEDFYPFLKDNREKIEKILTFRIPYYVGPLARGNSRFAWMTRKSEETITPWNFEEVVDKGASAQSFIERMTNFDKNLPNEKVLPKHSLLYEYFTVYNELTKVKYVTEGMRKPAFLSGEQKKAIVDLLFKTNRKVTVKQLKEDYFKKIECFDSVEISGVEDRFNASLGTYHDLLKIIKDKDFLDNEENEDILEDIVLTLTLFEDREMIEERLKTYAHLFDDKVMKQLKRRRYTGWGRLSRKLINGIRDKQSGKTILDFLKSDGFANRNFMQLIHDDSLTFKEDIQKAQVSGQGDSLHEHIANLAGSPAIKKGILQTVKVVDELVKVMGRHKPENIVIEMARENQTTQKGQKNSRERMKRIEEGIKELGSQILKEHPVENTQLQNEKLYLYYLQNGRDMYVDQELDINRLSDYDVDHIVPQSFLKDDSIDNKVLTRSDKARGKSDNVPSEEVVKKMKNYWRQLLNAKLITQRKFDNLTKAERGGLSELDKAGFIKRQLVETRQITKHVAQILDSRMNTKYDENDKLIREVKVITLKSKLVSDFRKDFQFYKVREINNYHHAHDAYLNAVVGTALIKKYPKLESEFVYGDYKVYDVRKMIAKSEQEIGKATAKYFFYSNIMNFFKTEITLANGEIRKRPLIETNGETGEIVWDKGRDFATVRKVLSMPQVNIVKKTEVQTGGFSKESILPKRNSDKLIARKKDWDPKKYGGFDSPTVAYSVLVVAKVEKGKSKKLKSVKELLGITIMERSSFEKNPIDFLEAKGYKEVKKDLIIKLPKYSLFELENGRKRMLASAGELQKGNELALPSKYVNFLYLASHYEKLKGSPEDNEQKQLFVEQHKHYLDEIIEQISEFSKRVILADANLDKVLSAYNKHRDKPIREQAENIIHLFTLTNLGAPAAFKYFDTTIDRKRYTSTKEVLDATLIHQSITGLYETRIDLSQLGGDGGGGGGGGGTLGDQGSRGSDPLPEPRVTLTVEGIPTEFLVNTGAEHSVLTKPMGKMGSKRTVVAGATGSKVYPWTTKRLLKIGQKQVTHSFLVIPECPAPLLGRDLLTKLKAQIQFSTEGPQVTWEDRPAMCLVLNLEEEYRLHEKPVPPSIDPSWLQLFPMVWAEKAGMGLANQVPPVVVELKSDASPVAVRQYPMSKEAREGIRPHIQRFLDLGILVPCQSPWNTPLLPVKKPGTNDYRPVQDLREVNKRVQDIHPTVPNPYNLLSSLPPSHTWYSVLDLKDAFFCLKLHPNSQPLFAFEWRDPEKGNTGQLTWTRLPQGFKNSPTLFNEALHRDLASFRALNPQVVMLQYVDDLLVAAPTYRDCKEGTRRLLQELSKLGYRVSAKKAQLCREEVTYLGYLLKGGKRWLTPARKATVMKIPTPTTPRQVREFLGTAGFCRLWIPGFASLAAPLYPLTRPKVPFTWTEAHQEAFGRIKEALLSAPALALPDLTKPFALYVDEKEGVARGVLTQTLGPWRRPVAYLSKKLDPVASGWPTCLKAIAAVALLLKDADKLTLGQNVLVIAPHNLESIVRQPPDRWMTNARMTHYQSLLLNERVSFAPPAILNPATLLPVESDDTPIHICSEILAEETGTRPDLRDQPLPGVPAWYTDGSSFIMDGRRQAGAAIVDNKRTVWASNLPEGTSAQKAELIALTQALRLAEGKSINIYTDSRYAFATAHVHGAIYKQRGWLTSAGKDIKNKEEILALLEAIHLPKRVAIIHCPGHQRGTDPVATGNRKADEAAKQAAQSTRILTETTKNAGKRTADGSEFEKRTADGSEFESPKKKAKVE

SEQ ID NO: 6252 - protein, 2088 aa, synthetic construct
MPAAKRVKLDGGDKKYSIGLDIGTNSVGWAVITDEYKVPSKKFKVLGNTDRHSIKKNLIGALLFDSGETAEATRLKRTARRRYTRRKNRICYLQEIFSNEMAKVDDSFFHRLEESFLVEEDKKHERHPIFGNIVDEVAYHEKYPTIYHLRKKLVDSTDKADLRLIYLALAHMIKFRGHFLIEGDLNPDNSDVDKLFIQLVQTYNQLFEENPINASGVDAKAILSARLSKSRRLENLIAQLPGEKKNGLFGNLIALSLGLTPNFKSNFDLAEDAKLQLSKDTYDDDLDNLLAQIGDQYADLFLAAKNLSDAILLSDILRVNTEITKAPLSASMIKRYDEHHQDLTLLKALVRQQLPEKYKEIFFDQSKNGYAGYIDGGASQEEFYKFIKPILEKMDGTEELLVKLNREDLLRKQRTFDNGSIPHQIHLGELHAILRRQEDFYPFLKDNREKIEKILTFRIPYYVGPLARGNSRFAWMTRKSEETITPWNFEEVVDKGASAQSFIERMTNFDKNLPNEKVLPKHSLLYEYFTVYNELTKVKYVTEGMRKPAFLSGEQKKAIVDLLFKTNRKVTVKQLKEDYFKKIECFDSVEISGVEDRFNASLGTYHDLLKIIKDKDFLDNEENEDILEDIVLTLTLFEDREMIEERLKTYAHLFDDKVMKQLKRRRYTGWGRLSRKLINGIRDKQSGKTILDFLKSDGFANRNFMQLIHDDSLTFKEDIQKAQVSGQGDSLHEHIANLAGSPAIKKGILQTVKVVDELVKVMGRHKPENIVIEMARENQTTQKGQKNSRERMKRIEEGIKELGSQILKEHPVENTQLQNEKLYLYYLQNGRDMYVDQELDINRLSDYDVDHIVPQSFLKDDSIDNKVLTRSDKARGKSDNVPSEEVVKKMKNYWRQLLNAKLITQRKFDNLTKAERGGLSELDKAGFIKRQLVETRQITKHVAQILDSRMNTKYDENDKLIREVKVITLKSKLVSDFRKDFQFYKVREINNYHHAHDAYLNAVVGTALIKKYPKLESEFVYGDYKVYDVRKMIAKSEQEIGKATAKYFFYSNIMNFFKTEITLANGEIRKRPLIETNGETGEIVWDKGRDFATVRKVLSMPQVNIVKKTEVQTGGFSKESILPKRNSDKLIARKKDWDPKKYGGFDSPTVAYSVLVVAKVEKGKSKKLKSVKELLGITIMERSSFEKNPIDFLEAKGYKEVKKDLIIKLPKYSLFELENGRKRMLASAGELQKGNELALPSKYVNFLYLASHYEKLKGSPEDNEQKQLFVEQHKHYLDEIIEQISEFSKRVILADANLDKVLSAYNKHRDKPIREQAENIIHLFTLTNLGAPAAFKYFDTTIDRKRYTSTKEVLDATLIHQSITGLYETRIDLSQLGGDGGGGGGGGGVLNLEEEYRLHEKPVPSSIDPSWLQLFPTVWAERAGMGLANQVPPVVVELRSGASPVAVRQYPMSKEAREGIRPHIQRFLDLGVLVPCQSPWNTPLLPVKKPGTNDYRPVQDLREINKRVQDIHPTVPNPYNLLSSLPPSHTWYSVLDLKDAFFCLKLHPNSQPLFAFEWRDPEKGNTGQLTWTRLPQGFKNSPTLFDEALHRDLAPFRALNPQVVLLQYVDDLLVAAPTYRDCKEGTQKLLQELSKLGYRVSAKKAQLCQKEVTYLGYLLKEGKRWLTPARKATVMKIPPPTTPRQVREFLGTAGFCRLWIPGFASLAAPLYPLTKESIPFIWTEEHQKAFDRIKEALLSAPALALPDLTKPFTLYVDERAGVARGVLTQTLGPWRRPVAYLSKKLDPVASGWPTCLKAVAAVALLLKDADKLTLGQNVTVIASHSLESIVRQPPDRWMTNARMTHYQSLLLNERVSFAPPAVLNPATLLPVESEATPVHRCSEILAEETGTRRDLKDQPLPGVPAWYTDGSSFIAEGKRRAGAAIVDGKRTVWASSLPEGTSAQKAELVALTQALRLAEGKDINIYTDSRYAFATAHIHGAIYKQRGLLTSAGKDIKNKEEILALLEAIHLPKRVAIIHCPGHQKGNDPVATGNRRADEAAKQAALSTRVLAETTKPAGKRTADGSEFEKRTADGSEFESPKKKAKVE

SEQ ID NO: 6253 - protein, 2090 aa, synthetic construct
MPAAKRVKLDGGDKKYSIGLDIGTNSVGWAVITDEYKVPSKKFKVLGNTDRHSIKKNLIGALLFDSGETAEATRLKRTARRRYTRRKNRICYLQEIFSNEMAKVDDSFFHRLEESFLVEEDKKHERHPIFGNIVDEVAYHEKYPTIYHLRKKLVDSTDKADLRLIYLALAHMIKFRGHFLIEGDLNPDNSDVDKLFIQLVQTYNQLFEENPINASGVDAKAILSARLSKSRRLENLIAQLPGEKKNGLFGNLIALSLGLTPNFKSNFDLAEDAKLQLSKDTYDDDLDNLLAQIGDQYADLFLAAKNLSDAILLSDILRVNTEITKAPLSASMIKRYDEHHQDLTLLKALVRQQLPEKYKEIFFDQSKNGYAGYIDGGASQEEFYKFIKPILEKMDGTEELLVKLNREDLLRKQRTFDNGSIPHQIHLGELHAILRRQEDFYPFLKDNREKIEKILTFRIPYYVGPLARGNSRFAWMTRKSEETITPWNFEEVVDKGASAQSFIERMTNFDKNLPNEKVLPKHSLLYEYFTVYNELTKVKYVTEGMRKPAFLSGEQKKAIVDLLFKTNRKVTVKQLKEDYFKKIECFDSVEISGVEDRFNASLGTYHDLLKIIKDKDFLDNEENEDILEDIVLTLTLFEDREMIEERLKTYAHLFDDKVMKQLKRRRYTGWGRLSRKLINGIRDKQSGKTILDFLKSDGFANRNFMQLIHDDSLTFKEDIQKAQVSGQGDSLHEHIANLAGSPAIKKGILQTVKVVDELVKVMGRHKPENIVIEMARENQTTQKGQKNSRERMKRIEEGIKELGSQILKEHPVENTQLQNEKLYLYYLQNGRDMYVDQELDINRLSDYDVDHIVPQSFLKDDSIDNKVLTRSDKARGKSDNVPSEEVVKKMKNYWRQLLNAKLITQRKFDNLTKAERGGLSELDKAGFIKRQLVETRQITKHVAQILDSRMNTKYDENDKLIREVKVITLKSKLVSDFRKDFQFYKVREINNYHHAHDAYLNAVVGTALIKKYPKLESEFVYGDYKVYDVRKMIAKSEQEIGKATAKYFFYSNIMNFFKTEITLANGEIRKRPLIETNGETGEIVWDKGRDFATVRKVLSMPQVNIVKKTEVQTGGFSKESILPKRNSDKLIARKKDWDPKKYGGFDSPTVAYSVLVVAKVEKGKSKKLKSVKELLGITIMERSSFEKNPIDFLEAKGYKEVKKDLIIKLPKYSLFELENGRKRMLASAGELQKGNELALPSKYVNFLYLASHYEKLKGSPEDNEQKQLFVEQHKHYLDEIIEQISEFSKRVILADANLDKVLSAYNKHRDKPIREQAENIIHLFTLTNLGAPAAFKYFDTTIDRKRYTSTKEVLDATLIHQSITGLYETRIDLSQLGGDGGGGGGGGGTLNIEDEYRLHETSKEPDVPLGSTWLSDFPQAWAETGGMGLAVRQAPLIIPLKATSTPVSIKQYPMSQEARLGIKPHIQRLLDQGILVPCQSPWNTPLLPVKKPGTNDYRPVQDLREVNKRVEDIHPTVPNPYNLLSGLPPSHQWYTVLDLKDAFFCLRLHPTSQPLFAFEWRDPEMGISGQLTWTRLPQGFKNSPTLFNEALHRDLADFRIQHPDLILLQYVDDLLLAATSEQDCQRGTRALLQTLGNLGYRASAKKAQICQKQVKYLGYLLKEGQRWLTEARKETVMGQPTPKTPRQLREFLGKAGFCRLFIPGFAEMAAPLYPLTKPGTLFNWGPDQQKAYQEIKQALLTAPALGLPDLTKPFELFVDEKQGYAKGVLTQKLGPWRRPVAYLSKKLDPVAAGWPPCLRMVAAIAVLTKDAGKLTMGQPLVILAPHAVEALVKQPPDRWLSNARMTHYQAMLLDTDRVQFGPVVALNPATLLPLPEKEAPHDCLEILAETHGTRPDLTDQPIPDADYTWYTDGSSFLQEGQRRAGAAVTTETEVIWARALPAGTSAQRAELIALTQALKMAEGKKLNVYTDSRYAFATAHVHGEIYRRRGWLTSEGREIKNKNEILALLKALFLPKRLSIIHCPGHQKGNSAEARGNRMADQAAREAAMKAVLETSTLLAGKRTADGSEFEKRTADGSEFESPKKKAKVE

SEQ ID NO: 6254 - protein, 2093 aa, synthetic construct
MPAAKRVKLDGGDKKYSIGLDIGTNSVGWAVITDEYKVPSKKFKVLGNTDRHSIKKNLIGALLFDSGETAEATRLKRTARRRYTRRKNRICYLQEIFSNEMAKVDDSFFHRLEESFLVEEDKKHERHPIFGNIVDEVAYHEKYPTIYHLRKKLVDSTDKADLRLIYLALAHMIKFRGHFLIEGDLNPDNSDVDKLFIQLVQTYNQLFEENPINASGVDAKAILSARLSKSRRLENLIAQLPGEKKNGLFGNLIALSLGLTPNFKSNFDLAEDAKLQLSKDTYDDDLDNLLAQIGDQYADLFLAAKNLSDAILLSDILRVNTEITKAPLSASMIKRYDEHHQDLTLLKALVRQQLPEKYKEIFFDQSKNGYAGYIDGGASQEEFYKFIKPILEKMDGTEELLVKLNREDLLRKQRTFDNGSIPHQIHLGELHAILRRQEDFYPFLKDNREKIEKILTFRIPYYVGPLARGNSRFAWMTRKSEETITPWNFEEVVDKGASAQSFIERMTNFDKNLPNEKVLPKHSLLYEYFTVYNELTKVKYVTEGMRKPAFLSGEQKKAIVDLLFKTNRKVTVKQLKEDYFKKIECFDSVEISGVEDRFNASLGTYHDLLKIIKDKDFLDNEENEDILEDIVLTLTLFEDREMIEERLKTYAHLFDDKVMKQLKRRRYTGWGRLSRKLINGIRDKQSGKTILDFLKSDGFANRNFMQLIHDDSLTFKEDIQKAQVSGQGDSLHEHIANLAGSPAIKKGILQTVKVVDELVKVMGRHKPENIVIEMARENQTTQKGQKNSRERMKRIEEGIKELGSQILKEHPVENTQLQNEKLYLYYLQNGRDMYVDQELDINRLSDYDVDHIVPQSFLKDDSIDNKVLTRSDKARGKSDNVPSEEVVKKMKNYWRQLLNAKLITQRKFDNLTKAERGGLSELDKAGFIKRQLVETRQITKHVAQILDSRMNTKYDENDKLIREVKVITLKSKLVSDFRKDFQFYKVREINNYHHAHDAYLNAVVGTALIKKYPKLESEFVYGDYKVYDVRKMIAKSEQEIGKATAKYFFYSNIMNFFKTEITLANGEIRKRPLIETNGETGEIVWDKGRDFATVRKVLSMPQVNIVKKTEVQTGGFSKESILPKRNSDKLIARKKDWDPKKYGGFDSPTVAYSVLVVAKVEKGKSKKLKSVKELLGITIMERSSFEKNPIDFLEAKGYKEVKKDLIIKLPKYSLFELENGRKRMLASAGELQKGNELALPSKYVNFLYLASHYEKLKGSPEDNEQKQLFVEQHKHYLDEIIEQISEFSKRVILADANLDKVLSAYNKHRDKPIREQAENIIHLFTLTNLGAPAAFKYFDTTIDRKRYTSTKEVLDATLIHQSITGLYETRIDLSQLGGDGGGGGGGGGGTAPLEEEYRLFLEAPIQNVTLLEQWKREIPKVWAEINPPGLASTQAPIHVQLLSTALPVRVRQYPITLEAKRSLRETIRKFRAAGILRPVHSPWNTPLLPVRKSGTSEYRMVQDLREVNKRVETIHPTVPNPYTLLSLLPPDRIWYSVLDLKDAFFCIPLAPESQLIFAFEWADAEEGESGQLTWTRLPQGFKNSPTLFDEALNRDLQGFRLDHPSVSLLQYVDDLLIAADTQAACLSATRDLLMTLAELGYRVSGKKAQLCQEEVTYLGFKIHKGSRSLSNSRTQAILQIPVPKTKRQVREFLGTIGYCRLWIPGFAELAQPLYAATRGGNDPLVWGEKEEEAFQSLKLALTQPPALALPSLDKPFQLFVEETSGAAKGVLTQALGPWKRPVAYLSKRLDPVAAGWPRCLRAIAAAALLTREASKLTFGQDIEITSSHNLESLLRSPPDKWLTNARITQYQVLLLDPPRVRFKQTAALNPATLLPETDDTLPIHHCLDTLDSLTSTRPDLTDQPLAQAEATLFTDGSSYIRDGKRYAGAAVVTLDSVIWAEPLPIGTSAQKAELIALTKALEWSKDKSVNIYTDSRYAFATLHVHGMIYRERGLLTAGGKAIKNAPEILALLTAVWLPKRVAVMHCKGHQKDDAPTSTGNRRADEVAREVAIRPLSTQATISAGKRTADGSEFEKRTADGSEFESPKKKAKVE

SEQ ID NO: 6255 - protein, 1996 aa, synthetic construct
MPAAKRVKLDGGDKKYSIGLDIGTNSVGWAVITDEYKVPSKKFKVLGNTDRHSIKKNLIGALLFDSGETAEATRLKRTARRRYTRRKNRICYLQEIFSNEMAKVDDSFFHRLEESFLVEEDKKHERHPIFGNIVDEVAYHEKYPTIYHLRKKLVDSTDKADLRLIYLALAHMIKFRGHFLIEGDLNPDNSDVDKLFIQLVQTYNQLFEENPINASGVDAKAILSARLSKSRRLENLIAQLPGEKKNGLFGNLIALSLGLTPNFKSNFDLAEDAKLQLSKDTYDDDLDNLLAQIGDQYADLFLAAKNLSDAILLSDILRVNTEITKAPLSASMIKRYDEHHQDLTLLKALVRQQLPEKYKEIFFDQSKNGYAGYIDGGASQEEFYKFIKPILEKMDGTEELLVKLNREDLLRKQRTFDNGSIPHQIHLGELHAILRRQEDFYPFLKDNREKIEKILTFRIPYYVGPLARGNSRFAWMTRKSEETITPWNFEEVVDKGASAQSFIERMTNFDKNLPNEKVLPKHSLLYEYFTVYNELTKVKYVTEGMRKPAFLSGEQKKAIVDLLFKTNRKVTVKQLKEDYFKKIECFDSVEISGVEDRFNASLGTYHDLLKIIKDKDFLDNEENEDILEDIVLTLTLFEDREMIEERLKTYAHLFDDKVMKQLKRRRYTGWGRLSRKLINGIRDKQSGKTILDFLKSDGFANRNFMQLIHDDSLTFKEDIQKAQVSGQGDSLHEHIANLAGSPAIKKGILQTVKVVDELVKVMGRHKPENIVIEMARENQTTQKGQKNSRERMKRIEEGIKELGSQILKEHPVENTQLQNEKLYLYYLQNGRDMYVDQELDINRLSDYDVDHIVPQSFLKDDSIDNKVLTRSDKARGKSDNVPSEEVVKKMKNYWRQLLNAKLITQRKFDNLTKAERGGLSELDKAGFIKRQLVETRQITKHVAQILDSRMNTKYDENDKLIREVKVITLKSKLVSDFRKDFQFYKVREINNYHHAHDAYLNAVVGTALIKKYPKLESEFVYGDYKVYDVRKMIAKSEQEIGKATAKYFFYSNIMNFFKTEITLANGEIRKRPLIETNGETGEIVWDKGRDFATVRKVLSMPQVNIVKKTEVQTGGFSKESILPKRNSDKLIARKKDWDPKKYGGFDSPTVAYSVLVVAKVEKGKSKKLKSVKELLGITIMERSSFEKNPIDFLEAKGYKEVKKDLIIKLPKYSLFELENGRKRMLASAGELQKGNELALPSKYVNFLYLASHYEKLKGSPEDNEQKQLFVEQHKHYLDEIIEQISEFSKRVILADANLDKVLSAYNKHRDKPIREQAENIIHLFTLTNLGAPAAFKYFDTTIDRKRYTSTKEVLDATLIHQSITGLYETRIDLSQLGGDGGGGGGGGGGGVLDTPPSHIGLEHLPPPPEVPQFPLNLERLQALQDLVHRSLEAGYISPWDGPGNNPVFPVRKPNGAWRFVHDLRATNALTKPIPALSPGPPDLTAPPTHPPHIICLDLKDAFFQIPVEDRFRFYLSFTLPSPGGLQPHRRFAWRVLPQGFINSPALFQRALQEPLRQVSAAFSQSLLVSYMDDILYASPTEEQRSQCYQALAARLRDLGFQVASEKTSQTPSPVPFLGQMVHEQIVTYQSLPTLQISSPISLHQLQAVLGDLQWVSRGTPTTRRPLQLLYSSLKRHHDPRAIIQLSPEQLQGIAELRQALSHNARSRYNEQEPLLAYVHLTRAGSTLVLFQKGAQFPLAYFQTPLTDNQASPWGLLLLLGCQYLQTQALSSYAKPILKYYHNLPKTSLDNWIQSSEDPRVQELLQLWPQISSQGIQPPGPWKTLITRAEVFLTPQFSPDPIPAALCLFSDGATGRGAYCLWKDHLLDFQAVPAPESAQKGELAGLLAGLAAAPPEPVNIWVDSKYLYSLLRTWVLGAWLQPDPVPSYALLYKSLLRHPAIVVGHVRSHSSASHPIASLNNYVDQLAGKRTADGSEFEKRTADGSEFESPKKKAKVE

SEQ ID NO: 6256 - protein, 2089 aa, synthetic construct
MPAAKRVKLDGGDKKYSIGLDIGTNSVGWAVITDEYKVPSKKFKVLGNTDRHSIKKNLIGALLFDSGETAEATRLKRTARRRYTRRKNRICYLQEIFSNEMAKVDDSFFHRLEESFLVEEDKKHERHPIFGNIVDEVAYHEKYPTIYHLRKKLVDSTDKADLRLIYLALAHMIKFRGHFLIEGDLNPDNSDVDKLFIQLVQTYNQLFEENPINASGVDAKAILSARLSKSRRLENLIAQLPGEKKNGLFGNLIALSLGLTPNFKSNFDLAEDAKLQLSKDTYDDDLDNLLAQIGDQYADLFLAAKNLSDAILLSDILRVNTEITKAPLSASMIKRYDEHHQDLTLLKALVRQQLPEKYKEIFFDQSKNGYAGYIDGGASQEEFYKFIKPILEKMDGTEELLVKLNREDLLRKQRTFDNGSIPHQIHLGELHAILRRQEDFYPFLKDNREKIEKILTFRIPYYVGPLARGNSRFAWMTRKSEETITPWNFEEVVDKGASAQSFIERMTNFDKNLPNEKVLPKHSLLYEYFTVYNELTKVKYVTEGMRKPAFLSGEQKKAIVDLLFKTNRKVTVKQLKEDYFKKIECFDSVEISGVEDRFNASLGTYHDLLKIIKDKDFLDNEENEDILEDIVLTLTLFEDREMIEERLKTYAHLFDDKVMKQLKRRRYTGWGRLSRKLINGIRDKQSGKTILDFLKSDGFANRNFMQLIHDDSLTFKEDIQKAQVSGQGDSLHEHIANLAGSPAIKKGILQTVKVVDELVKVMGRHKPENIVIEMARENQTTQKGQKNSRERMKRIEEGIKELGSQILKEHPVENTQLQNEKLYLYYLQNGRDMYVDQELDINRLSDYDVDHIVPQSFLKDDSIDNKVLTRSDKARGKSDNVPSEEVVKKMKNYWRQLLNAKLITQRKFDNLTKAERGGLSELDKAGFIKRQLVETRQITKHVAQILDSRMNTKYDENDKLIREVKVITLKSKLVSDFRKDFQFYKVREINNYHHAHDAYLNAVVGTALIKKYPKLESEFVYGDYKVYDVRKMIAKSEQEIGKATAKYFFYSNIMNFFKTEITLANGEIRKRPLIETNGETGEIVWDKGRDFATVRKVLSMPQVNIVKKTEVQTGGFSKESILPKRNSDKLIARKKDWDPKKYGGFDSPTVAYSVLVVAKVEKGKSKKLKSVKELLGITIMERSSFEKNPIDFLEAKGYKEVKKDLIIKLPKYSLFELENGRKRMLASAGELQKGNELALPSKYVNFLYLASHYEKLKGSPEDNEQKQLFVEQHKHYLDEIIEQISEFSKRVILADANLDKVLSAYNKHRDKPIREQAENIIHLFTLTNLGAPAAFKYFDTTIDRKRYTSTKEVLDATLIHQSITGLYETRIDLSQLGGDGGGGGGGGGGVLNLEEEYRLHEKPVPSSIDPSWLQLFPTVWAERAGMGLANQVPPVVVELRSGASPVAVRQYPMSKEAREGIRPHIQKFLDLGVLVPCRSPWNTPLLPVKKPGTNDYRPVQDLREINKRVQDIHPTVPNPYNLLSSLPPSYTWYSVLDLKDAFFCLRLHPNSQPLFAFEWKDPEKGNTGQLTWTRLPQGFKNSPTLFNEALHRDLAPFRALNPQVVLLQYVDDLLVAAPTYEDCKKGTQKLLQELSKLGYRVSAKKAQLCQREVTYLGYLLKEGKRWLTPARKATVMKIPVPTTPRQVREFLGKAGFCRLFIPGFASLAAPLYPLTKPSIPFIWTEEHQQAFDHIKKALLSAPALALPDLTKPFTLYIDERAGVARGVLTQTLGPWRRPVAYLSKKLDPVASGWPTCLKAVAAVALLLKDADKLTLGQNVTVIASHSLESIVRQPPDRWMTNARMTHYQSLLLNERVSFAPPAVLNPATLLPVESEATPVHRCSEILAEETGTRRDLEDQPLPGVPTWYTDGSSFITEGKRRAGAPIVDGKRTVWASSLPEGTSAQKAELVALTQALRLAEGKNINIYTDSRYAFATAHIHGAIYKQRGWLTSAGKDIKNKEEILALLEAIHLPRRVAIIHCPGHQRGSNPVATGNRRADEAAKQAALSTRVLAGTTKPAGKRTADGSEFEKRTADGSEFESPKKKAKVE

SEQ ID NO: 6257 - protein, 2213 aa, synthetic construct
MPAAKRVKLDGGDKKYSIGLDIGTNSVGWAVITDEYKVPSKKFKVLGNTDRHSIKKNLIGALLFDSGETAEATRLKRTARRRYTRRKNRICYLQEIFSNEMAKVDDSFFHRLEESFLVEEDKKHERHPIFGNIVDEVAYHEKYPTIYHLRKKLVDSTDKADLRLIYLALAHMIKFRGHFLIEGDLNPDNSDVDKLFIQLVQTYNQLFEENPINASGVDAKAILSARLSKSRRLENLIAQLPGEKKNGLFGNLIALSLGLTPNFKSNFDLAEDAKLQLSKDTYDDDLDNLLAQIGDQYADLFLAAKNLSDAILLSDILRVNTEITKAPLSASMIKRYDEHHQDLTLLKALVRQQLPEKYKEIFFDQSKNGYAGYIDGGASQEEFYKFIKPILEKMDGTEELLVKLNREDLLRKQRTFDNGSIPHQIHLGELHAILRRQEDFYPFLKDNREKIEKILTFRIPYYVGPLARGNSRFAWMTRKSEETITPWNFEEVVDKGASAQSFIERMTNFDKNLPNEKVLPKHSLLYEYFTVYNELTKVKYVTEGMRKPAFLSGEQKKAIVDLLFKTNRKVTVKQLKEDYFKKIECFDSVEISGVEDRFNASLGTYHDLLKIIKDKDFLDNEENEDILEDIVLTLTLFEDREMIEERLKTYAHLFDDKVMKQLKRRRYTGWGRLSRKLINGIRDKQSGKTILDFLKSDGFANRNFMQLIHDDSLTFKEDIQKAQVSGQGDSLHEHIANLAGSPAIKKGILQTVKVVDELVKVMGRHKPENIVIEMARENQTTQKGQKNSRERMKRIEEGIKELGSQILKEHPVENTQLQNEKLYLYYLQNGRDMYVDQELDINRLSDYDVDHIVPQSFLKDDSIDNKVLTRSDKARGKSDNVPSEEVVKKMKNYWRQLLNAKLITQRKFDNLTKAERGGLSELDKAGFIKRQLVETRQITKHVAQILDSRMNTKYDENDKLIREVKVITLKSKLVSDFRKDFQFYKVREINNYHHAHDAYLNAVVGTALIKKYPKLESEFVYGDYKVYDVRKMIAKSEQEIGKATAKYFFYSNIMNFFKTEITLANGEIRKRPLIETNGETGEIVWDKGRDFATVRKVLSMPQVNIVKKTEVQTGGFSKESILPKRNSDKLIARKKDWDPKKYGGFDSPTVAYSVLVVAKVEKGKSKKLKSVKELLGITIMERSSFEKNPIDFLEAKGYKEVKKDLIIKLPKYSLFELENGRKRMLASAGELQKGNELALPSKYVNFLYLASHYEKLKGSPEDNEQKQLFVEQHKHYLDEIIEQISEFSKRVILADANLDKVLSAYNKHRDKPIREQAENIIHLFTLTNLGAPAAFKYFDTTIDRKRYTSTKEVLDATLIHQSITGLYETRIDLSQLGGDGGGGGGGGGGTLGDQGSRGSDPLPEPRVTLTVEGIPTEFLVNTGAEHSVLTKPMGKMGSKRTVVAGATGSKVYPWTTKRLLKIGQKQVTHSFLVIPECPAPLLGRDLLTKLKAQIQFSTEGPQVTWEDRPAMCLVLNLEEEYRLHEKPVPPSIDPSWLQLFPMVWAEKAGMGLANQVPPVVVELKSDASPVAVRQYPMSKEAREGIRPHIQRFLDLGILVPCQSPWNTPLLPVKKPGTNDYRPVQDLREVNKRVQDIHPTVPNPYNLLSSLPPSHTWYSVLDLKDAFFCLKLHPNSQPLFAFEWRDPEKGNTGQLTWTRLPQGFKNSPTLFNEALHRDLASFRALNPQVVMLQYVDDLLVAAPTYRDCKEGTRRLLQELSKLGYRVSAKKAQLCREEVTYLGYLLKGGKRWLTPARKATVMKIPTPTTPRQVREFLGTAGFCRLWIPGFASLAAPLYPLTRPKVPFTWTEAHQEAFGRIKEALLSAPALALPDLTKPFALYVDEKEGVARGVLTQTLGPWRRPVAYLSKKLDPVASGWPTCLKAIAAVALLLKDADKLTLGQNVLVIAPHNLESIVRQPPDRWMTNARMTHYQSLLLNERVSFAPPAILNPATLLPVESDDTPIHICSEILAEETGTRPDLRDQPLPGVPAWYTDGSSFIMDGRRQAGAAIVDNKRTVWASNLPEGTSAQKAELIALTQALRLAEGKSINIYTDSRYAFATAHVHGAIYKQRGWLTSAGKDIKNKEEILALLEAIHLPKRVAIIHCPGHQRGTDPVATGNRKADEAAKQAAQSTRILTETTKNAGKRTADGSEFEKRTADGSEFESPKKKAKVE

SEQ ID NO: 6258 - protein, 2213 aa, synthetic construct
MPAAKRVKLDGGDKKYSIGLDIGTNSVGWAVITDEYKVPSKKFKVLGNTDRHSIKKNLIGALLFDSGETAEATRLKRTARRRYTRRKNRICYLQEIFSNEMAKVDDSFFHRLEESFLVEEDKKHERHPIFGNIVDEVAYHEKYPTIYHLRKKLVDSTDKADLRLIYLALAHMIKFRGHFLIEGDLNPDNSDVDKLFIQLVQTYNQLFEENPINASGVDAKAILSARLSKSRRLENLIAQLPGEKKNGLFGNLIALSLGLTPNFKSNFDLAEDAKLQLSKDTYDDDLDNLLAQIGDQYADLFLAAKNLSDAILLSDILRVNTEITKAPLSASMIKRYDEHHQDLTLLKALVRQQLPEKYKEIFFDQSKNGYAGYIDGGASQEEFYKFIKPILEKMDGTEELLVKLNREDLLRKQRTFDNGSIPHQIHLGELHAILRRQEDFYPFLKDNREKIEKILTFRIPYYVGPLARGNSRFAWMTRKSEETITPWNFEEVVDKGASAQSFIERMTNFDKNLPNEKVLPKHSLLYEYFTVYNELTKVKYVTEGMRKPAFLSGEQKKAIVDLLFKTNRKVTVKQLKEDYFKKIECFDSVEISGVEDRFNASLGTYHDLLKIIKDKDFLDNEENEDILEDIVLTLTLFEDREMIEERLKTYAHLFDDKVMKQLKRRRYTGWGRLSRKLINGIRDKQSGKTILDFLKSDGFANRNFMQLIHDDSLTFKEDIQKAQVSGQGDSLHEHIANLAGSPAIKKGILQTVKVVDELVKVMGRHKPENIVIEMARENQTTQKGQKNSRERMKRIEEGIKELGSQILKEHPVENTQLQNEKLYLYYLQNGRDMYVDQELDINRLSDYDVDHIVPQSFLKDDSIDNKVLTRSDKARGKSDNVPSEEVVKKMKNYWRQLLNAKLITQRKFDNLTKAERGGLSELDKAGFIKRQLVETRQITKHVAQILDSRMNTKYDENDKLIREVKVITLKSKLVSDFRKDFQFYKVREINNYHHAHDAYLNAVVGTALIKKYPKLESEFVYGDYKVYDVRKMIAKSEQEIGKATAKYFFYSNIMNFFKTEITLANGEIRKRPLIETNGETGEIVWDKGRDFATVRKVLSMPQVNIVKKTEVQTGGFSKESILPKRNSDKLIARKKDWDPKKYGGFDSPTVAYSVLVVAKVEKGKSKKLKSVKELLGITIMERSSFEKNPIDFLEAKGYKEVKKDLIIKLPKYSLFELENGRKRMLASAGELQKGNELALPSKYVNFLYLASHYEKLKGSPEDNEQKQLFVEQHKHYLDEIIEQISEFSKRVILADANLDKVLSAYNKHRDKPIREQAENIIHLFTLTNLGAPAAFKYFDTTIDRKRYTSTKEVLDATLIHQSITGLYETRIDLSQLGGDGGGGGGGGGGTLGDQGSRGSDPLPEPRVTLTVEGIPTEFLVNTGAEHSVLTKPMGKMGSKRTVVAGATGSKVYPWTTKRLLKIGQKQVTHSFLVIPECPAPLLGRDLLTKLKAQIQFSTEGPQVTWEDRPAMCLVLNLEEEYRLHEKPVPPSIDPSWLQLFPMVWAEKAGMGLANQVPPVVVELKSDASPVAVRQYPMSKEAREGIRPHIQRFLDLGILVPCQSPWNTPLLPVKKPGTNDYRPVQDLREVNKRVQDIHPTVPNPYNLLSSLPPSHTWYSVLDLKDAFFCLKLHPNSQPLFAFEWRDPEKGNTGQLTWTRLPQGFKNSPTLFNEALHRDLASFRALNPQVVMLQYVDDLLVAAPTYRDCKEGTRRLLQELSKLGYRVSAKKAQLCREEVTYLGYLLKGGKRWLTPARKATVMKIPTPTTPRQVREFLGKAGFCRLFIPGFASLAAPLYPLTRPKVPFTWTEAHQEAFGRIKEALLSAPALALPDLTKPFALYVDEKEGVARGVLTQTLGPWRRPVAYLSKKLDPVASGWPTCLKAIAAVALLLKDADKLTLGQNVLVIAPHNLESIVRQPPDRWMTNARMTHYQSLLLNERVSFAPPAILNPATLLPVESDDTPIHICSEILAEETGTRPDLRDQPLPGVPAWYTDGSSFIMDGRRQAGAAIVDNKRTVWASNLPEGTSAQKAELIALTQALRLAEGKSINIYTDSRYAFATAHVHGAIYKQRGWLTSAGKDIKNKEEILALLEAIHLPKRVAIIHCPGHQRGTDPVATGNRKADEAAKQAAQSTRILTETTKNAGKRTADGSEFEKRTADGSEFESPKKKAKVE

SEQ ID NO: 6259 - protein, 2091 aa, synthetic construct
MPAAKRVKLDGGDKKYSIGLDIGTNSVGWAVITDEYKVPSKKFKVLGNTDRHSIKKNLIGALLFDSGETAEATRLKRTARRRYTRRKNRICYLQEIFSNEMAKVDDSFFHRLEESFLVEEDKKHERHPIFGNIVDEVAYHEKYPTIYHLRKKLVDSTDKADLRLIYLALAHMIKFRGHFLIEGDLNPDNSDVDKLFIQLVQTYNQLFEENPINASGVDAKAILSARLSKSRRLENLIAQLPGEKKNGLFGNLIALSLGLTPNFKSNFDLAEDAKLQLSKDTYDDDLDNLLAQIGDQYADLFLAAKNLSDAILLSDILRVNTEITKAPLSASMIKRYDEHHQDLTLLKALVRQQLPEKYKEIFFDQSKNGYAGYIDGGASQEEFYKFIKPILEKMDGTEELLVKLNREDLLRKQRTFDNGSIPHQIHLGELHAILRRQEDFYPFLKDNREKIEKILTFRIPYYVGPLARGNSRFAWMTRKSEETITPWNFEEVVDKGASAQSFIERMTNFDKNLPNEKVLPKHSLLYEYFTVYNELTKVKYVTEGMRKPAFLSGEQKKAIVDLLFKTNRKVTVKQLKEDYFKKIECFDSVEISGVEDRFNASLGTYHDLLKIIKDKDFLDNEENEDILEDIVLTLTLFEDREMIEERLKTYAHLFDDKVMKQLKRRRYTGWGRLSRKLINGIRDKQSGKTILDFLKSDGFANRNFMQLIHDDSLTFKEDIQKAQVSGQGDSLHEHIANLAGSPAIKKGILQTVKVVDELVKVMGRHKPENIVIEMARENQTTQKGQKNSRERMKRIEEGIKELGSQILKEHPVENTQLQNEKLYLYYLQNGRDMYVDQELDINRLSDYDVDHIVPQSFLKDDSIDNKVLTRSDKARGKSDNVPSEEVVKKMKNYWRQLLNAKLITQRKFDNLTKAERGGLSELDKAGFIKRQLVETRQITKHVAQILDSRMNTKYDENDKLIREVKVITLKSKLVSDFRKDFQFYKVREINNYHHAHDAYLNAVVGTALIKKYPKLESEFVYGDYKVYDVRKMIAKSEQEIGKATAKYFFYSNIMNFFKTEITLANGEIRKRPLIETNGETGEIVWDKGRDFATVRKVLSMPQVNIVKKTEVQTGGFSKESILPKRNSDKLIARKKDWDPKKYGGFDSPTVAYSVLVVAKVEKGKSKKLKSVKELLGITIMERSSFEKNPIDFLEAKGYKEVKKDLIIKLPKYSLFELENGRKRMLASAGELQKGNELALPSKYVNFLYLASHYEKLKGSPEDNEQKQLFVEQHKHYLDEIIEQISEFSKRVILADANLDKVLSAYNKHRDKPIREQAENIIHLFTLTNLGAPAAFKYFDTTIDRKRYTSTKEVLDATLIHQSITGLYETRIDLSQLGGDGGGGGGGGGGTLNLEDEYRLYETSAEPEVSPGSTWLSDFPQAWAETGGMGLAVRQAPLIIPLKATSTPVSIKQYPMSQEAKLGIKPHIQRLLDQGILVPCQSPWNTPLLPVKKPGTNDYRPVQDLREVNKRVEDIHPTVPNPYNLLSGLPPSHRWYTVLDLKDAFFCLRLHPTSQPLFAFEWRDPGMGISGQLTWTRLPQGFKNSPTLFNEALHRDLADFRIQHPDLILLQYVDDILLAATSELDCQQGTRALLLTLGNLGYRASAKKAQLCQKQVKYLGYLLKEGQRWLTEARKETVMGQPTPKTPRQLREFLGTAGFCRLWIPGFAEMAAPLYPLTKPGTLFNWGPDQQKAYQEIKQALLTAPALGLPDLTKPFELFVDEKQGYAKGVLTQKLGPWRRPVAYLSKKLDPVAAGWPPCLRMVAAIAVLRKDAGKLTMGQPLVILAPHAVEALVKQPPDRWLSNARMTHYQAMLLDTDRVQFGPVVALNPATLLPLPEEGAPHDCLEILAETHGTRPDLTDQPIPDADHTWYTDGSSFLQEGQRKAGAAVTTETEVIWARALPAGTSAQRAELIALTQALKMAEGKRLNVYTDSRYAFATAHIHGEIYRRRGWLTSEGREIKNKSEILALLKALFLPKRLSIIHCLGHQKGDSAEARGNRLADQAAREAAIKTPPDTSTLLAGKRTADGSEFEKRTADGSEFESPKKKAKVE

SEQ ID NO: 6260 - protein, 2091 aa, synthetic construct
MPAAKRVKLDGGDKKYSIGLDIGTNSVGWAVITDEYKVPSKKFKVLGNTDRHSIKKNLIGALLFDSGETAEATRLKRTARRRYTRRKNRICYLQEIFSNEMAKVDDSFFHRLEESFLVEEDKKHERHPIFGNIVDEVAYHEKYPTIYHLRKKLVDSTDKADLRLIYLALAHMIKFRGHFLIEGDLNPDNSDVDKLFIQLVQTYNQLFEENPINASGVDAKAILSARLSKSRRLENLIAQLPGEKKNGLFGNLIALSLGLTPNFKSNFDLAEDAKLQLSKDTYDDDLDNLLAQIGDQYADLFLAAKNLSDAILLSDILRVNTEITKAPLSASMIKRYDEHHQDLTLLKALVRQQLPEKYKEIFFDQSKNGYAGYIDGGASQEEFYKFIKPILEKMDGTEELLVKLNREDLLRKQRTFDNGSIPHQIHLGELHAILRRQEDFYPFLKDNREKIEKILTFRIPYYVGPLARGNSRFAWMTRKSEETITPWNFEEVVDKGASAQSFIERMTNFDKNLPNEKVLPKHSLLYEYFTVYNELTKVKYVTEGMRKPAFLSGEQKKAIVDLLFKTNRKVTVKQLKEDYFKKIECFDSVEISGVEDRFNASLGTYHDLLKIIKDKDFLDNEENEDILEDIVLTLTLFEDREMIEERLKTYAHLFDDKVMKQLKRRRYTGWGRLSRKLINGIRDKQSGKTILDFLKSDGFANRNFMQLIHDDSLTFKEDIQKAQVSGQGDSLHEHIANLAGSPAIKKGILQTVKVVDELVKVMGRHKPENIVIEMARENQTTQKGQKNSRERMKRIEEGIKELGSQILKEHPVENTQLQNEKLYLYYLQNGRDMYVDQELDINRLSDYDVDHIVPQSFLKDDSIDNKVLTRSDKARGKSDNVPSEEVVKKMKNYWRQLLNAKLITQRKFDNLTKAERGGLSELDKAGFIKRQLVETRQITKHVAQILDSRMNTKYDENDKLIREVKVITLKSKLVSDFRKDFQFYKVREINNYHHAHDAYLNAVVGTALIKKYPKLESEFVYGDYKVYDVRKMIAKSEQEIGKATAKYFFYSNIMNFFKTEITLANGEIRKRPLIETNGETGEIVWDKGRDFATVRKVLSMPQVNIVKKTEVQTGGFSKESILPKRNSDKLIARKKDWDPKKYGGFDSPTVAYSVLVVAKVEKGKSKKLKSVKELLGITIMERSSFEKNPIDFLEAKGYKEVKKDLIIKLPKYSLFELENGRKRMLASAGELQKGNELALPSKYVNFLYLASHYEKLKGSPEDNEQKQLFVEQHKHYLDEIIEQISEFSKRVILADANLDKVLSAYNKHRDKPIREQAENIIHLFTLTNLGAPAAFKYFDTTIDRKRYTSTKEVLDATLIHQSITGLYETRIDLSQLGGDGGGGGGGGGGTLNIEDEYRLHETSKEPDVSLGSTWLSDFPQAWAETGGMGLAVRQAPLIIPLKATSTPVSIKQYPMSQEARLGIKPHIQRLLDQGILVPCQSPWNTPLLPVKKPGTNDYRPVQDLREVNKRVEDIHPTVPNPYNLLSGLPPSHQWYTVLDLKDAFFCLRLHPTSQPLFAFEWRDPEMGISGQLTWTRLPQGFKNSPTLFNEALHRDLAGFRIQHPDLILLQYVDDLLLAATSELDCQQGTRALLQTLGDLGYRASAKKAQICQKQVKYLGYLLKEGQRWLTEARKETVMGQPIPKTPRQLREFLGTAGFCRLWIPGFAEMAAPLYPLTKPGTLFNWGPDQQKAFQEIKQALLTAPALGLPDLTKPFELFVDEKQGYAKGVLTQKLGPWRRPVAYLSKKLDPVAAGWPPCLRMVAAIAVLTKDAGKLTMGQPLVILAPHAVEALVKQPPDRWLSNARMTHYQALLLDTDRVQFGPVVALNPATLLPLPEEGLQHDCLDILAEAHGTRSDLMDQPLPDADHTWYTDGSSFLQEGQRKAGAAVTTETEVIWARALPAGTSAQRAELIALTQALKMAEGKKLNVYTDSRYAFATAHIHGEIYRRRGWLTSEGKEIKNKDEILALLKALFLPKRLSIIHCPGHQKGNSAEARGNRMADQAAREVATRETPETSTLLAGKRTADGSEFEKRTADGSEFESPKKKAKVE

SEQ ID NO: 6261 - protein, 2082 aa, synthetic construct
MPAAKRVKLDGGDKKYSIGLDIGTNSVGWAVITDEYKVPSKKFKVLGNTDRHSIKKNLIGALLFDSGETAEATRLKRTARRRYTRRKNRICYLQEIFSNEMAKVDDSFFHRLEESFLVEEDKKHERHPIFGNIVDEVAYHEKYPTIYHLRKKLVDSTDKADLRLIYLALAHMIKFRGHFLIEGDLNPDNSDVDKLFIQLVQTYNQLFEENPINASGVDAKAILSARLSKSRRLENLIAQLPGEKKNGLFGNLIALSLGLTPNFKSNFDLAEDAKLQLSKDTYDDDLDNLLAQIGDQYADLFLAAKNLSDAILLSDILRVNTEITKAPLSASMIKRYDEHHQDLTLLKALVRQQLPEKYKEIFFDQSKNGYAGYIDGGASQEEFYKFIKPILEKMDGTEELLVKLNREDLLRKQRTFDNGSIPHQIHLGELHAILRRQEDFYPFLKDNREKIEKILTFRIPYYVGPLARGNSRFAWMTRKSEETITPWNFEEVVDKGASAQSFIERMTNFDKNLPNEKVLPKHSLLYEYFTVYNELTKVKYVTEGMRKPAFLSGEQKKAIVDLLFKTNRKVTVKQLKEDYFKKIECFDSVEISGVEDRFNASLGTYHDLLKIIKDKDFLDNEENEDILEDIVLTLTLFEDREMIEERLKTYAHLFDDKVMKQLKRRRYTGWGRLSRKLINGIRDKQSGKTILDFLKSDGFANRNFMQLIHDDSLTFKEDIQKAQVSGQGDSLHEHIANLAGSPAIKKGILQTVKVVDELVKVMGRHKPENIVIEMARENQTTQKGQKNSRERMKRIEEGIKELGSQILKEHPVENTQLQNEKLYLYYLQNGRDMYVDQELDINRLSDYDVDHIVPQSFLKDDSIDNKVLTRSDKARGKSDNVPSEEVVKKMKNYWRQLLNAKLITQRKFDNLTKAERGGLSELDKAGFIKRQLVETRQITKHVAQILDSRMNTKYDENDKLIREVKVITLKSKLVSDFRKDFQFYKVREINNYHHAHDAYLNAVVGTALIKKYPKLESEFVYGDYKVYDVRKMIAKSEQEIGKATAKYFFYSNIMNFFKTEITLANGEIRKRPLIETNGETGEIVWDKGRDFATVRKVLSMPQVNIVKKTEVQTGGFSKESILPKRNSDKLIARKKDWDPKKYGGFDSPTVAYSVLVVAKVEKGKSKKLKSVKELLGITIMERSSFEKNPIDFLEAKGYKEVKKDLIIKLPKYSLFELENGRKRMLASAGELQKGNELALPSKYVNFLYLASHYEKLKGSPEDNEQKQLFVEQHKHYLDEIIEQISEFSKRVILADANLDKVLSAYNKHRDKPIREQAENIIHLFTLTNLGAPAAFKYFDTTIDRKRYTSTKEVLDATLIHQSITGLYETRIDLSQLGGDGGGGGGGGGGIPWLMKKPLQLTTLVPLQEYEERLLKQTMLTGSYKEKLQSLFLKYDALWQHWENQVGHRRIKPHHIATGTVNPRPQKQYPINPKAKASIQTVINDLLKQGVLIQQNSIMNTPVYPVPKPDGKWRMVLDYREVNKTIPLIAAQNQHSAGILSSIFRGKYKTTLDLSNGFWAHSITPESYWLTAFTWLGQQYCWTRLPQGFLNSPALFNADVVDLLKEVPNVQVYVDDIYISHDDPREHLEQLEKVFSLLLNAGYVVSLKKSEIAQHEVEFLGFNITKEGRGLTETFKQKLLNITPPRDLKQLQSILGLLNFARNFIPNFSELVKPLYNIIATAPGKYITWTTDNSQQLQNIISMLNSAENLEERNPEVRLIMKVNTSPSAGYIRFYNEFAKRPIMYLNYVYTKAEVKFTNTEKLLTTIHKGLIKALDLGMGQEILVYSPIVSMTKIQKTPLPERKALPIRWITWMSYLEDPRIQFHYDKTLPELQQVPTVTDDIIAKIKHPSEFSMVFYTDGSAIKHPNVNKSHNAGMGIAQVQFKPEFTVINTWSIPLGDHTAQLAEVAAVEFACKKALKIDGPVLIVTDSFYVAESVNKELPYWQSNGFFNNKKKPLKHVSKWKSIADCIQLKPDIIIIHEKGHQPTASTFHTEGNNLADKLATQGSYVVNAGKRTADGSEFEKRTADGSEFESPKKKAKVE

SEQ ID NO: 6262 - protein, 2091 aa, synthetic construct
MPAAKRVKLDGGDKKYSIGLDIGTNSVGWAVITDEYKVPSKKFKVLGNTDRHSIKKNLIGALLFDSGETAEATRLKRTARRRYTRRKNRICYLQEIFSNEMAKVDDSFFHRLEESFLVEEDKKHERHPIFGNIVDEVAYHEKYPTIYHLRKKLVDSTDKADLRLIYLALAHMIKFRGHFLIEGDLNPDNSDVDKLFIQLVQTYNQLFEENPINASGVDAKAILSARLSKSRRLENLIAQLPGEKKNGLFGNLIALSLGLTPNFKSNFDLAEDAKLQLSKDTYDDDLDNLLAQIGDQYADLFLAAKNLSDAILLSDILRVNTEITKAPLSASMIKRYDEHHQDLTLLKALVRQQLPEKYKEIFFDQSKNGYAGYIDGGASQEEFYKFIKPILEKMDGTEELLVKLNREDLLRKQRTFDNGSIPHQIHLGELHAILRRQEDFYPFLKDNREKIEKILTFRIPYYVGPLARGNSRFAWMTRKSEETITPWNFEEVVDKGASAQSFIERMTNFDKNLPNEKVLPKHSLLYEYFTVYNELTKVKYVTEGMRKPAFLSGEQKKAIVDLLFKTNRKVTVKQLKEDYFKKIECFDSVEISGVEDRFNASLGTYHDLLKIIKDKDFLDNEENEDILEDIVLTLTLFEDREMIEERLKTYAHLFDDKVMKQLKRRRYTGWGRLSRKLINGIRDKQSGKTILDFLKSDGFANRNFMQLIHDDSLTFKEDIQKAQVSGQGDSLHEHIANLAGSPAIKKGILQTVKVVDELVKVMGRHKPENIVIEMARENQTTQKGQKNSRERMKRIEEGIKELGSQILKEHPVENTQLQNEKLYLYYLQNGRDMYVDQELDINRLSDYDVDHIVPQSFLKDDSIDNKVLTRSDKARGKSDNVPSEEVVKKMKNYWRQLLNAKLITQRKFDNLTKAERGGLSELDKAGFIKRQLVETRQITKHVAQILDSRMNTKYDENDKLIREVKVITLKSKLVSDFRKDFQFYKVREINNYHHAHDAYLNAVVGTALIKKYPKLESEFVYGDYKVYDVRKMIAKSEQEIGKATAKYFFYSNIMNFFKTEITLANGEIRKRPLIETNGETGEIVWDKGRDFATVRKVLSMPQVNIVKKTEVQTGGFSKESILPKRNSDKLIARKKDWDPKKYGGFDSPTVAYSVLVVAKVEKGKSKKLKSVKELLGITIMERSSFEKNPIDFLEAKGYKEVKKDLIIKLPKYSLFELENGRKRMLASAGELQKGNELALPSKYVNFLYLASHYEKLKGSPEDNEQKQLFVEQHKHYLDEIIEQISEFSKRVILADANLDKVLSAYNKHRDKPIREQAENIIHLFTLTNLGAPAAFKYFDTTIDRKRYTSTKEVLDATLIHQSITGLYETRIDLSQLGGDGGGGGGGGGGTLNIEDEYRLHETSKEPDVPLGSTWLSDFPQAWAETGGMGLAVRQAPLIIPLKATSTPVSIKQYPMSQEARLGIKPHIQRLLDQGILVPCQSPWNTPLLPVKKPGTNDYRPVQDLREVNKRVEDIHPTVPNPYNLLSGLPPSHQWYTVLDLKDAFFCLRLHPTSQPLFAFEWRDPEMGISGQLTWTRLPQGFKNSPTLFNEALHRDLADFRIQHPDLILLQYVDDLLLAATSEQDCQRGTRALLQTLGNLGYRASAKKAQICQKQVKYLGYLLKEGQRWLTEARKETVMGQPTPKTPRQLREFLGTAGFCRLWIPGFAEMAAPLYPLTKPGTLFNWGPDQQKAYQEIKQALLTAPALGLPDLTKPFELFVDEKQGYAKGVLTQKLGPWRRPVAYLSKKLDPVAAGWPPCLRMVAAIAVLTKDAGKLTMGQPLVILAPHAVEALVKQPPDRWLSNARMTHYQAMLLDTDRVQFGPVVALNPATLLPLPEKEAPHDCLEILAETHGTRPDLTDQPIPDADYTWYTDGSSFLQEGQRRAGAAVTTETEVIWARALPAGTSAQRAELIALTQALKMAEGKKLNVYTDSRYAFATAHVHGEIYRRRGWLTSEGREIKNKNEILALLKALFLPKRLSIIHCPGHQKGNSAEARGNRMADQAAREAAMKAVLETSTLLAGKRTADGSEFEKRTADGSEFESPKKKAKVE

SEQ ID NO: 6263 - protein, 2091 aa, synthetic construct
MPAAKRVKLDGGDKKYSIGLDIGTNSVGWAVITDEYKVPSKKFKVLGNTDRHSIKKNLIGALLFDSGETAEATRLKRTARRRYTRRKNRICYLQEIFSNEMAKVDDSFFHRLEESFLVEEDKKHERHPIFGNIVDEVAYHEKYPTIYHLRKKLVDSTDKADLRLIYLALAHMIKFRGHFLIEGDLNPDNSDVDKLFIQLVQTYNQLFEENPINASGVDAKAILSARLSKSRRLENLIAQLPGEKKNGLFGNLIALSLGLTPNFKSNFDLAEDAKLQLSKDTYDDDLDNLLAQIGDQYADLFLAAKNLSDAILLSDILRVNTEITKAPLSASMIKRYDEHHQDLTLLKALVRQQLPEKYKEIFFDQSKNGYAGYIDGGASQEEFYKFIKPILEKMDGTEELLVKLNREDLLRKQRTFDNGSIPHQIHLGELHAILRRQEDFYPFLKDNREKIEKILTFRIPYYVGPLARGNSRFAWMTRKSEETITPWNFEEVVDKGASAQSFIERMTNFDKNLPNEKVLPKHSLLYEYFTVYNELTKVKYVTEGMRKPAFLSGEQKKAIVDLLFKTNRKVTVKQLKEDYFKKIECFDSVEISGVEDRFNASLGTYHDLLKIIKDKDFLDNEENEDILEDIVLTLTLFEDREMIEERLKTYAHLFDDKVMKQLKRRRYTGWGRLSRKLINGIRDKQSGKTILDFLKSDGFANRNFMQLIHDDSLTFKEDIQKAQVSGQGDSLHEHIANLAGSPAIKKGILQTVKVVDELVKVMGRHKPENIVIEMARENQTTQKGQKNSRERMKRIEEGIKELGSQILKEHPVENTQLQNEKLYLYYLQNGRDMYVDQELDINRLSDYDVDHIVPQSFLKDDSIDNKVLTRSDKARGKSDNVPSEEVVKKMKNYWRQLLNAKLITQRKFDNLTKAERGGLSELDKAGFIKRQLVETRQITKHVAQILDSRMNTKYDENDKLIREVKVITLKSKLVSDFRKDFQFYKVREINNYHHAHDAYLNAVVGTALIKKYPKLESEFVYGDYKVYDVRKMIAKSEQEIGKATAKYFFYSNIMNFFKTEITLANGEIRKRPLIETNGETGEIVWDKGRDFATVRKVLSMPQVNIVKKTEVQTGGFSKESILPKRNSDKLIARKKDWDPKKYGGFDSPTVAYSVLVVAKVEKGKSKKLKSVKELLGITIMERSSFEKNPIDFLEAKGYKEVKKDLIIKLPKYSLFELENGRKRMLASAGELQKGNELALPSKYVNFLYLASHYEKLKGSPEDNEQKQLFVEQHKHYLDEIIEQISEFSKRVILADANLDKVLSAYNKHRDKPIREQAENIIHLFTLTNLGAPAAFKYFDTTIDRKRYTSTKEVLDATLIHQSITGLYETRIDLSQLGGDGGGGGGGGGGTLNIEDEYRLHETSKEPDVPLGSTWLSDFPQAWAETGGMGLAVRQAPLIIPLKATSTPVSIKQYPMSQEARLGIKPHIQRLLDQGILVPCQSPWNTPLLPVKKPGTNDYRPVQDLREVNKRVEDIHPTVPNPYNLLSGLPPSHQWYTVLDLKDAFFCLRLHPTSQPLFAFEWRDPEMGISGQLTWTRLPQGFKNSPTLFNEALHRDLADFRIQHPDLILLQYVDDLLLAATSEQDCQRGTRALLQTLGNLGYRASAKKAQICQKQVKYLGYLLKEGQRWLTEARKETVMGQPTPKTPRQLREFLGKAGFCRLFIPGFAEMAAPLYPLTKPGTLFNWGPDQQKAYQEIKQALLTAPALGLPDLTKPFELFVDEKQGYAKGVLTQKLGPWRRPVAYLSKKLDPVAAGWPPCLRMVAAIAVLTKDAGKLTMGQPLVILAPHAVEALVKQPPDRWLSNARMTHYQAMLLDTDRVQFGPVVALNPATLLPLPEKEAPHDCLEILAETHGTRPDLTDQPIPDADYTWYTDGSSFLQEGQRRAGAAVTTETEVIWARALPAGTSAQRAELIALTQALKMAEGKKLNVYTDSRYAFATAHVHGEIYRRRGWLTSEGREIKNKNEILALLKALFLPKRLSIIHCPGHQKGNSAEARGNRMADQAAREAAMKAVLETSTLLAGKRTADGSEFEKRTADGSEFESPKKKAKVE

SEQ ID NO: 6264 - protein, 2094 aa, synthetic construct
MPAAKRVKLDGGDKKYSIGLDIGTNSVGWAVITDEYKVPSKKFKVLGNTDRHSIKKNLIGALLFDSGETAEATRLKRTARRRYTRRKNRICYLQEIFSNEMAKVDDSFFHRLEESFLVEEDKKHERHPIFGNIVDEVAYHEKYPTIYHLRKKLVDSTDKADLRLIYLALAHMIKFRGHFLIEGDLNPDNSDVDKLFIQLVQTYNQLFEENPINASGVDAKAILSARLSKSRRLENLIAQLPGEKKNGLFGNLIALSLGLTPNFKSNFDLAEDAKLQLSKDTYDDDLDNLLAQIGDQYADLFLAAKNLSDAILLSDILRVNTEITKAPLSASMIKRYDEHHQDLTLLKALVRQQLPEKYKEIFFDQSKNGYAGYIDGGASQEEFYKFIKPILEKMDGTEELLVKLNREDLLRKQRTFDNGSIPHQIHLGELHAILRRQEDFYPFLKDNREKIEKILTFRIPYYVGPLARGNSRFAWMTRKSEETITPWNFEEVVDKGASAQSFIERMTNFDKNLPNEKVLPKHSLLYEYFTVYNELTKVKYVTEGMRKPAFLSGEQKKAIVDLLFKTNRKVTVKQLKEDYFKKIECFDSVEISGVEDRFNASLGTYHDLLKIIKDKDFLDNEENEDILEDIVLTLTLFEDREMIEERLKTYAHLFDDKVMKQLKRRRYTGWGRLSRKLINGIRDKQSGKTILDFLKSDGFANRNFMQLIHDDSLTFKEDIQKAQVSGQGDSLHEHIANLAGSPAIKKGILQTVKVVDELVKVMGRHKPENIVIEMARENQTTQKGQKNSRERMKRIEEGIKELGSQILKEHPVENTQLQNEKLYLYYLQNGRDMYVDQELDINRLSDYDVDHIVPQSFLKDDSIDNKVLTRSDKARGKSDNVPSEEVVKKMKNYWRQLLNAKLITQRKFDNLTKAERGGLSELDKAGFIKRQLVETRQITKHVAQILDSRMNTKYDENDKLIREVKVITLKSKLVSDFRKDFQFYKVREINNYHHAHDAYLNAVVGTALIKKYPKLESEFVYGDYKVYDVRKMIAKSEQEIGKATAKYFFYSNIMNFFKTEITLANGEIRKRPLIETNGETGEIVWDKGRDFATVRKVLSMPQVNIVKKTEVQTGGFSKESILPKRNSDKLIARKKDWDPKKYGGFDSPTVAYSVLVVAKVEKGKSKKLKSVKELLGITIMERSSFEKNPIDFLEAKGYKEVKKDLIIKLPKYSLFELENGRKRMLASAGELQKGNELALPSKYVNFLYLASHYEKLKGSPEDNEQKQLFVEQHKHYLDEIIEQISEFSKRVILADANLDKVLSAYNKHRDKPIREQAENIIHLFTLTNLGAPAAFKYFDTTIDRKRYTSTKEVLDATLIHQSITGLYETRIDLSQLGGDGGGGGGGGGGGTAPLEEEYRLFLEAPIQNVTLLEQWKREIPKVWAEINPPGLASTQAPIHVQLLSTALPVRVRQYPITLEAKRSLRETIRKFRAAGILRPVHSPWNTPLLPVRKSGTSEYRMVQDLREVNKRVETIHPTVPNPYTLLSLLPPDRIWYSVLDLKDAFFCIPLAPESQLIFAFEWADAEEGESGQLTWTRLPQGFKNSPTLFNEALNRDLQGFRLDHPSVSLLQYVDDLLIAADTQAACLSATRDLLMTLAELGYRVSGKKAQLCQEEVTYLGFKIHKGSRSLSNSRTQAILQIPVPKTKRQVREFLGTIGYCRLWIPGFAELAQPLYAATRPGNDPLVWGEKEEEAFQSLKLALTQPPALALPSLDKPFQLFVEETSGAAKGVLTQALGPWKRPVAYLSKRLDPVAAGWPRCLRAIAAAALLTREASKLTFGQDIEITSSHNLESLLRSPPDKWLTNARITQYQVLLLDPPRVRFKQTAALNPATLLPETDDTLPIHHCLDTLDSLTSTRPDLTDQPLAQAEATLFTDGSSYIRDGKRYAGAAVVTLDSVIWAEPLPIGTSAQKAELIALTKALEWSKDKSVNIYTDSRYAFATLHVHGMIYRERGWLTAGGKAIKNAPEILALLTAVWLPKRVAVMHCKGHQKDDAPTSTGNRRADEVAREVAIRPLSTQATISAGKRTADGSEFEKRTADGSEFESPKKKAKVE

SEQ ID NO: 6265 - protein, 2094 aa, synthetic construct
MPAAKRVKLDGGDKKYSIGLDIGTNSVGWAVITDEYKVPSKKFKVLGNTDRHSIKKNLIGALLFDSGETAEATRLKRTARRRYTRRKNRICYLQEIFSNEMAKVDDSFFHRLEESFLVEEDKKHERHPIFGNIVDEVAYHEKYPTIYHLRKKLVDSTDKADLRLIYLALAHMIKFRGHFLIEGDLNPDNSDVDKLFIQLVQTYNQLFEENPINASGVDAKAILSARLSKSRRLENLIAQLPGEKKNGLFGNLIALSLGLTPNFKSNFDLAEDAKLQLSKDTYDDDLDNLLAQIGDQYADLFLAAKNLSDAILLSDILRVNTEITKAPLSASMIKRYDEHHQDLTLLKALVRQQLPEKYKEIFFDQSKNGYAGYIDGGASQEEFYKFIKPILEKMDGTEELLVKLNREDLLRKQRTFDNGSIPHQIHLGELHAILRRQEDFYPFLKDNREKIEKILTFRIPYYVGPLARGNSRFAWMTRKSEETITPWNFEEVVDKGASAQSFIERMTNFDKNLPNEKVLPKHSLLYEYFTVYNELTKVKYVTEGMRKPAFLSGEQKKAIVDLLFKTNRKVTVKQLKEDYFKKIECFDSVEISGVEDRFNASLGTYHDLLKIIKDKDFLDNEENEDILEDIVLTLTLFEDREMIEERLKTYAHLFDDKVMKQLKRRRYTGWGRLSRKLINGIRDKQSGKTILDFLKSDGFANRNFMQLIHDDSLTFKEDIQKAQVSGQGDSLHEHIANLAGSPAIKKGILQTVKVVDELVKVMGRHKPENIVIEMARENQTTQKGQKNSRERMKRIEEGIKELGSQILKEHPVENTQLQNEKLYLYYLQNGRDMYVDQELDINRLSDYDVDHIVPQSFLKDDSIDNKVLTRSDKARGKSDNVPSEEVVKKMKNYWRQLLNAKLITQRKFDNLTKAERGGLSELDKAGFIKRQLVETRQITKHVAQILDSRMNTKYDENDKLIREVKVITLKSKLVSDFRKDFQFYKVREINNYHHAHDAYLNAVVGTALIKKYPKLESEFVYGDYKVYDVRKMIAKSEQEIGKATAKYFFYSNIMNFFKTEITLANGEIRKRPLIETNGETGEIVWDKGRDFATVRKVLSMPQVNIVKKTEVQTGGFSKESILPKRNSDKLIARKKDWDPKKYGGFDSPTVAYSVLVVAKVEKGKSKKLKSVKELLGITIMERSSFEKNPIDFLEAKGYKEVKKDLIIKLPKYSLFELENGRKRMLASAGELQKGNELALPSKYVNFLYLASHYEKLKGSPEDNEQKQLFVEQHKHYLDEIIEQISEFSKRVILADANLDKVLSAYNKHRDKPIREQAENIIHLFTLTNLGAPAAFKYFDTTIDRKRYTSTKEVLDATLIHQSITGLYETRIDLSQLGGDGGGGGGGGGGGTAPLEEEYRLFLEAPIQNVTLLEQWKREIPKVWAEINPPGLASTQAPIHVQLLSTALPVRVRQYPITLEAKRSLRETIRKFRAAGILRPVHSPWNTPLLPVRKSGTSEYRMVQDLREVNKRVETIHPTVPNPYTLLSLLPPDRIWYSVLDLKDAFFCIPLAPESQLIFAFEWADAEEGESGQLTWTRLPQGFKNSPTLFNEALNRDLQGFRLDHPSVSLLQYVDDLLIAADTQAACLSATRDLLMTLAELGYRVSGKKAQLCQEEVTYLGFKIHKGSRSLSNSRTQAILQIPVPKTKRQVREFLGKIGYCRLFIPGFAELAQPLYAATRPGNDPLVWGEKEEEAFQSLKLALTQPPALALPSLDKPFQLFVEETSGAAKGVLTQALGPWKRPVAYLSKRLDPVAAGWPRCLRAIAAAALLTREASKLTFGQDIEITSSHNLESLLRSPPDKWLTNARITQYQVLLLDPPRVRFKQTAALNPATLLPETDDTLPIHHCLDTLDSLTSTRPDLTDQPLAQAEATLFTDGSSYIRDGKRYAGAAVVTLDSVIWAEPLPIGTSAQKAELIALTKALEWSKDKSVNIYTDSRYAFATLHVHGMIYRERGWLTAGGKAIKNAPEILALLTAVWLPKRVAVMHCKGHQKDDAPTSTGNRRADEVAREVAIRPLSTQATISAGKRTADGSEFEKRTADGSEFESPKKKAKVE

SEQ ID NO: 6266 - protein, 2098 aa, synthetic construct
MPAAKRVKLDGGDKKYSIGLDIGTNSVGWAVITDEYKVPSKKFKVLGNTDRHSIKKNLIGALLFDSGETAEATRLKRTARRRYTRRKNRICYLQEIFSNEMAKVDDSFFHRLEESFLVEEDKKHERHPIFGNIVDEVAYHEKYPTIYHLRKKLVDSTDKADLRLIYLALAHMIKFRGHFLIEGDLNPDNSDVDKLFIQLVQTYNQLFEENPINASGVDAKAILSARLSKSRRLENLIAQLPGEKKNGLFGNLIALSLGLTPNFKSNFDLAEDAKLQLSKDTYDDDLDNLLAQIGDQYADLFLAAKNLSDAILLSDILRVNTEITKAPLSASMIKRYDEHHQDLTLLKALVRQQLPEKYKEIFFDQSKNGYAGYIDGGASQEEFYKFIKPILEKMDGTEELLVKLNREDLLRKQRTFDNGSIPHQIHLGELHAILRRQEDFYPFLKDNREKIEKILTFRIPYYVGPLARGNSRFAWMTRKSEETITPWNFEEVVDKGASAQSFIERMTNFDKNLPNEKVLPKHSLLYEYFTVYNELTKVKYVTEGMRKPAFLSGEQKKAIVDLLFKTNRKVTVKQLKEDYFKKIECFDSVEISGVEDRFNASLGTYHDLLKIIKDKDFLDNEENEDILEDIVLTLTLFEDREMIEERLKTYAHLFDDKVMKQLKRRRYTGWGRLSRKLINGIRDKQSGKTILDFLKSDGFANRNFMQLIHDDSLTFKEDIQKAQVSGQGDSLHEHIANLAGSPAIKKGILQTVKVVDELVKVMGRHKPENIVIEMARENQTTQKGQKNSRERMKRIEEGIKELGSQILKEHPVENTQLQNEKLYLYYLQNGRDMYVDQELDINRLSDYDVDHIVPQSFLKDDSIDNKVLTRSDKARGKSDNVPSEEVVKKMKNYWRQLLNAKLITQRKFDNLTKAERGGLSELDKAGFIKRQLVETRQITKHVAQILDSRMNTKYDENDKLIREVKVITLKSKLVSDFRKDFQFYKVREINNYHHAHDAYLNAVVGTALIKKYPKLESEFVYGDYKVYDVRKMIAKSEQEIGKATAKYFFYSNIMNFFKTEITLANGEIRKRPLIETNGETGEIVWDKGRDFATVRKVLSMPQVNIVKKTEVQTGGFSKESILPKRNSDKLIARKKDWDPKKYGGFDSPTVAYSVLVVAKVEKGKSKKLKSVKELLGITIMERSSFEKNPIDFLEAKGYKEVKKDLIIKLPKYSLFELENGRKRMLASAGELQKGNELALPSKYVNFLYLASHYEKLKGSPEDNEQKQLFVEQHKHYLDEIIEQISEFSKRVILADANLDKVLSAYNKHRDKPIREQAENIIHLFTLTNLGAPAAFKYFDTTIDRKRYTSTKEVLDATLIHQSITGLYETRIDLSQLGGDGGGGGGGGGGGTVSLQDEHRLFDIPVTTSLPDVWLQDFPQAWAETGGLGRAKCQAPIIIDLKPTAVPVSIKQYPMSLEAHMGIRQHIIKFLELGVLRPCRSPWNTPLLPVKKPGTQDYRPVQDLREINKRTVDIHPTVPNPYNLLSTLKPDYSWYTVLDLKDAFFCLPLAPQSQELFAFEWKDPERGISGQLTWTRLPQGFKNSPTLFNEALHRDLTDFRTQHPEVTLLQYVDDLLLAAPTKKACTQGTRHLLQELGEKGYRASAKKAQICQTKVTYLGYILSEGKRWLTPGRIETVARIPPPRNPREVREFLGKAGFCRLFIPGFAELAAPLYALTKPSTPFTWQTEHQLAFEALKKALLSAPALGLPDTSKPFTLFLDERQGIAKGVLTQKLGPWKRPVAYLSKKLDPVAAGWPPCLRIMAATAMLVKDSAKLTLGQPLTVITPHTLEAIVRQPPDRWITNARLTHYQALLLDTDRVQFGPPVTLNPATLLPVPENQPSPHDCRQVLAETHGTREDLKDQELPDADHTWYTDGSSYLDSGTRRAGAAVVDGHNTIWAQSLPPGTSAQKAELIALTKALELSKGKKANIYTDSRYAFATAHTHGSIYERRGWLTSEGKEIKNKAEIIALLKALFLPQEVAIIHCPGHQKGQDPVAVGNRQADRVARQAAMAEVLTLATEPDNTSHITAGKRTADGSEFEKRTADGSEFESPKKKAKVE

SEQ ID NO: 6267 - protein, 2091 aa, synthetic construct
MPAAKRVKLDGGDKKYSIGLDIGTNSVGWAVITDEYKVPSKKFKVLGNTDRHSIKKNLIGALLFDSGETAEATRLKRTARRRYTRRKNRICYLQEIFSNEMAKVDDSFFHRLEESFLVEEDKKHERHPIFGNIVDEVAYHEKYPTIYHLRKKLVDSTDKADLRLIYLALAHMIKFRGHFLIEGDLNPDNSDVDKLFIQLVQTYNQLFEENPINASGVDAKAILSARLSKSRRLENLIAQLPGEKKNGLFGNLIALSLGLTPNFKSNFDLAEDAKLQLSKDTYDDDLDNLLAQIGDQYADLFLAAKNLSDAILLSDILRVNTEITKAPLSASMIKRYDEHHQDLTLLKALVRQQLPEKYKEIFFDQSKNGYAGYIDGGASQEEFYKFIKPILEKMDGTEELLVKLNREDLLRKQRTFDNGSIPHQIHLGELHAILRRQEDFYPFLKDNREKIEKILTFRIPYYVGPLARGNSRFAWMTRKSEETITPWNFEEVVDKGASAQSFIERMTNFDKNLPNEKVLPKHSLLYEYFTVYNELTKVKYVTEGMRKPAFLSGEQKKAIVDLLFKTNRKVTVKQLKEDYFKKIECFDSVEISGVEDRFNASLGTYHDLLKIIKDKDFLDNEENEDILEDIVLTLTLFEDREMIEERLKTYAHLFDDKVMKQLKRRRYTGWGRLSRKLINGIRDKQSGKTILDFLKSDGFANRNFMQLIHDDSLTFKEDIQKAQVSGQGDSLHEHIANLAGSPAIKKGILQTVKVVDELVKVMGRHKPENIVIEMARENQTTQKGQKNSRERMKRIEEGIKELGSQILKEHPVENTQLQNEKLYLYYLQNGRDMYVDQELDINRLSDYDVDHIVPQSFLKDDSIDNKVLTRSDKARGKSDNVPSEEVVKKMKNYWRQLLNAKLITQRKFDNLTKAERGGLSELDKAGFIKRQLVETRQITKHVAQILDSRMNTKYDENDKLIREVKVITLKSKLVSDFRKDFQFYKVREINNYHHAHDAYLNAVVGTALIKKYPKLESEFVYGDYKVYDVRKMIAKSEQEIGKATAKYFFYSNIMNFFKTEITLANGEIRKRPLIETNGETGEIVWDKGRDFATVRKVLSMPQVNIVKKTEVQTGGFSKESILPKRNSDKLIARKKDWDPKKYGGFDSPTVAYSVLVVAKVEKGKSKKLKSVKELLGITIMERSSFEKNPIDFLEAKGYKEVKKDLIIKLPKYSLFELENGRKRMLASAGELQKGNELALPSKYVNFLYLASHYEKLKGSPEDNEQKQLFVEQHKHYLDEIIEQISEFSKRVILADANLDKVLSAYNKHRDKPIREQAENIIHLFTLTNLGAPAAFKYFDTTIDRKRYTSTKEVLDATLIHQSITGLYETRIDLSQLGGDGGGGGGGGGGGTLQLEEEYRLFEPESTQKQEMDIWLKNFPQAWAETGGMGTAHCQAPVLIQLKATATPISIRQYPMPHEAYQGIKPHIRRMLDQGILKPCQSPWNTPLLPVKKPGTEDYRPVQDLREVNKRVEDIHPTVPNPYNLLSTLPPSHPWYTVLDLKDAFFCLRLHSESQLLFAFEWRDPEIGLSGQLTWTRLPQGFKNSPTLFNEALHSDLADFRVRYPALVLLQYVDDLLLAAATRTECLEGTKALLETLGNKGYRASAKKAQICLQEVTYLGYSLKDGQRWLTKARKEAILSIPVPKNSRQVREFLGKAGYCRLFIPGFAELAAPLYPLTRPGTLFQWGTEQQLAFEDIKKALLSSPALGLPDITKPFELFIDENSGFAKGVLVQKLGPWKRPVAYLSKKLDTVASGWPPCLRMVAAIAILVKDAGKLTLGQPLTILTSHPVEALVRQPPNKWLSNARMTHYQAMLLDAERVHFGPTVSLNPATLLPLPSGGNHHDCLQILAETHGTRPDLTDQPLPDADLTWYTDGSSFIRNGEREAGAAVTTESEVIWAAPLPPGTSAQRAELIALTQALKMAEGKKLTVYTDSRYAFATTHVHGEIYRRRGWLTSEGKEIKNKNEILALLEALFLPKRLSIIHCPGHQKGDSPQAKGNRLADDTAKKAATETHSSLTVLPAGKRTADGSEFEKRTADGSEFESPKKKAKVE

SEQ ID NO: 6268 - protein, 2123 aa, synthetic construct
MPAAKRVKLDGGDKKYSIGLDIGTNSVGWAVITDEYKVPSKKFKVLGNTDRHSIKKNLIGALLFDSGETAEATRLKRTARRRYTRRKNRICYLQEIFSNEMAKVDDSFFHRLEESFLVEEDKKHERHPIFGNIVDEVAYHEKYPTIYHLRKKLVDSTDKADLRLIYLALAHMIKFRGHFLIEGDLNPDNSDVDKLFIQLVQTYNQLFEENPINASGVDAKAILSARLSKSRRLENLIAQLPGEKKNGLFGNLIALSLGLTPNFKSNFDLAEDAKLQLSKDTYDDDLDNLLAQIGDQYADLFLAAKNLSDAILLSDILRVNTEITKAPLSASMIKRYDEHHQDLTLLKALVRQQLPEKYKEIFFDQSKNGYAGYIDGGASQEEFYKFIKPILEKMDGTEELLVKLNREDLLRKQRTFDNGSIPHQIHLGELHAILRRQEDFYPFLKDNREKIEKILTFRIPYYVGPLARGNSRFAWMTRKSEETITPWNFEEVVDKGASAQSFIERMTNFDKNLPNEKVLPKHSLLYEYFTVYNELTKVKYVTEGMRKPAFLSGEQKKAIVDLLFKTNRKVTVKQLKEDYFKKIECFDSVEISGVEDRFNASLGTYHDLLKIIKDKDFLDNEENEDILEDIVLTLTLFEDREMIEERLKTYAHLFDDKVMKQLKRRRYTGWGRLSRKLINGIRDKQSGKTILDFLKSDGFANRNFMQLIHDDSLTFKEDIQKAQVSGQGDSLHEHIANLAGSPAIKKGILQTVKVVDELVKVMGRHKPENIVIEMARENQTTQKGQKNSRERMKRIEEGIKELGSQILKEHPVENTQLQNEKLYLYYLQNGRDMYVDQELDINRLSDYDVDHIVPQSFLKDDSIDNKVLTRSDKARGKSDNVPSEEVVKKMKNYWRQLLNAKLITQRKFDNLTKAERGGLSELDKAGFIKRQLVETRQITKHVAQILDSRMNTKYDENDKLIREVKVITLKSKLVSDFRKDFQFYKVREINNYHHAHDAYLNAVVGTALIKKYPKLESEFVYGDYKVYDVRKMIAKSEQEIGKATAKYFFYSNIMNFFKTEITLANGEIRKRPLIETNGETGEIVWDKGRDFATVRKVLSMPQVNIVKKTEVQTGGFSKESILPKRNSDKLIARKKDWDPKKYGGFDSPTVAYSVLVVAKVEKGKSKKLKSVKELLGITIMERSSFEKNPIDFLEAKGYKEVKKDLIIKLPKYSLFELENGRKRMLASAGELQKGNELALPSKYVNFLYLASHYEKLKGSPEDNEQKQLFVEQHKHYLDEIIEQISEFSKRVILADANLDKVLSAYNKHRDKPIREQAENIIHLFTLTNLGAPAAFKYFDTTIDRKRYTSTKEVLDATLIHQSITGLYETRIDLSQLGGDGGGGGGGGGGGLLGRDLLTKLKAQIQFSTEGPQVTWEDRPAMCLVLNLEEEYRLHEKPVPPSIDPSWLQLFPMVWAEKAGMGLANQVPPVVVELKSDASPVAVRQYPMSKEAREGIRPHIQRFLDLGILVPCQSPWNTPLLPVKKPGTNDYRPVQDLREVNKRVQDIHPTVPNPYNLLSSLPPSHTWYSVLDLKDAFFCLKLHPNSQPLFAFEWRDPEKGNTGQLTWTRLPQGFKNSPTLFNEALHRDLASFRALNPQVVMLQYVDDLLVAAPTYRDCKEGTRRLLQELSKLGYRVSAKKAQLCREEVTYLGYLLKGGKRWLTPARKATVMKIPTPTTPRQVREFLGTAGFCRLWIPGFASLAAPLYPLTRPKVPFTWTEAHQEAFGRIKEALLSAPALALPDLTKPFALYVDEKEGVARGVLTQTLGPWRRPVAYLSKKLDPVASGWPTCLKAIAAVALLLKDADKLTLGQNVLVIAPHNLESIVRQPPDRWMTNARMTHYQSLLLNERVSFAPPAILNPATLLPVESDDTPIHICSEILAEETGTRPDLRDQPLPGVPAWYTDGSSFIMDGRRQAGAAIVDNKRTVWASNLPEGTSAQKAELIALTQALRLAEGKSINIYTDSRYAFATAHVHGAIYKQRGWLTSAGKDIKNKEEILALLEAIHLPKRVAIIHCPGHQRGTDPVATGNRKADEAAKQAAQSTRILTETTKNAGKRTADGSEFEKRTADGSEFESPKKKAKVE

SEQ ID NO: 6269 - protein, 2123 aa, synthetic construct
MPAAKRVKLDGGDKKYSIGLDIGTNSVGWAVITDEYKVPSKKFKVLGNTDRHSIKKNLIGALLFDSGETAEATRLKRTARRRYTRRKNRICYLQEIFSNEMAKVDDSFFHRLEESFLVEEDKKHERHPIFGNIVDEVAYHEKYPTIYHLRKKLVDSTDKADLRLIYLALAHMIKFRGHFLIEGDLNPDNSDVDKLFIQLVQTYNQLFEENPINASGVDAKAILSARLSKSRRLENLIAQLPGEKKNGLFGNLIALSLGLTPNFKSNFDLAEDAKLQLSKDTYDDDLDNLLAQIGDQYADLFLAAKNLSDAILLSDILRVNTEITKAPLSASMIKRYDEHHQDLTLLKALVRQQLPEKYKEIFFDQSKNGYAGYIDGGASQEEFYKFIKPILEKMDGTEELLVKLNREDLLRKQRTFDNGSIPHQIHLGELHAILRRQEDFYPFLKDNREKIEKILTFRIPYYVGPLARGNSRFAWMTRKSEETITPWNFEEVVDKGASAQSFIERMTNFDKNLPNEKVLPKHSLLYEYFTVYNELTKVKYVTEGMRKPAFLSGEQKKAIVDLLFKTNRKVTVKQLKEDYFKKIECFDSVEISGVEDRFNASLGTYHDLLKIIKDKDFLDNEENEDILEDIVLTLTLFEDREMIEERLKTYAHLFDDKVMKQLKRRRYTGWGRLSRKLINGIRDKQSGKTILDFLKSDGFANRNFMQLIHDDSLTFKEDIQKAQVSGQGDSLHEHIANLAGSPAIKKGILQTVKVVDELVKVMGRHKPENIVIEMARENQTTQKGQKNSRERMKRIEEGIKELGSQILKEHPVENTQLQNEKLYLYYLQNGRDMYVDQELDINRLSDYDVDHIVPQSFLKDDSIDNKVLTRSDKARGKSDNVPSEEVVKKMKNYWRQLLNAKLITQRKFDNLTKAERGGLSELDKAGFIKRQLVETRQITKHVAQILDSRMNTKYDENDKLIREVKVITLKSKLVSDFRKDFQFYKVREINNYHHAHDAYLNAVVGTALIKKYPKLESEFVYGDYKVYDVRKMIAKSEQEIGKATAKYFFYSNIMNFFKTEITLANGEIRKRPLIETNGETGEIVWDKGRDFATVRKVLSMPQVNIVKKTEVQTGGFSKESILPKRNSDKLIARKKDWDPKKYGGFDSPTVAYSVLVVAKVEKGKSKKLKSVKELLGITIMERSSFEKNPIDFLEAKGYKEVKKDLIIKLPKYSLFELENGRKRMLASAGELQKGNELALPSKYVNFLYLASHYEKLKGSPEDNEQKQLFVEQHKHYLDEIIEQISEFSKRVILADANLDKVLSAYNKHRDKPIREQAENIIHLFTLTNLGAPAAFKYFDTTIDRKRYTSTKEVLDATLIHQSITGLYETRIDLSQLGGDGGGGGGGGGGGLLGRDLLTKLKAQIQFSTEGPQVTWEDRPAMCLVLNLEEEYRLHEKPVPPSIDPSWLQLFPMVWAEKAGMGLANQVPPVVVELKSDASPVAVRQYPMSKEAREGIRPHIQRFLDLGILVPCQSPWNTPLLPVKKPGTNDYRPVQDLREVNKRVQDIHPTVPNPYNLLSSLPPSHTWYSVLDLKDAFFCLKLHPNSQPLFAFEWRDPEKGNTGQLTWTRLPQGFKNSPTLFNEALHRDLASFRALNPQVVMLQYVDDLLVAAPTYRDCKEGTRRLLQELSKLGYRVSAKKAQLCREEVTYLGYLLKGGKRWLTPARKATVMKIPTPTTPRQVREFLGKAGFCRLFIPGFASLAAPLYPLTRPKVPFTWTEAHQEAFGRIKEALLSAPALALPDLTKPFALYVDEKEGVARGVLTQTLGPWRRPVAYLSKKLDPVASGWPTCLKAIAAVALLLKDADKLTLGQNVLVIAPHNLESIVRQPPDRWMTNARMTHYQSLLLNERVSFAPPAILNPATLLPVESDDTPIHICSEILAEETGTRPDLRDQPLPGVPAWYTDGSSFIMDGRRQAGAAIVDNKRTVWASNLPEGTSAQKAELIALTQALRLAEGKSINIYTDSRYAFATAHVHGAIYKQRGWLTSAGKDIKNKEEILALLEAIHLPKRVAIIHCPGHQRGTDPVATGNRKADEAAKQAAQSTRILTETTKNAGKRTADGSEFEKRTADGSEFESPKKKAKVE

SEQ ID NO: 6270 - protein, 2092 aa, synthetic construct
MPAAKRVKLDGGDKKYSIGLDIGTNSVGWAVITDEYKVPSKKFKVLGNTDRHSIKKNLIGALLFDSGETAEATRLKRTARRRYTRRKNRICYLQEIFSNEMAKVDDSFFHRLEESFLVEEDKKHERHPIFGNIVDEVAYHEKYPTIYHLRKKLVDSTDKADLRLIYLALAHMIKFRGHFLIEGDLNPDNSDVDKLFIQLVQTYNQLFEENPINASGVDAKAILSARLSKSRRLENLIAQLPGEKKNGLFGNLIALSLGLTPNFKSNFDLAEDAKLQLSKDTYDDDLDNLLAQIGDQYADLFLAAKNLSDAILLSDILRVNTEITKAPLSASMIKRYDEHHQDLTLLKALVRQQLPEKYKEIFFDQSKNGYAGYIDGGASQEEFYKFIKPILEKMDGTEELLVKLNREDLLRKQRTFDNGSIPHQIHLGELHAILRRQEDFYPFLKDNREKIEKILTFRIPYYVGPLARGNSRFAWMTRKSEETITPWNFEEVVDKGASAQSFIERMTNFDKNLPNEKVLPKHSLLYEYFTVYNELTKVKYVTEGMRKPAFLSGEQKKAIVDLLFKTNRKVTVKQLKEDYFKKIECFDSVEISGVEDRFNASLGTYHDLLKIIKDKDFLDNEENEDILEDIVLTLTLFEDREMIEERLKTYAHLFDDKVMKQLKRRRYTGWGRLSRKLINGIRDKQSGKTILDFLKSDGFANRNFMQLIHDDSLTFKEDIQKAQVSGQGDSLHEHIANLAGSPAIKKGILQTVKVVDELVKVMGRHKPENIVIEMARENQTTQKGQKNSRERMKRIEEGIKELGSQILKEHPVENTQLQNEKLYLYYLQNGRDMYVDQELDINRLSDYDVDHIVPQSFLKDDSIDNKVLTRSDKARGKSDNVPSEEVVKKMKNYWRQLLNAKLITQRKFDNLTKAERGGLSELDKAGFIKRQLVETRQITKHVAQILDSRMNTKYDENDKLIREVKVITLKSKLVSDFRKDFQFYKVREINNYHHAHDAYLNAVVGTALIKKYPKLESEFVYGDYKVYDVRKMIAKSEQEIGKATAKYFFYSNIMNFFKTEITLANGEIRKRPLIETNGETGEIVWDKGRDFATVRKVLSMPQVNIVKKTEVQTGGFSKESILPKRNSDKLIARKKDWDPKKYGGFDSPTVAYSVLVVAKVEKGKSKKLKSVKELLGITIMERSSFEKNPIDFLEAKGYKEVKKDLIIKLPKYSLFELENGRKRMLASAGELQKGNELALPSKYVNFLYLASHYEKLKGSPEDNEQKQLFVEQHKHYLDEIIEQISEFSKRVILADANLDKVLSAYNKHRDKPIREQAENIIHLFTLTNLGAPAAFKYFDTTIDRKRYTSTKEVLDATLIHQSITGLYETRIDLSQLGGDGGGGGGGGGGGTLNLEDEYRLYETSAEPEVSPGSTWLSDFPQAWAETGGMGLAVRQAPLIIPLKATSTPVSIKQYPMSQEAKLGIKPHIQRLLDQGILVPCQSPWNTPLLPVKKPGTNDYRPVQDLREVNKRVEDIHPTVPNPYNLLSGLPPSHRWYTVLDLKDAFFCLRLHPTSQPLFAFEWRDPGMGISGQLTWTRLPQGFKNSPTLFNEALHRDLADFRIQHPDLILLQYVDDILLAATSELDCQQGTRALLLTLGNLGYRASAKKAQLCQKQVKYLGYLLKEGQRWLTEARKETVMGQPTPKTPRQLREFLGTAGFCRLWIPGFAEMAAPLYPLTKPGTLFNWGPDQQKAYQEIKQALLTAPALGLPDLTKPFELFVDEKQGYAKGVLTQKLGPWRRPVAYLSKKLDPVAAGWPPCLRMVAAIAVLRKDAGKLTMGQPLVILAPHAVEALVKQPPDRWLSNARMTHYQAMLLDTDRVQFGPVVALNPATLLPLPEEGAPHDCLEILAETHGTRPDLTDQPIPDADHTWYTDGSSFLQEGQRKAGAAVTTETEVIWARALPAGTSAQRAELIALTQALKMAEGKRLNVYTDSRYAFATAHIHGEIYRRRGWLTSEGREIKNKSEILALLKALFLPKRLSIIHCLGHQKGDSAEARGNRLADQAAREAAIKTPPDTSTLLAGKRTADGSEFEKRTADGSEFESPKKKAKVE

SEQ ID NO: 6271 - protein, 2092 aa, synthetic construct
MPAAKRVKLDGGDKKYSIGLDIGTNSVGWAVITDEYKVPSKKFKVLGNTDRHSIKKNLIGALLFDSGETAEATRLKRTARRRYTRRKNRICYLQEIFSNEMAKVDDSFFHRLEESFLVEEDKKHERHPIFGNIVDEVAYHEKYPTIYHLRKKLVDSTDKADLRLIYLALAHMIKFRGHFLIEGDLNPDNSDVDKLFIQLVQTYNQLFEENPINASGVDAKAILSARLSKSRRLENLIAQLPGEKKNGLFGNLIALSLGLTPNFKSNFDLAEDAKLQLSKDTYDDDLDNLLAQIGDQYADLFLAAKNLSDAILLSDILRVNTEITKAPLSASMIKRYDEHHQDLTLLKALVRQQLPEKYKEIFFDQSKNGYAGYIDGGASQEEFYKFIKPILEKMDGTEELLVKLNREDLLRKQRTFDNGSIPHQIHLGELHAILRRQEDFYPFLKDNREKIEKILTFRIPYYVGPLARGNSRFAWMTRKSEETITPWNFEEVVDKGASAQSFIERMTNFDKNLPNEKVLPKHSLLYEYFTVYNELTKVKYVTEGMRKPAFLSGEQKKAIVDLLFKTNRKVTVKQLKEDYFKKIECFDSVEISGVEDRFNASLGTYHDLLKIIKDKDFLDNEENEDILEDIVLTLTLFEDREMIEERLKTYAHLFDDKVMKQLKRRRYTGWGRLSRKLINGIRDKQSGKTILDFLKSDGFANRNFMQLIHDDSLTFKEDIQKAQVSGQGDSLHEHIANLAGSPAIKKGILQTVKVVDELVKVMGRHKPENIVIEMARENQTTQKGQKNSRERMKRIEEGIKELGSQILKEHPVENTQLQNEKLYLYYLQNGRDMYVDQELDINRLSDYDVDHIVPQSFLKDDSIDNKVLTRSDKARGKSDNVPSEEVVKKMKNYWRQLLNAKLITQRKFDNLTKAERGGLSELDKAGFIKRQLVETRQITKHVAQILDSRMNTKYDENDKLIREVKVITLKSKLVSDFRKDFQFYKVREINNYHHAHDAYLNAVVGTALIKKYPKLESEFVYGDYKVYDVRKMIAKSEQEIGKATAKYFFYSNIMNFFKTEITLANGEIRKRPLIETNGETGEIVWDKGRDFATVRKVLSMPQVNIVKKTEVQTGGFSKESILPKRNSDKLIARKKDWDPKKYGGFDSPTVAYSVLVVAKVEKGKSKKLKSVKELLGITIMERSSFEKNPIDFLEAKGYKEVKKDLIIKLPKYSLFELENGRKRMLASAGELQKGNELALPSKYVNFLYLASHYEKLKGSPEDNEQKQLFVEQHKHYLDEIIEQISEFSKRVILADANLDKVLSAYNKHRDKPIREQAENIIHLFTLTNLGAPAAFKYFDTTIDRKRYTSTKEVLDATLIHQSITGLYETRIDLSQLGGDGGGGGGGGGGGTLNLEDEYRLYETSAEPEVSPGSTWLSDFPQAWAETGGMGLAVRQAPLIIPLKATSTPVSIKQYPMSQEAKLGIKPHIQRLLDQGILVPCQSPWNTPLLPVKKPGTNDYRPVQDLREVNKRVEDIHPTVPNPYNLLSGLPPSHRWYTVLDLKDAFFCLRLHPTSQPLFAFEWRDPGMGISGQLTWTRLPQGFKNSPTLFNEALHRDLADFRIQHPDLILLQYVDDILLAATSELDCQQGTRALLLTLGNLGYRASAKKAQLCQKQVKYLGYLLKEGQRWLTEARKETVMGQPTPKTPRQLREFLGKAGFCRLFIPGFAEMAAPLYPLTKPGTLFNWGPDQQKAYQEIKQALLTAPALGLPDLTKPFELFVDEKQGYAKGVLTQKLGPWRRPVAYLSKKLDPVAAGWPPCLRMVAAIAVLRKDAGKLTMGQPLVILAPHAVEALVKQPPDRWLSNARMTHYQAMLLDTDRVQFGPVVALNPATLLPLPEEGAPHDCLEILAETHGTRPDLTDQPIPDADHTWYTDGSSFLQEGQRKAGAAVTTETEVIWARALPAGTSAQRAELIALTQALKMAEGKRLNVYTDSRYAFATAHIHGEIYRRRGWLTSEGREIKNKSEILALLKALFLPKRLSIIHCLGHQKGDSAEARGNRLADQAAREAAIKTPPDTSTLLAGKRTADGSEFEKRTADGSEFESPKKKAKVE

SEQ ID NO: 6272 - protein, 2090 aa, synthetic construct
MPAAKRVKLDGGDKKYSIGLDIGTNSVGWAVITDEYKVPSKKFKVLGNTDRHSIKKNLIGALLFDSGETAEATRLKRTARRRYTRRKNRICYLQEIFSNEMAKVDDSFFHRLEESFLVEEDKKHERHPIFGNIVDEVAYHEKYPTIYHLRKKLVDSTDKADLRLIYLALAHMIKFRGHFLIEGDLNPDNSDVDKLFIQLVQTYNQLFEENPINASGVDAKAILSARLSKSRRLENLIAQLPGEKKNGLFGNLIALSLGLTPNFKSNFDLAEDAKLQLSKDTYDDDLDNLLAQIGDQYADLFLAAKNLSDAILLSDILRVNTEITKAPLSASMIKRYDEHHQDLTLLKALVRQQLPEKYKEIFFDQSKNGYAGYIDGGASQEEFYKFIKPILEKMDGTEELLVKLNREDLLRKQRTFDNGSIPHQIHLGELHAILRRQEDFYPFLKDNREKIEKILTFRIPYYVGPLARGNSRFAWMTRKSEETITPWNFEEVVDKGASAQSFIERMTNFDKNLPNEKVLPKHSLLYEYFTVYNELTKVKYVTEGMRKPAFLSGEQKKAIVDLLFKTNRKVTVKQLKEDYFKKIECFDSVEISGVEDRFNASLGTYHDLLKIIKDKDFLDNEENEDILEDIVLTLTLFEDREMIEERLKTYAHLFDDKVMKQLKRRRYTGWGRLSRKLINGIRDKQSGKTILDFLKSDGFANRNFMQLIHDDSLTFKEDIQKAQVSGQGDSLHEHIANLAGSPAIKKGILQTVKVVDELVKVMGRHKPENIVIEMARENQTTQKGQKNSRERMKRIEEGIKELGSQILKEHPVENTQLQNEKLYLYYLQNGRDMYVDQELDINRLSDYDVDHIVPQSFLKDDSIDNKVLTRSDKARGKSDNVPSEEVVKKMKNYWRQLLNAKLITQRKFDNLTKAERGGLSELDKAGFIKRQLVETRQITKHVAQILDSRMNTKYDENDKLIREVKVITLKSKLVSDFRKDFQFYKVREINNYHHAHDAYLNAVVGTALIKKYPKLESEFVYGDYKVYDVRKMIAKSEQEIGKATAKYFFYSNIMNFFKTEITLANGEIRKRPLIETNGETGEIVWDKGRDFATVRKVLSMPQVNIVKKTEVQTGGFSKESILPKRNSDKLIARKKDWDPKKYGGFDSPTVAYSVLVVAKVEKGKSKKLKSVKELLGITIMERSSFEKNPIDFLEAKGYKEVKKDLIIKLPKYSLFELENGRKRMLASAGELQKGNELALPSKYVNFLYLASHYEKLKGSPEDNEQKQLFVEQHKHYLDEIIEQISEFSKRVILADANLDKVLSAYNKHRDKPIREQAENIIHLFTLTNLGAPAAFKYFDTTIDRKRYTSTKEVLDATLIHQSITGLYETRIDLSQLGGDGGGGGGGGGGGVLNLEEEYRLHEKPVPSSIDPSWLQLFPTVWAERAGMGLANQVPPVVVELRSGASPVAVRQYPMSKEAREGIRPHIQRFLDLGVLVPCQSPWNTPLLPVKKPGTNDYRPVQDLREINKRVQDIHPTVPNPYNLLSSLPPSHTWYSVLDLKDAFFCLKLHPNSQPLFAFEWRDPEKGNTGQLTWTRLPQGFKNSPTLFNEALHRDLAPFRALNPQVVLLQYVDDLLVAAPTYRDCKEGTQKLLQELSKLGYRVSAKKAQLCQKEVTYLGYLLKEGKRWLTPARKATVMKIPPPTTPRQVREFLGKAGFCRLFIPGFASLAAPLYPLTKPSIPFIWTEEHQKAFDRIKEALLSAPALALPDLTKPFTLYVDERAGVARGVLTQTLGPWRRPVAYLSKKLDPVASGWPTCLKAVAAVALLLKDADKLTLGQNVTVIASHSLESIVRQPPDRWMTNARMTHYQSLLLNERVSFAPPAVLNPATLLPVESEATPVHRCSEILAEETGTRRDLKDQPLPGVPAWYTDGSSFIAEGKRRAGAAIVDGKRTVWASSLPEGTSAQKAELVALTQALRLAEGKDINIYTDSRYAFATAHIHGAIYKQRGWLTSAGKDIKNKEEILALLEAIHLPKRVAIIHCPGHQKGNDPVATGNRRADEAAKQAALSTRVLAETTKPAGKRTADGSEFEKRTADGSEFESPKKKAKVE

SEQ ID NO: 6273 - protein, 2092 aa, synthetic construct
MPAAKRVKLDGGDKKYSIGLDIGTNSVGWAVITDEYKVPSKKFKVLGNTDRHSIKKNLIGALLFDSGETAEATRLKRTARRRYTRRKNRICYLQEIFSNEMAKVDDSFFHRLEESFLVEEDKKHERHPIFGNIVDEVAYHEKYPTIYHLRKKLVDSTDKADLRLIYLALAHMIKFRGHFLIEGDLNPDNSDVDKLFIQLVQTYNQLFEENPINASGVDAKAILSARLSKSRRLENLIAQLPGEKKNGLFGNLIALSLGLTPNFKSNFDLAEDAKLQLSKDTYDDDLDNLLAQIGDQYADLFLAAKNLSDAILLSDILRVNTEITKAPLSASMIKRYDEHHQDLTLLKALVRQQLPEKYKEIFFDQSKNGYAGYIDGGASQEEFYKFIKPILEKMDGTEELLVKLNREDLLRKQRTFDNGSIPHQIHLGELHAILRRQEDFYPFLKDNREKIEKILTFRIPYYVGPLARGNSRFAWMTRKSEETITPWNFEEVVDKGASAQSFIERMTNFDKNLPNEKVLPKHSLLYEYFTVYNELTKVKYVTEGMRKPAFLSGEQKKAIVDLLFKTNRKVTVKQLKEDYFKKIECFDSVEISGVEDRFNASLGTYHDLLKIIKDKDFLDNEENEDILEDIVLTLTLFEDREMIEERLKTYAHLFDDKVMKQLKRRRYTGWGRLSRKLINGIRDKQSGKTILDFLKSDGFANRNFMQLIHDDSLTFKEDIQKAQVSGQGDSLHEHIANLAGSPAIKKGILQTVKVVDELVKVMGRHKPENIVIEMARENQTTQKGQKNSRERMKRIEEGIKELGSQILKEHPVENTQLQNEKLYLYYLQNGRDMYVDQELDINRLSDYDVDHIVPQSFLKDDSIDNKVLTRSDKARGKSDNVPSEEVVKKMKNYWRQLLNAKLITQRKFDNLTKAERGGLSELDKAGFIKRQLVETRQITKHVAQILDSRMNTKYDENDKLIREVKVITLKSKLVSDFRKDFQFYKVREINNYHHAHDAYLNAVVGTALIKKYPKLESEFVYGDYKVYDVRKMIAKSEQEIGKATAKYFFYSNIMNFFKTEITLANGEIRKRPLIETNGETGEIVWDKGRDFATVRKVLSMPQVNIVKKTEVQTGGFSKESILPKRNSDKLIARKKDWDPKKYGGFDSPTVAYSVLVVAKVEKGKSKKLKSVKELLGITIMERSSFEKNPIDFLEAKGYKEVKKDLIIKLPKYSLFELENGRKRMLASAGELQKGNELALPSKYVNFLYLASHYEKLKGSPEDNEQKQLFVEQHKHYLDEIIEQISEFSKRVILADANLDKVLSAYNKHRDKPIREQAENIIHLFTLTNLGAPAAFKYFDTTIDRKRYTSTKEVLDATLIHQSITGLYETRIDLSQLGGDGGGGGGGGGGGTLNIEDEYRLHETSKEPDVPLGSTWLSDFPQAWAETGGMGLAVRQAPLIIPLKATSTPVSIKQYPMSQEARLGIKPHIQRLLDQGILVPCQSPWNTPLLPVKKPGTNDYRPVQDLREVNKRVEDIHPTVPNPYNLLSGLPPSHQWYTVLDLKDAFFCLRLHPTSQPLFAFEWRDPEMGISGQLTWTRLPQGFKNSPTLFNEALHRDLADFRIQHPDLILLQYVDDLLLAATSEQDCQRGTRALLQTLGNLGYRASAKKAQICQKQVKYLGYLLKEGQRWLTEARKETVMGQPTPKTPRQLREFLGKAGFCRLFIPGFAEMAAPLYPLTKPGTLFNWGPDQQKAYQEIKQALLTAPALGLPDLTKPFELFVDEKQGYAKGVLTQKLGPWRRPVAYLSKKLDPVAAGWPPCLRMVAAIAVLTKDAGKLTMGQPLVILAPHAVEALVKQPPDRWLSNARMTHYQAMLLDTDRVQFGPVVALNPATLLPLPEKEAPHDCLEILAETHGTRPDLTDQPIPDADYTWYTDGSSFLQEGQRRAGAAVTTETEVIWARALPAGTSAQRAELIALTQALKMAEGKKLNVYTDSRYAFATAHVHGEIYRRRGWLTSEGREIKNKNEILALLKALFLPKRLSIIHCPGHQKGNSAEARGNRMADQAAREAAMKAVLETSTLLAGKRTADGSEFEKRTADGSEFESPKKKAKVE

SEQ ID NO: 6274 - protein, 2095 aa, synthetic construct
MPAAKRVKLDGGDKKYSIGLDIGTNSVGWAVITDEYKVPSKKFKVLGNTDRHSIKKNLIGALLFDSGETAEATRLKRTARRRYTRRKNRICYLQEIFSNEMAKVDDSFFHRLEESFLVEEDKKHERHPIFGNIVDEVAYHEKYPTIYHLRKKLVDSTDKADLRLIYLALAHMIKFRGHFLIEGDLNPDNSDVDKLFIQLVQTYNQLFEENPINASGVDAKAILSARLSKSRRLENLIAQLPGEKKNGLFGNLIALSLGLTPNFKSNFDLAEDAKLQLSKDTYDDDLDNLLAQIGDQYADLFLAAKNLSDAILLSDILRVNTEITKAPLSASMIKRYDEHHQDLTLLKALVRQQLPEKYKEIFFDQSKNGYAGYIDGGASQEEFYKFIKPILEKMDGTEELLVKLNREDLLRKQRTFDNGSIPHQIHLGELHAILRRQEDFYPFLKDNREKIEKILTFRIPYYVGPLARGNSRFAWMTRKSEETITPWNFEEVVDKGASAQSFIERMTNFDKNLPNEKVLPKHSLLYEYFTVYNELTKVKYVTEGMRKPAFLSGEQKKAIVDLLFKTNRKVTVKQLKEDYFKKIECFDSVEISGVEDRFNASLGTYHDLLKIIKDKDFLDNEENEDILEDIVLTLTLFEDREMIEERLKTYAHLFDDKVMKQLKRRRYTGWGRLSRKLINGIRDKQSGKTILDFLKSDGFANRNFMQLIHDDSLTFKEDIQKAQVSGQGDSLHEHIANLAGSPAIKKGILQTVKVVDELVKVMGRHKPENIVIEMARENQTTQKGQKNSRERMKRIEEGIKELGSQILKEHPVENTQLQNEKLYLYYLQNGRDMYVDQELDINRLSDYDVDHIVPQSFLKDDSIDNKVLTRSDKARGKSDNVPSEEVVKKMKNYWRQLLNAKLITQRKFDNLTKAERGGLSELDKAGFIKRQLVETRQITKHVAQILDSRMNTKYDENDKLIREVKVITLKSKLVSDFRKDFQFYKVREINNYHHAHDAYLNAVVGTALIKKYPKLESEFVYGDYKVYDVRKMIAKSEQEIGKATAKYFFYSNIMNFFKTEITLANGEIRKRPLIETNGETGEIVWDKGRDFATVRKVLSMPQVNIVKKTEVQTGGFSKESILPKRNSDKLIARKKDWDPKKYGGFDSPTVAYSVLVVAKVEKGKSKKLKSVKELLGITIMERSSFEKNPIDFLEAKGYKEVKKDLIIKLPKYSLFELENGRKRMLASAGELQKGNELALPSKYVNFLYLASHYEKLKGSPEDNEQKQLFVEQHKHYLDEIIEQISEFSKRVILADANLDKVLSAYNKHRDKPIREQAENIIHLFTLTNLGAPAAFKYFDTTIDRKRYTSTKEVLDATLIHQSITGLYETRIDLSQLGGDGGGGGGGGGGGGTAPLEEEYRLFLEAPIQNVTLLEQWKREIPKVWAEINPPGLASTQAPIHVQLLSTALPVRVRQYPITLEAKRSLRETIRKFRAAGILRPVHSPWNTPLLPVRKSGTSEYRMVQDLREVNKRVETIHPTVPNPYTLLSLLPPDRIWYSVLDLKDAFFCIPLAPESQLIFAFEWADAEEGESGQLTWTRLPQGFKNSPTLFDEALNRDLQGFRLDHPSVSLLQYVDDLLIAADTQAACLSATRDLLMTLAELGYRVSGKKAQLCQEEVTYLGFKIHKGSRSLSNSRTQAILQIPVPKTKRQVREFLGTIGYCRLWIPGFAELAQPLYAATRGGNDPLVWGEKEEEAFQSLKLALTQPPALALPSLDKPFQLFVEETSGAAKGVLTQALGPWKRPVAYLSKRLDPVAAGWPRCLRAIAAAALLTREASKLTFGQDIEITSSHNLESLLRSPPDKWLTNARITQYQVLLLDPPRVRFKQTAALNPATLLPETDDTLPIHHCLDTLDSLTSTRPDLTDQPLAQAEATLFTDGSSYIRDGKRYAGAAVVTLDSVIWAEPLPIGTSAQKAELIALTKALEWSKDKSVNIYTDSRYAFATLHVHGMIYRERGLLTAGGKAIKNAPEILALLTAVWLPKRVAVMHCKGHQKDDAPTSTGNRRADEVAREVAIRPLSTQATISAGKRTADGSEFEKRTADGSEFESPKKKAKVE

SEQ ID NO: 6275 - protein, 2095 aa, synthetic construct
MPAAKRVKLDGGDKKYSIGLDIGTNSVGWAVITDEYKVPSKKFKVLGNTDRHSIKKNLIGALLFDSGETAEATRLKRTARRRYTRRKNRICYLQEIFSNEMAKVDDSFFHRLEESFLVEEDKKHERHPIFGNIVDEVAYHEKYPTIYHLRKKLVDSTDKADLRLIYLALAHMIKFRGHFLIEGDLNPDNSDVDKLFIQLVQTYNQLFEENPINASGVDAKAILSARLSKSRRLENLIAQLPGEKKNGLFGNLIALSLGLTPNFKSNFDLAEDAKLQLSKDTYDDDLDNLLAQIGDQYADLFLAAKNLSDAILLSDILRVNTEITKAPLSASMIKRYDEHHQDLTLLKALVRQQLPEKYKEIFFDQSKNGYAGYIDGGASQEEFYKFIKPILEKMDGTEELLVKLNREDLLRKQRTFDNGSIPHQIHLGELHAILRRQEDFYPFLKDNREKIEKILTFRIPYYVGPLARGNSRFAWMTRKSEETITPWNFEEVVDKGASAQSFIERMTNFDKNLPNEKVLPKHSLLYEYFTVYNELTKVKYVTEGMRKPAFLSGEQKKAIVDLLFKTNRKVTVKQLKEDYFKKIECFDSVEISGVEDRFNASLGTYHDLLKIIKDKDFLDNEENEDILEDIVLTLTLFEDREMIEERLKTYAHLFDDKVMKQLKRRRYTGWGRLSRKLINGIRDKQSGKTILDFLKSDGFANRNFMQLIHDDSLTFKEDIQKAQVSGQGDSLHEHIANLAGSPAIKKGILQTVKVVDELVKVMGRHKPENIVIEMARENQTTQKGQKNSRERMKRIEEGIKELGSQILKEHPVENTQLQNEKLYLYYLQNGRDMYVDQELDINRLSDYDVDHIVPQSFLKDDSIDNKVLTRSDKARGKSDNVPSEEVVKKMKNYWRQLLNAKLITQRKFDNLTKAERGGLSELDKAGFIKRQLVETRQITKHVAQILDSRMNTKYDENDKLIREVKVITLKSKLVSDFRKDFQFYKVREINNYHHAHDAYLNAVVGTALIKKYPKLESEFVYGDYKVYDVRKMIAKSEQEIGKATAKYFFYSNIMNFFKTEITLANGEIRKRPLIETNGETGEIVWDKGRDFATVRKVLSMPQVNIVKKTEVQTGGFSKESILPKRNSDKLIARKKDWDPKKYGGFDSPTVAYSVLVVAKVEKGKSKKLKSVKELLGITIMERSSFEKNPIDFLEAKGYKEVKKDLIIKLPKYSLFELENGRKRMLASAGELQKGNELALPSKYVNFLYLASHYEKLKGSPEDNEQKQLFVEQHKHYLDEIIEQISEFSKRVILADANLDKVLSAYNKHRDKPIREQAENIIHLFTLTNLGAPAAFKYFDTTIDRKRYTSTKEVLDATLIHQSITGLYETRIDLSQLGGDGGGGGGGGGGGGTAPLEEEYRLFLEAPIQNVTLLEQWKREIPKVWAEINPPGLASTQAPIHVQLLSTALPVRVRQYPITLEAKRSLRETIRKFRAAGILRPVHSPWNTPLLPVRKSGTSEYRMVQDLREVNKRVETIHPTVPNPYTLLSLLPPDRIWYSVLDLKDAFFCIPLAPESQLIFAFEWADAEEGESGQLTWTRLPQGFKNSPTLFNEALNRDLQGFRLDHPSVSLLQYVDDLLIAADTQAACLSATRDLLMTLAELGYRVSGKKAQLCQEEVTYLGFKIHKGSRSLSNSRTQAILQIPVPKTKRQVREFLGKIGYCRLFIPGFAELAQPLYAATRPGNDPLVWGEKEEEAFQSLKLALTQPPALALPSLDKPFQLFVEETSGAAKGVLTQALGPWKRPVAYLSKRLDPVAAGWPRCLRAIAAAALLTREASKLTFGQDIEITSSHNLESLLRSPPDKWLTNARITQYQVLLLDPPRVRFKQTAALNPATLLPETDDTLPIHHCLDTLDSLTSTRPDLTDQPLAQAEATLFTDGSSYIRDGKRYAGAAVVTLDSVIWAEPLPIGTSAQKAELIALTKALEWSKDKSVNIYTDSRYAFATLHVHGMIYRERGWLTAGGKAIKNAPEILALLTAVWLPKRVAVMHCKGHQKDDAPTSTGNRRADEVAREVAIRPLSTQATISAGKRTADGSEFEKRTADGSEFESPKKKAKVE

SEQ ID NO: 6276 - protein, 2099 aa, synthetic construct
MPAAKRVKLDGGDKKYSIGLDIGTNSVGWAVITDEYKVPSKKFKVLGNTDRHSIKKNLIGALLFDSGETAEATRLKRTARRRYTRRKNRICYLQEIFSNEMAKVDDSFFHRLEESFLVEEDKKHERHPIFGNIVDEVAYHEKYPTIYHLRKKLVDSTDKADLRLIYLALAHMIKFRGHFLIEGDLNPDNSDVDKLFIQLVQTYNQLFEENPINASGVDAKAILSARLSKSRRLENLIAQLPGEKKNGLFGNLIALSLGLTPNFKSNFDLAEDAKLQLSKDTYDDDLDNLLAQIGDQYADLFLAAKNLSDAILLSDILRVNTEITKAPLSASMIKRYDEHHQDLTLLKALVRQQLPEKYKEIFFDQSKNGYAGYIDGGASQEEFYKFIKPILEKMDGTEELLVKLNREDLLRKQRTFDNGSIPHQIHLGELHAILRRQEDFYPFLKDNREKIEKILTFRIPYYVGPLARGNSRFAWMTRKSEETITPWNFEEVVDKGASAQSFIERMTNFDKNLPNEKVLPKHSLLYEYFTVYNELTKVKYVTEGMRKPAFLSGEQKKAIVDLLFKTNRKVTVKQLKEDYFKKIECFDSVEISGVEDRFNASLGTYHDLLKIIKDKDFLDNEENEDILEDIVLTLTLFEDREMIEERLKTYAHLFDDKVMKQLKRRRYTGWGRLSRKLINGIRDKQSGKTILDFLKSDGFANRNFMQLIHDDSLTFKEDIQKAQVSGQGDSLHEHIANLAGSPAIKKGILQTVKVVDELVKVMGRHKPENIVIEMARENQTTQKGQKNSRERMKRIEEGIKELGSQILKEHPVENTQLQNEKLYLYYLQNGRDMYVDQELDINRLSDYDVDHIVPQSFLKDDSIDNKVLTRSDKARGKSDNVPSEEVVKKMKNYWRQLLNAKLITQRKFDNLTKAERGGLSELDKAGFIKRQLVETRQITKHVAQILDSRMNTKYDENDKLIREVKVITLKSKLVSDFRKDFQFYKVREINNYHHAHDAYLNAVVGTALIKKYPKLESEFVYGDYKVYDVRKMIAKSEQEIGKATAKYFFYSNIMNFFKTEITLANGEIRKRPLIETNGETGEIVWDKGRDFATVRKVLSMPQVNIVKKTEVQTGGFSKESILPKRNSDKLIARKKDWDPKKYGGFDSPTVAYSVLVVAKVEKGKSKKLKSVKELLGITIMERSSFEKNPIDFLEAKGYKEVKKDLIIKLPKYSLFELENGRKRMLASAGELQKGNELALPSKYVNFLYLASHYEKLKGSPEDNEQKQLFVEQHKHYLDEIIEQISEFSKRVILADANLDKVLSAYNKHRDKPIREQAENIIHLFTLTNLGAPAAFKYFDTTIDRKRYTSTKEVLDATLIHQSITGLYETRIDLSQLGGDGGGGGGGGGGGGTVSLQDEHRLFDIPVTTSLPDVWLQDFPQAWAETGGLGRAKCQAPIIIDLKPTAVPVSIKQYPMSLEAHMGIRQHIIKFLELGVLRPCRSPWNTPLLPVKKPGTQDYRPVQDLREINKRTVDIHPTVPNPYNLLSTLKPDYSWYTVLDLKDAFFCLPLAPQSQELFAFEWKDPERGISGQLTWTRLPQGFKNSPTLFDEALHRDLTDFRTQHPEVTLLQYVDDLLLAAPTKKACTQGTRHLLQELGEKGYRASAKKAQICQTKVTYLGYILSEGKRWLTPGRIETVARIPPPRNPREVREFLGTAGFCRLWIPGFAELAAPLYALTKESTPFTWQTEHQLAFEALKKALLSAPALGLPDTSKPFTLFLDERQGIAKGVLTQKLGPWKRPVAYLSKKLDPVAAGWPPCLRIMAATAMLVKDSAKLTLGQPLTVITPHTLEAIVRQPPDRWITNARLTHYQALLLDTDRVQFGPPVTLNPATLLPVPENQPSPHDCRQVLAETHGTREDLKDQELPDADHTWYTDGSSYLDSGTRRAGAAVVDGHNTIWAQSLPPGTSAQKAELIALTKALELSKGKKANIYTDSRYAFATAHTHGSIYERRGLLTSEGKEIKNKAEIIALLKALFLPQEVAIIHCPGHQKGQDPVAVGNRQADRVARQAAMAEVLTLATEPDNTSHITAGKRTADGSEFEKRTADGSEFESPKKKAKVE

SEQ ID NO: 6277 - protein, 2091 aa, synthetic construct
MPAAKRVKLDGGDKKYSIGLDIGTNSVGWAVITDEYKVPSKKFKVLGNTDRHSIKKNLIGALLFDSGETAEATRLKRTARRRYTRRKNRICYLQEIFSNEMAKVDDSFFHRLEESFLVEEDKKHERHPIFGNIVDEVAYHEKYPTIYHLRKKLVDSTDKADLRLIYLALAHMIKFRGHFLIEGDLNPDNSDVDKLFIQLVQTYNQLFEENPINASGVDAKAILSARLSKSRRLENLIAQLPGEKKNGLFGNLIALSLGLTPNFKSNFDLAEDAKLQLSKDTYDDDLDNLLAQIGDQYADLFLAAKNLSDAILLSDILRVNTEITKAPLSASMIKRYDEHHQDLTLLKALVRQQLPEKYKEIFFDQSKNGYAGYIDGGASQEEFYKFIKPILEKMDGTEELLVKLNREDLLRKQRTFDNGSIPHQIHLGELHAILRRQEDFYPFLKDNREKIEKILTFRIPYYVGPLARGNSRFAWMTRKSEETITPWNFEEVVDKGASAQSFIERMTNFDKNLPNEKVLPKHSLLYEYFTVYNELTKVKYVTEGMRKPAFLSGEQKKAIVDLLFKTNRKVTVKQLKEDYFKKIECFDSVEISGVEDRFNASLGTYHDLLKIIKDKDFLDNEENEDILEDIVLTLTLFEDREMIEERLKTYAHLFDDKVMKQLKRRRYTGWGRLSRKLINGIRDKQSGKTILDFLKSDGFANRNFMQLIHDDSLTFKEDIQKAQVSGQGDSLHEHIANLAGSPAIKKGILQTVKVVDELVKVMGRHKPENIVIEMARENQTTQKGQKNSRERMKRIEEGIKELGSQILKEHPVENTQLQNEKLYLYYLQNGRDMYVDQELDINRLSDYDVDHIVPQSFLKDDSIDNKVLTRSDKARGKSDNVPSEEVVKKMKNYWRQLLNAKLITQRKFDNLTKAERGGLSELDKAGFIKRQLVETRQITKHVAQILDSRMNTKYDENDKLIREVKVITLKSKLVSDFRKDFQFYKVREINNYHHAHDAYLNAVVGTALIKKYPKLESEFVYGDYKVYDVRKMIAKSEQEIGKATAKYFFYSNIMNFFKTEITLANGEIRKRPLIETNGETGEIVWDKGRDFATVRKVLSMPQVNIVKKTEVQTGGFSKESILPKRNSDKLIARKKDWDPKKYGGFDSPTVAYSVLVVAKVEKGKSKKLKSVKELLGITIMERSSFEKNPIDFLEAKGYKEVKKDLIIKLPKYSLFELENGRKRMLASAGELQKGNELALPSKYVNFLYLASHYEKLKGSPEDNEQKQLFVEQHKHYLDEIIEQISEFSKRVILADANLDKVLSAYNKHRDKPIREQAENIIHLFTLTNLGAPAAFKYFDTTIDRKRYTSTKEVLDATLIHQSITGLYETRIDLSQLGGDGGGGGGGGGGGGVLNLEEEYRLHEKPVPSSIDPSWLQLFPTVWAERAGMGLANQVPPVVVELRSGASPVAVRQYPMSKEAREGIRPHIQKFLDLGVLVPCRSPWNTPLLPVKKPGTNDYRPVQDLREINKRVQDIHPTVPNPYNLLSSLPPSYTWYSVLDLKDAFFCLRLHPNSQPLFAFEWKDPEKGNTGQLTWTRLPQGFKNSPTLFNEALHRDLAPFRALNPQVVLLQYVDDLLVAAPTYEDCKKGTQKLLQELSKLGYRVSAKKAQLCQREVTYLGYLLKEGKRWLTPARKATVMKIPVPTTPRQVREFLGTAGFCRLWIPGFASLAAPLYPLTKPSIPFIWTEEHQQAFDHIKKALLSAPALALPDLTKPFTLYIDERAGVARGVLTQTLGPWRRPVAYLSKKLDPVASGWPTCLKAVAAVALLLKDADKLTLGQNVTVIASHSLESIVRQPPDRWMTNARMTHYQSLLLNERVSFAPPAVLNPATLLPVESEATPVHRCSEILAEETGTRRDLEDQPLPGVPTWYTDGSSFITEGKRRAGAPIVDGKRTVWASSLPEGTSAQKAELVALTQALRLAEGKNINIYTDSRYAFATAHIHGAIYKQRGWLTSAGKDIKNKEEILALLEAIHLPRRVAIIHCPGHQRGSNPVATGNRRADEAAKQAALSTRVLAGTTKPAGKRTADGSEFEKRTADGSEFESPKKKAKVE

SEQ ID NO: 6278 - protein, 2124 aa, synthetic construct
MPAAKRVKLDGGDKKYSIGLDIGTNSVGWAVITDEYKVPSKKFKVLGNTDRHSIKKNLIGALLFDSGETAEATRLKRTARRRYTRRKNRICYLQEIFSNEMAKVDDSFFHRLEESFLVEEDKKHERHPIFGNIVDEVAYHEKYPTIYHLRKKLVDSTDKADLRLIYLALAHMIKFRGHFLIEGDLNPDNSDVDKLFIQLVQTYNQLFEENPINASGVDAKAILSARLSKSRRLENLIAQLPGEKKNGLFGNLIALSLGLTPNFKSNFDLAEDAKLQLSKDTYDDDLDNLLAQIGDQYADLFLAAKNLSDAILLSDILRVNTEITKAPLSASMIKRYDEHHQDLTLLKALVRQQLPEKYKEIFFDQSKNGYAGYIDGGASQEEFYKFIKPILEKMDGTEELLVKLNREDLLRKQRTFDNGSIPHQIHLGELHAILRRQEDFYPFLKDNREKIEKILTFRIPYYVGPLARGNSRFAWMTRKSEETITPWNFEEVVDKGASAQSFIERMTNFDKNLPNEKVLPKHSLLYEYFTVYNELTKVKYVTEGMRKPAFLSGEQKKAIVDLLFKTNRKVTVKQLKEDYFKKIECFDSVEISGVEDRFNASLGTYHDLLKIIKDKDFLDNEENEDILEDIVLTLTLFEDREMIEERLKTYAHLFDDKVMKQLKRRRYTGWGRLSRKLINGIRDKQSGKTILDFLKSDGFANRNFMQLIHDDSLTFKEDIQKAQVSGQGDSLHEHIANLAGSPAIKKGILQTVKVVDELVKVMGRHKPENIVIEMARENQTTQKGQKNSRERMKRIEEGIKELGSQILKEHPVENTQLQNEKLYLYYLQNGRDMYVDQELDINRLSDYDVDHIVPQSFLKDDSIDNKVLTRSDKARGKSDNVPSEEVVKKMKNYWRQLLNAKLITQRKFDNLTKAERGGLSELDKAGFIKRQLVETRQITKHVAQILDSRMNTKYDENDKLIREVKVITLKSKLVSDFRKDFQFYKVREINNYHHAHDAYLNAVVGTALIKKYPKLESEFVYGDYKVYDVRKMIAKSEQEIGKATAKYFFYSNIMNFFKTEITLANGEIRKRPLIETNGETGEIVWDKGRDFATVRKVLSMPQVNIVKKTEVQTGGFSKESILPKRNSDKLIARKKDWDPKKYGGFDSPTVAYSVLVVAKVEKGKSKKLKSVKELLGITIMERSSFEKNPIDFLEAKGYKEVKKDLIIKLPKYSLFELENGRKRMLASAGELQKGNELALPSKYVNFLYLASHYEKLKGSPEDNEQKQLFVEQHKHYLDEIIEQISEFSKRVILADANLDKVLSAYNKHRDKPIREQAENIIHLFTLTNLGAPAAFKYFDTTIDRKRYTSTKEVLDATLIHQSITGLYETRIDLSQLGGDGGGGGGGGGGGGLLGRDLLTKLKAQIQFSTEGPQVTWEDRPAMCLVLNLEEEYRLHEKPVPPSIDPSWLQLFPMVWAEKAGMGLANQVPPVVVELKSDASPVAVRQYPMSKEAREGIRPHIQRFLDLGILVPCQSPWNTPLLPVKKPGTNDYRPVQDLREVNKRVQDIHPTVPNPYNLLSSLPPSHTWYSVLDLKDAFFCLKLHPNSQPLFAFEWRDPEKGNTGQLTWTRLPQGFKNSPTLFNEALHRDLASFRALNPQVVMLQYVDDLLVAAPTYRDCKEGTRRLLQELSKLGYRVSAKKAQLCREEVTYLGYLLKGGKRWLTPARKATVMKIPTPTTPRQVREFLGTAGFCRLWIPGFASLAAPLYPLTRPKVPFTWTEAHQEAFGRIKEALLSAPALALPDLTKPFALYVDEKEGVARGVLTQTLGPWRRPVAYLSKKLDPVASGWPTCLKAIAAVALLLKDADKLTLGQNVLVIAPHNLESIVRQPPDRWMTNARMTHYQSLLLNERVSFAPPAILNPATLLPVESDDTPIHICSEILAEETGTRPDLRDQPLPGVPAWYTDGSSFIMDGRRQAGAAIVDNKRTVWASNLPEGTSAQKAELIALTQALRLAEGKSINIYTDSRYAFATAHVHGAIYKQRGWLTSAGKDIKNKEEILALLEAIHLPKRVAIIHCPGHQRGTDPVATGNRKADEAAKQAAQSTRILTETTKNAGKRTADGSEFEKRTADGSEFESPKKKAKVE

SEQ ID NO: 6279 - protein, 2124 aa, synthetic construct
MPAAKRVKLDGGDKKYSIGLDIGTNSVGWAVITDEYKVPSKKFKVLGNTDRHSIKKNLIGALLFDSGETAEATRLKRTARRRYTRRKNRICYLQEIFSNEMAKVDDSFFHRLEESFLVEEDKKHERHPIFGNIVDEVAYHEKYPTIYHLRKKLVDSTDKADLRLIYLALAHMIKFRGHFLIEGDLNPDNSDVDKLFIQLVQTYNQLFEENPINASGVDAKAILSARLSKSRRLENLIAQLPGEKKNGLFGNLIALSLGLTPNFKSNFDLAEDAKLQLSKDTYDDDLDNLLAQIGDQYADLFLAAKNLSDAILLSDILRVNTEITKAPLSASMIKRYDEHHQDLTLLKALVRQQLPEKYKEIFFDQSKNGYAGYIDGGASQEEFYKFIKPILEKMDGTEELLVKLNREDLLRKQRTFDNGSIPHQIHLGELHAILRRQEDFYPFLKDNREKIEKILTFRIPYYVGPLARGNSRFAWMTRKSEETITPWNFEEVVDKGASAQSFIERMTNFDKNLPNEKVLPKHSLLYEYFTVYNELTKVKYVTEGMRKPAFLSGEQKKAIVDLLFKTNRKVTVKQLKEDYFKKIECFDSVEISGVEDRFNASLGTYHDLLKIIKDKDFLDNEENEDILEDIVLTLTLFEDREMIEERLKTYAHLFDDKVMKQLKRRRYTGWGRLSRKLINGIRDKQSGKTILDFLKSDGFANRNFMQLIHDDSLTFKEDIQKAQVSGQGDSLHEHIANLAGSPAIKKGILQTVKVVDELVKVMGRHKPENIVIEMARENQTTQKGQKNSRERMKRIEEGIKELGSQILKEHPVENTQLQNEKLYLYYLQNGRDMYVDQELDINRLSDYDVDHIVPQSFLKDDSIDNKVLTRSDKARGKSDNVPSEEVVKKMKNYWRQLLNAKLITQRKFDNLTKAERGGLSELDKAGFIKRQLVETRQITKHVAQILDSRMNTKYDENDKLIREVKVITLKSKLVSDFRKDFQFYKVREINNYHHAHDAYLNAVVGTALIKKYPKLESEFVYGDYKVYDVRKMIAKSEQEIGKATAKYFFYSNIMNFFKTEITLANGEIRKRPLIETNGETGEIVWDKGRDFATVRKVLSMPQVNIVKKTEVQTGGFSKESILPKRNSDKLIARKKDWDPKKYGGFDSPTVAYSVLVVAKVEKGKSKKLKSVKELLGITIMERSSFEKNPIDFLEAKGYKEVKKDLIIKLPKYSLFELENGRKRMLASAGELQKGNELALPSKYVNFLYLASHYEKLKGSPEDNEQKQLFVEQHKHYLDEIIEQISEFSKRVILADANLDKVLSAYNKHRDKPIREQAENIIHLFTLTNLGAPAAFKYFDTTIDRKRYTSTKEVLDATLIHQSITGLYETRIDLSQLGGDGGGGGGGGGGGGLLGRDLLTKLKAQIQFSTEGPQVTWEDRPAMCLVLNLEEEYRLHEKPVPPSIDPSWLQLFPMVWAEKAGMGLANQVPPVVVELKSDASPVAVRQYPMSKEAREGIRPHIQRFLDLGILVPCQSPWNTPLLPVKKPGTNDYRPVQDLREVNKRVQDIHPTVPNPYNLLSSLPPSHTWYSVLDLKDAFFCLKLHPNSQPLFAFEWRDPEKGNTGQLTWTRLPQGFKNSPTLFNEALHRDLASFRALNPQVVMLQYVDDLLVAAPTYRDCKEGTRRLLQELSKLGYRVSAKKAQLCREEVTYLGYLLKGGKRWLTPARKATVMKIPTPTTPRQVREFLGKAGFCRLFIPGFASLAAPLYPLTRPKVPFTWTEAHQEAFGRIKEALLSAPALALPDLTKPFALYVDEKEGVARGVLTQTLGPWRRPVAYLSKKLDPVASGWPTCLKAIAAVALLLKDADKLTLGQNVLVIAPHNLESIVRQPPDRWMTNARMTHYQSLLLNERVSFAPPAILNPATLLPVESDDTPIHICSEILAEETGTRPDLRDQPLPGVPAWYTDGSSFIMDGRRQAGAAIVDNKRTVWASNLPEGTSAQKAELIALTQALRLAEGKSINIYTDSRYAFATAHVHGAIYKQRGWLTSAGKDIKNKEEILALLEAIHLPKRVAIIHCPGHQRGTDPVATGNRKADEAAKQAAQSTRILTETTKNAGKRTADGSEFEKRTADGSEFESPKKKAKVE

SEQ ID NO: 6280 - protein, 2093 aa, synthetic construct
MPAAKRVKLDGGDKKYSIGLDIGTNSVGWAVITDEYKVPSKKFKVLGNTDRHSIKKNLIGALLFDSGETAEATRLKRTARRRYTRRKNRICYLQEIFSNEMAKVDDSFFHRLEESFLVEEDKKHERHPIFGNIVDEVAYHEKYPTIYHLRKKLVDSTDKADLRLIYLALAHMIKFRGHFLIEGDLNPDNSDVDKLFIQLVQTYNQLFEENPINASGVDAKAILSARLSKSRRLENLIAQLPGEKKNGLFGNLIALSLGLTPNFKSNFDLAEDAKLQLSKDTYDDDLDNLLAQIGDQYADLFLAAKNLSDAILLSDILRVNTEITKAPLSASMIKRYDEHHQDLTLLKALVRQQLPEKYKEIFFDQSKNGYAGYIDGGASQEEFYKFIKPILEKMDGTEELLVKLNREDLLRKQRTFDNGSIPHQIHLGELHAILRRQEDFYPFLKDNREKIEKILTFRIPYYVGPLARGNSRFAWMTRKSEETITPWNFEEVVDKGASAQSFIERMTNFDKNLPNEKVLPKHSLLYEYFTVYNELTKVKYVTEGMRKPAFLSGEQKKAIVDLLFKTNRKVTVKQLKEDYFKKIECFDSVEISGVEDRFNASLGTYHDLLKIIKDKDFLDNEENEDILEDIVLTLTLFEDREMIEERLKTYAHLFDDKVMKQLKRRRYTGWGRLSRKLINGIRDKQSGKTILDFLKSDGFANRNFMQLIHDDSLTFKEDIQKAQVSGQGDSLHEHIANLAGSPAIKKGILQTVKVVDELVKVMGRHKPENIVIEMARENQTTQKGQKNSRERMKRIEEGIKELGSQILKEHPVENTQLQNEKLYLYYLQNGRDMYVDQELDINRLSDYDVDHIVPQSFLKDDSIDNKVLTRSDKARGKSDNVPSEEVVKKMKNYWRQLLNAKLITQRKFDNLTKAERGGLSELDKAGFIKRQLVETRQITKHVAQILDSRMNTKYDENDKLIREVKVITLKSKLVSDFRKDFQFYKVREINNYHHAHDAYLNAVVGTALIKKYPKLESEFVYGDYKVYDVRKMIAKSEQEIGKATAKYFFYSNIMNFFKTEITLANGEIRKRPLIETNGETGEIVWDKGRDFATVRKVLSMPQVNIVKKTEVQTGGFSKESILPKRNSDKLIARKKDWDPKKYGGFDSPTVAYSVLVVAKVEKGKSKKLKSVKELLGITIMERSSFEKNPIDFLEAKGYKEVKKDLIIKLPKYSLFELENGRKRMLASAGELQKGNELALPSKYVNFLYLASHYEKLKGSPEDNEQKQLFVEQHKHYLDEIIEQISEFSKRVILADANLDKVLSAYNKHRDKPIREQAENIIHLFTLTNLGAPAAFKYFDTTIDRKRYTSTKEVLDATLIHQSITGLYETRIDLSQLGGDGGGGGGGGGGGGTLNLEDEYRLYETSAEPEVSPGSTWLSDFPQAWAETGGMGLAVRQAPLIIPLKATSTPVSIKQYPMSQEAKLGIKPHIQRLLDQGILVPCQSPWNTPLLPVKKPGTNDYRPVQDLREVNKRVEDIHPTVPNPYNLLSGLPPSHRWYTVLDLKDAFFCLRLHPTSQPLFAFEWRDPGMGISGQLTWTRLPQGFKNSPTLFNEALHRDLADFRIQHPDLILLQYVDDILLAATSELDCQQGTRALLLTLGNLGYRASAKKAQLCQKQVKYLGYLLKEGQRWLTEARKETVMGQPTPKTPRQLREFLGKAGFCRLFIPGFAEMAAPLYPLTKPGTLFNWGPDQQKAYQEIKQALLTAPALGLPDLTKPFELFVDEKQGYAKGVLTQKLGPWRRPVAYLSKKLDPVAAGWPPCLRMVAAIAVLRKDAGKLTMGQPLVILAPHAVEALVKQPPDRWLSNARMTHYQAMLLDTDRVQFGPVVALNPATLLPLPEEGAPHDCLEILAETHGTRPDLTDQPIPDADHTWYTDGSSFLQEGQRKAGAAVTTETEVIWARALPAGTSAQRAELIALTQALKMAEGKRLNVYTDSRYAFATAHIHGEIYRRRGWLTSEGREIKNKSEILALLKALFLPKRLSIIHCLGHQKGDSAEARGNRLADQAAREAAIKTPPDTSTLLAGKRTADGSEFEKRTADGSEFESPKKKAKVE

SEQ ID NO: 6281 - protein, 2093 aa, synthetic construct
MPAAKRVKLDGGDKKYSIGLDIGTNSVGWAVITDEYKVPSKKFKVLGNTDRHSIKKNLIGALLFDSGETAEATRLKRTARRRYTRRKNRICYLQEIFSNEMAKVDDSFFHRLEESFLVEEDKKHERHPIFGNIVDEVAYHEKYPTIYHLRKKLVDSTDKADLRLIYLALAHMIKFRGHFLIEGDLNPDNSDVDKLFIQLVQTYNQLFEENPINASGVDAKAILSARLSKSRRLENLIAQLPGEKKNGLFGNLIALSLGLTPNFKSNFDLAEDAKLQLSKDTYDDDLDNLLAQIGDQYADLFLAAKNLSDAILLSDILRVNTEITKAPLSASMIKRYDEHHQDLTLLKALVRQQLPEKYKEIFFDQSKNGYAGYIDGGASQEEFYKFIKPILEKMDGTEELLVKLNREDLLRKQRTFDNGSIPHQIHLGELHAILRRQEDFYPFLKDNREKIEKILTFRIPYYVGPLARGNSRFAWMTRKSEETITPWNFEEVVDKGASAQSFIERMTNFDKNLPNEKVLPKHSLLYEYFTVYNELTKVKYVTEGMRKPAFLSGEQKKAIVDLLFKTNRKVTVKQLKEDYFKKIECFDSVEISGVEDRFNASLGTYHDLLKIIKDKDFLDNEENEDILEDIVLTLTLFEDREMIEERLKTYAHLFDDKVMKQLKRRRYTGWGRLSRKLINGIRDKQSGKTILDFLKSDGFANRNFMQLIHDDSLTFKEDIQKAQVSGQGDSLHEHIANLAGSPAIKKGILQTVKVVDELVKVMGRHKPENIVIEMARENQTTQKGQKNSRERMKRIEEGIKELGSQILKEHPVENTQLQNEKLYLYYLQNGRDMYVDQELDINRLSDYDVDHIVPQSFLKDDSIDNKVLTRSDKARGKSDNVPSEEVVKKMKNYWRQLLNAKLITQRKFDNLTKAERGGLSELDKAGFIKRQLVETRQITKHVAQILDSRMNTKYDENDKLIREVKVITLKSKLVSDFRKDFQFYKVREINNYHHAHDAYLNAVVGTALIKKYPKLESEFVYGDYKVYDVRKMIAKSEQEIGKATAKYFFYSNIMNFFKTEITLANGEIRKRPLIETNGETGEIVWDKGRDFATVRKVLSMPQVNIVKKTEVQTGGFSKESILPKRNSDKLIARKKDWDPKKYGGFDSPTVAYSVLVVAKVEKGKSKKLKSVKELLGITIMERSSFEKNPIDFLEAKGYKEVKKDLIIKLPKYSLFELENGRKRMLASAGELQKGNELALPSKYVNFLYLASHYEKLKGSPEDNEQKQLFVEQHKHYLDEIIEQISEFSKRVILADANLDKVLSAYNKHRDKPIREQAENIIHLFTLTNLGAPAAFKYFDTTIDRKRYTSTKEVLDATLIHQSITGLYETRIDLSQLGGDGGGGGGGGGGGGLGIEDEYRLHETSTEPDVSLGSTWLSDFPQAWAETGGMGLAVRQAPLIIPLKATSTPVSIQQYPMSHEARLGIKPHIQRLLDQGILVPCQSPWNTPLLPVKKPGTNDYRPVQDLREVNKRVEDIHPTVPNPYNLLSGLPPSHQWYTVLDLKDAFFCLRLHPTSQPLFAFEWRDPGMGISGQLTWTRLPQGFKNSPTLFNEALHRDLADFRIQHPDLILLQYVDDILLAATSELDCQQGTRALLQTLGDLGYRASAKKAQICQKQVKYLGYLLREGQRWLTEARKETVMGQPVPKTPRQLREFLGKAGFCRLFIPGFAEMAAPLYPLTKPGTLFSWGPDQQKAYQEIKQALLTAPALGLPDLTKPFELFVDEKQGYAKGVLTQKLGPWRRPVAYLSKKLDPVAAGWPPCLRMVAAIAVLTKDAGKLTMGQPLVILAPHAVEALVKQPPDRWLSNARMTHYQAMLLDTDRVQFGPVVALNPATLLPLPEEGAPHDCLEILAETHGTRPDLTDQPIPDADHTWYTDGSSFLQEGQRKAGAAVTTETEVIWAGALPAGTSAQRAELIALTQALKMAEGKRLNVYTDSRYAFATAHIHGEIYRRRGWLTSEGREIKNKSEILALLKALFLPKRLSIIHCLGHQKGDSAEARGNRLADQAAREAAIKTPPDTSTLLIAGKRTADGSEFEKRTADGSEFESPKKKAKVE

SEQ ID NO: 6282 - protein, 2093 aa, synthetic construct; identical to SEQ ID NO: 6281

SEQ ID NO: 6283 - protein, 2093 aa, synthetic construct
MPAAKRVKLDGGDKKYSIGLDIGTNSVGWAVITDEYKVPSKKFKVLGNTDRHSIKKNLIGALLFDSGETAEATRLKRTARRRYTRRKNRICYLQEIFSNEMAKVDDSFFHRLEESFLVEEDKKHERHPIFGNIVDEVAYHEKYPTIYHLRKKLVDSTDKADLRLIYLALAHMIKFRGHFLIEGDLNPDNSDVDKLFIQLVQTYNQLFEENPINASGVDAKAILSARLSKSRRLENLIAQLPGEKKNGLFGNLIALSLGLTPNFKSNFDLAEDAKLQLSKDTYDDDLDNLLAQIGDQYADLFLAAKNLSDAILLSDILRVNTEITKAPLSASMIKRYDEHHQDLTLLKALVRQQLPEKYKEIFFDQSKNGYAGYIDGGASQEEFYKFIKPILEKMDGTEELLVKLNREDLLRKQRTFDNGSIPHQIHLGELHAILRRQEDFYPFLKDNREKIEKILTFRIPYYVGPLARGNSRFAWMTRKSEETITPWNFEEVVDKGASAQSFIERMTNFDKNLPNEKVLPKHSLLYEYFTVYNELTKVKYVTEGMRKPAFLSGEQKKAIVDLLFKTNRKVTVKQLKEDYFKKIECFDSVEISGVEDRFNASLGTYHDLLKIIKDKDFLDNEENEDILEDIVLTLTLFEDREMIEERLKTYAHLFDDKVMKQLKRRRYTGWGRLSRKLINGIRDKQSGKTILDFLKSDGFANRNFMQLIHDDSLTFKEDIQKAQVSGQGDSLHEHIANLAGSPAIKKGILQTVKVVDELVKVMGRHKPENIVIEMARENQTTQKGQKNSRERMKRIEEGIKELGSQILKEHPVENTQLQNEKLYLYYLQNGRDMYVDQELDINRLSDYDVDHIVPQSFLKDDSIDNKVLTRSDKARGKSDNVPSEEVVKKMKNYWRQLLNAKLITQRKFDNLTKAERGGLSELDKAGFIKRQLVETRQITKHVAQILDSRMNTKYDENDKLIREVKVITLKSKLVSDFRKDFQFYKVREINNYHHAHDAYLNAVVGTALIKKYPKLESEFVYGDYKVYDVRKMIAKSEQEIGKATAKYFFYSNIMNFFKTEITLANGEIRKRPLIETNGETGEIVWDKGRDFATVRKVLSMPQVNIVKKTEVQTGGFSKESILPKRNSDKLIARKKDWDPKKYGGFDSPTVAYSVLVVAKVEKGKSKKLKSVKELLGITIMERSSFEKNPIDFLEAKGYKEVKKDLIIKLPKYSLFELENGRKRMLASAGELQKGNELALPSKYVNFLYLASHYEKLKGSPEDNEQKQLFVEQHKHYLDEIIEQISEFSKRVILADANLDKVLSAYNKHRDKPIREQAENIIHLFTLTNLGAPAAFKYFDTTIDRKRYTSTKEVLDATLIHQSITGLYETRIDLSQLGGDGGGGGGGGGGGGTLNIEDEYRLHETSKEPDVSLGSTWLSDFPQAWAETGGMGLAVRQAPLIIPLKATSTPVSIKQYPMSQEARLGIKPHIQRLLDQGILVPCQSPWNTPLLPVKKPGTNDYRPVQDLREVNKRVEDIHPTVPNPYNLLSGLPPSHQWYTVLDLKDAFFCLRLHPTSQPLFAFEWRDPEMGISGQLTWTRLPQGFKNSPTLFNEALHRDLAGFRIQHPDLILLQYVDDLLLAATSELDCQQGTRALLQTLGDLGYRASAKKAQICQKQVKYLGYLLKEGQRWLTEARKETVMGQPIPKTPRQLREFLGTAGFCRLWIPGFAEMAAPLYPLTKPGTLFNWGPDQQKAFQEIKQALLTAPALGLPDLTKPFELFVDEKQGYAKGVLTQKLGPWRRPVAYLSKKLDPVAAGWPPCLRMVAAIAVLTKDAGKLTMGQPLVILAPHAVEALVKQPPDRWLSNARMTHYQALLLDTDRVQFGPVVALNPATLLPLPEEGLQHDCLDILAEAHGTRSDLMDQPLPDADHTWYTDGSSFLQEGQRKAGAAVTTETEVIWARALPAGTSAQRAELIALTQALKMAEGKKLNVYTDSRYAFATAHIHGEIYRRRGWLTSEGKEIKNKDEILALLKALFLPKRLSIIHCPGHQKGNSAEARGNRMADQAAREVATRETPETSTLLAGKRTADGSEFEKRTADGSEFESPKKKAKVE

SEQ ID NO: 6284 - protein, 2093 aa, synthetic construct
MPAAKRVKLDGGDKKYSIGLDIGTNSVGWAVITDEYKVPSKKFKVLGNTDRHSIKKNLIGALLFDSGETAEATRLKRTARRRYTRRKNRICYLQEIFSNEMAKVDDSFFHRLEESFLVEEDKKHERHPIFGNIVDEVAYHEKYPTIYHLRKKLVDSTDKADLRLIYLALAHMIKFRGHFLIEGDLNPDNSDVDKLFIQLVQTYNQLFEENPINASGVDAKAILSARLSKSRRLENLIAQLPGEKKNGLFGNLIALSLGLTPNFKSNFDLAEDAKLQLSKDTYDDDLDNLLAQIGDQYADLFLAAKNLSDAILLSDILRVNTEITKAPLSASMIKRYDEHHQDLTLLKALVRQQLPEKYKEIFFDQSKNGYAGYIDGGASQEEFYKFIKPILEKMDGTEELLVKLNREDLLRKQRTFDNGSIPHQIHLGELHAILRRQEDFYPFLKDNREKIEKILTFRIPYYVGPLARGNSRFAWMTRKSEETITPWNFEEVVDKGASAQSFIERMTNFDKNLPNEKVLPKHSLLYEYFTVYNELTKVKYVTEGMRKPAFLSGEQKKAIVDLLFKTNRKVTVKQLKEDYFKKIECFDSVEISGVEDRFNASLGTYHDLLKIIKDKDFLDNEENEDILEDIVLTLTLFEDREMIEERLKTYAHLFDDKVMKQLKRRRYTGWGRLSRKLINGIRDKQSGKTILDFLKSDGFANRNFMQLIHDDSLTFKEDIQKAQVSGQGDSLHEHIANLAGSPAIKKGILQTVKVVDELVKVMGRHKPENIVIEMARENQTTQKGQKNSRERMKRIEEGIKELGSQILKEHPVENTQLQNEKLYLYYLQNGRDMYVDQELDINRLSDYDVDHIVPQSFLKDDSIDNKVLTRSDKARGKSDNVPSEEVVKKMKNYWRQLLNAKLITQRKFDNLTKAERGGLSELDKAGFIKRQLVETRQITKHVAQILDSRMNTKYDENDKLIREVKVITLKSKLVSDFRKDFQFYKVREINNYHHAHDAYLNAVVGTALIKKYPKLESEFVYGDYKVYDVRKMIAKSEQEIGKATAKYFFYSNIMNFFKTEITLANGEIRKRPLIETNGETGEIVWDKGRDFATVRKVLSMPQVNIVKKTEVQTGGFSKESILPKRNSDKLIARKKDWDPKKYGGFDSPTVAYSVLVVAKVEKGKSKKLKSVKELLGITIMERSSFEKNPIDFLEAKGYKEVKKDLIIKLPKYSLFELENGRKRMLASAGELQKGNELALPSKYVNFLYLASHYEKLKGSPEDNEQKQLFVEQHKHYLDEIIEQISEFSKRVILADANLDKVLSAYNKHRDKPIREQAENIIHLFTLTNLGAPAAFKYFDTTIDRKRYTSTKEVLDATLIHQSITGLYETRIDLSQLGGDGGGGGGGGGGGGTLNIEDEHRLHETSKEPDVSLGSTWLSDFPQAWAETGGMGLAVRQAPLIIPLKATSTPVSIKQYPMSQEARLGIKPHIQRLLDQGILVPCQSPWNTPLLPVKKPGTNDYRPVQDLREVNKRVEDIHPTVPNPYNLLSGLPPSHQWYTVLDLKDAFFCLRLHPTSQPLFAFEWRDPEMGISGQLTWTRLPQGFKNSPTLFNEALHRDLADFRIQHPDLILLQYVDDLLLAATSELDCQQGTRALLQTLGNLGYRASAKKAQICQKQVKYLGYLLKEGQRWLTEARKETVMGQPTPKTPRQLREFLGKAGFCRLFIPGFAEMAAPLYPLTKPGTLFNWGPDQQKAYQEIKQALLTAPALGLPDLTKPFELFVDEKQGYAKGVLTQKLGPWRRPVAYLSKKLDPVAAGWPPCLRMVAAIAVLTKDAGKLTMGQPLVILAPHAVEALVKQPPDRWLSNARMTHYQALLLDTDRVQFGPVVALNPATLLPLPEEGLQHNCLDILAEAHGTRPDLTDQPLPDADHTWYTDGSSLLQEGQRKAGAAVTTETEVIWAKALPAGTSAQRAELIALTQALKMAEGKKLNVYTDSRYAFATAHIHGEIYRRRGWLTSEGKEIKNKDEILALLKALFLPKRLSIIHCPGHQKGHSAEARGNRMADQAARKAAITETPDTSTLLAGKRTADGSEFEKRTADGSEFESPKKKAKVE

SEQ ID NO: 6285 - protein, 2093 aa, synthetic construct; identical to SEQ ID NO: 6284

SEQ ID NO: 6286 - protein, 2091 aa, synthetic construct
MPAAKRVKLDGGDKKYSIGLDIGTNSVGWAVITDEYKVPSKKFKVLGNTDRHSIKKNLIGALLFDSGETAEATRLKRTARRRYTRRKNRICYLQEIFSNEMAKVDDSFFHRLEESFLVEEDKKHERHPIFGNIVDEVAYHEKYPTIYHLRKKLVDSTDKADLRLIYLALAHMIKFRGHFLIEGDLNPDNSDVDKLFIQLVQTYNQLFEENPINASGVDAKAILSARLSKSRRLENLIAQLPGEKKNGLFGNLIALSLGLTPNFKSNFDLAEDAKLQLSKDTYDDDLDNLLAQIGDQYADLFLAAKNLSDAILLSDILRVNTEITKAPLSASMIKRYDEHHQDLTLLKALVRQQLPEKYKEIFFDQSKNGYAGYIDGGASQEEFYKFIKPILEKMDGTEELLVKLNREDLLRKQRTFDNGSIPHQIHLGELHAILRRQEDFYPFLKDNREKIEKILTFRIPYYVGPLARGNSRFAWMTRKSEETITPWNFEEVVDKGASAQSFIERMTNFDKNLPNEKVLPKHSLLYEYFTVYNELTKVKYVTEGMRKPAFLSGEQKKAIVDLLFKTNRKVTVKQLKEDYFKKIECFDSVEISGVEDRFNASLGTYHDLLKIIKDKDFLDNEENEDILEDIVLTLTLFEDREMIEERLKTYAHLFDDKVMKQLKRRRYTGWGRLSRKLINGIRDKQSGKTILDFLKSDGFANRNFMQLIHDDSLTFKEDIQKAQVSGQGDSLHEHIANLAGSPAIKKGILQTVKVVDELVKVMGRHKPENIVIEMARENQTTQKGQKNSRERMKRIEEGIKELGSQILKEHPVENTQLQNEKLYLYYLQNGRDMYVDQELDINRLSDYDVDHIVPQSFLKDDSIDNKVLTRSDKARGKSDNVPSEEVVKKMKNYWRQLLNAKLITQRKFDNLTKAERGGLSELDKAGFIKRQLVETRQITKHVAQILDSRMNTKYDENDKLIREVKVITLKSKLVSDFRKDFQFYKVREINNYHHAHDAYLNAVVGTALIKKYPKLESEFVYGDYKVYDVRKMIAKSEQEIGKATAKYFFYSNIMNFFKTEITLANGEIRKRPLIETNGETGEIVWDKGRDFATVRKVLSMPQVNIVKKTEVQTGGFSKESILPKRNSDKLIARKKDWDPKKYGGFDSPTVAYSVLVVAKVEKGKSKKLKSVKELLGITIMERSSFEKNPIDFLEAKGYKEVKKDLIIKLPKYSLFELENGRKRMLASAGELQKGNELALPSKYVNFLYLASHYEKLKGSPEDNEQKQLFVEQHKHYLDEIIEQISEFSKRVILADANLDKVLSAYNKHRDKPIREQAENIIHLFTLTNLGAPAAFKYFDTTIDRKRYTSTKEVLDATLIHQSITGLYETRIDLSQLGGDGGGGGGGGGGGGVLNLEEEYRLHEKPVPSSIDPSWLQLFPTVWAERAGMGLANQVPPVVVELRSGASPVAVRQYPMSKEAREGIRPHIQRFLDLGVLVPCQSPWNTPLLPVKKPGTNDYRPVQDLREINKRVQDIHPTVPNPYNLLSSLPPSHTWYSVLDLKDAFFCLKLHPNSQPLFAFEWRDPEKGNTGQLTWTRLPQGFKNSPTLFNEALHRDLAPFRALNPQVVLLQYVDDLLVAAPTYRDCKEGTQKLLQELSKLGYRVSAKKAQLCQKEVTYLGYLLKEGKRWLTPARKATVMKIPPPTTPRQVREFLGKAGFCRLFIPGFASLAAPLYPLTKPSIPFIWTEEHQKAFDRIKEALLSAPALALPDLTKPFTLYVDERAGVARGVLTQTLGPWRRPVAYLSKKLDPVASGWPTCLKAVAAVALLLKDADKLTLGQNVTVIASHSLESIVRQPPDRWMTNARMTHYQSLLLNERVSFAPPAVLNPATLLPVESEATPVHRCSEILAEETGTRRDLKDQPLPGVPAWYTDGSSFIAEGKRRAGAAIVDGKRTVWASSLPEGTSAQKAELVALTQALRLAEGKDINIYTDSRYAFATAHIHGAIYKQRGWLTSAGKDIKNKEEILALLEAIHLPKRVAIIHCPGHQKGNDPVATGNRRADEAAKQAALSTRVLAETTKPAGKRTADGSEFEKRTADGSEFESPKKKAKVE

SEQ ID NO: 6287 - protein, 2093 aa, synthetic construct
MPAAKRVKLDGGDKKYSIGLDIGTNSVGWAVITDEYKVPSKKFKVLGNTDRHSIKKNLIGALLFDSGETAEATRLKRTARRRYTRRKNRICYLQEIFSNEMAKVDDSFFHRLEESFLVEEDKKHERHPIFGNIVDEVAYHEKYPTIYHLRKKLVDSTDKADLRLIYLALAHMIKFRGHFLIEGDLNPDNSDVDKLFIQLVQTYNQLFEENPINASGVDAKAILSARLSKSRRLENLIAQLPGEKKNGLFGNLIALSLGLTPNFKSNFDLAEDAKLQLSKDTYDDDLDNLLAQIGDQYADLFLAAKNLSDAILLSDILRVNTEITKAPLSASMIKRYDEHHQDLTLLKALVRQQLPEKYKEIFFDQSKNGYAGYIDGGASQEEFYKFIKPILEKMDGTEELLVKLNREDLLRKQRTFDNGSIPHQIHLGELHAILRRQEDFYPFLKDNREKIEKILTFRIPYYVGPLARGNSRFAWMTRKSEETITPWNFEEVVDKGASAQSFIERMTNFDKNLPNEKVLPKHSLLYEYFTVYNELTKVKYVTEGMRKPAFLSGEQKKAIVDLLFKTNRKVTVKQLKEDYFKKIECFDSVEISGVEDRFNASLGTYHDLLKIIKDKDFLDNEENEDILEDIVLTLTLFEDREMIEERLKTYAHLFDDKVMKQLKRRRYTGWGRLSRKLINGIRDKQSGKTILDFLKSDGFANRNFMQLIHDDSLTFKEDIQKAQVSGQGDSLHEHIANLAGSPAIKKGILQTVKVVDELVKVMGRHKPENIVIEMARENQTTQKGQKNSRERMKRIEEGIKELGSQILKEHPVENTQLQNEKLYLYYLQNGRDMYVDQELDINRLSDYDVDHIVPQSFLKDDSIDNKVLTRSDKARGKSDNVPSEEVVKKMKNYWRQLLNAKLITQRKFDNLTKAERGGLSELDKAGFIKRQLVETRQITKHVAQILDSRMNTKYDENDKLIREVKVITLKSKLVSDFRKDFQFYKVREINNYHHAHDAYLNAVVGTALIKKYPKLESEFVYGDYKVYDVRKMIAKSEQEIGKATAKYFFYSNIMNFFKTEITLANGEIRKRPLIETNGETGEIVWDKGRDFATVRKVLSMPQVNIVKKTEVQTGGFSKESILPKRNSDKLIARKKDWDPKKYGGFDSPTVAYSVLVVAKVEKGKSKKLKSVKELLGITIMERSSFEKNPIDFLEAKGYKEVKKDLIIKLPKYSLFELENGRKRMLASAGELQKGNELALPSKYVNFLYLASHYEKLKGSPEDNEQKQLFVEQHKHYLDEIIEQISEFSKRVILADANLDKVLSAYNKHRDKPIREQAENIIHLFTLTNLGAPAAFKYFDTTIDRKRYTSTKEVLDATLIHQSITGLYETRIDLSQLGGDGGGGGGGGGGGGTLNIEDEYRLHETSKEPDVPLGSTWLSDFPQAWAETGGMGLAVRQAPLIIPLKATSTPVSIKQYPMSQEARLGIKPHIQRLLDQGILVPCQSPWNTPLLPVKKPGTNDYRPVQDLREVNKRVEDIHPTVPNPYNLLSGLPPSHQWYTVLDLKDAFFCLRLHPTSQPLFAFEWRDPEMGISGQLTWTRLPQGFKNSPTLFNEALHRDLADFRIQHPDLILLQYVDDLLLAATSEQDCQRGTRALLQTLGNLGYRASAKKAQICQKQVKYLGYLLKEGQRWLTEARKETVMGQPTPKTPRQLREFLGTAGFCRLWIPGFAEMAAPLYPLTKPGTLFNWGPDQQKAYQEIKQALLTAPALGLPDLTKPFELFVDEKQGYAKGVLTQKLGPWRRPVAYLSKKLDPVAAGWPPCLRMVAAIAVLTKDAGKLTMGQPLVILAPHAVEALVKQPPDRWLSNARMTHYQAMLLDTDRVQFGPVVALNPATLLPLPEKEAPHDCLEILAETHGTRPDLTDQPIPDADYTWYTDGSSFLQEGQRRAGAAVTTETEVIWARALPAGTSAQRAELIALTQALKMAEGKKLNVYTDSRYAFATAHVHGEIYRRRGWLTSEGREIKNKNEILALLKALFLPKRLSIIHCPGHQKGNSAEARGNRMADQAAREAAMKAVLETSTLLAGKRTADGSEFEKRTADGSEFESPKKKAKVE

SEQ ID NO: 6288 - protein, 2093 aa, synthetic construct
MPAAKRVKLDGGDKKYSIGLDIGTNSVGWAVITDEYKVPSKKFKVLGNTDRHSIKKNLIGALLFDSGETAEATRLKRTARRRYTRRKNRICYLQEIFSNEMAKVDDSFFHRLEESFLVEEDKKHERHPIFGNIVDEVAYHEKYPTIYHLRKKLVDSTDKADLRLIYLALAHMIKFRGHFLIEGDLNPDNSDVDKLFIQLVQTYNQLFEENPINASGVDAKAILSARLSKSRRLENLIAQLPGEKKNGLFGNLIALSLGLTPNFKSNFDLAEDAKLQLSKDTYDDDLDNLLAQIGDQYADLFLAAKNLSDAILLSDILRVNTEITKAPLSASMIKRYDEHHQDLTLLKALVRQQLPEKYKEIFFDQSKNGYAGYIDGGASQEEFYKFIKPILEKMDGTEELLVKLNREDLLRKQRTFDNGSIPHQIHLGELHAILRRQEDFYPFLKDNREKIEKILTFRIPYYVGPLARGNSRFAWMTRKSEETITPWNFEEVVDKGASAQSFIERMTNFDKNLPNEKVLPKHSLLYEYFTVYNELTKVKYVTEGMRKPAFLSGEQKKAIVDLLFKTNRKVTVKQLKEDYFKKIECFDSVEISGVEDRFNASLGTYHDLLKIIKDKDFLDNEENEDILEDIVLTLTLFEDREMIEERLKTYAHLFDDKVMKQLKRRRYTGWGRLSRKLINGIRDKQSGKTILDFLKSDGFANRNFMQLIHDDSLTFKEDIQKAQVSGQGDSLHEHIANLAGSPAIKKGILQTVKVVDELVKVMGRHKPENIVIEMARENQTTQKGQKNSRERMKRIEEGIKELGSQILKEHPVENTQLQNEKLYLYYLQNGRDMYVDQELDINRLSDYDVDHIVPQSFLKDDSIDNKVLTRSDKARGKSDNVPSEEVVKKMKNYWRQLLNAKLITQRKFDNLTKAERGGLSELDKAGFIKRQLVETRQITKHVAQILDSRMNTKYDENDKLIREVKVITLKSKLVSDFRKDFQFYKVREINNYHHAHDAYLNAVVGTALIKKYPKLESEFVYGDYKVYDVRKMIAKSEQEIGKATAKYFFYSNIMNFFKTEITLANGEIRKRPLIETNGETGEIVWDKGRDFATVRKVLSMPQVNIVKKTEVQTGGFSKESILPKRNSDKLIARKKDWDPKKYGGFDSPTVAYSVLVVAKVEKGKSKKLKSVKELLGITIMERSSFEKNPIDFLEAKGYKEVKKDLIIKLPKYSLFELENGRKRMLASAGELQKGNELALPSKYVNFLYLASHYEKLKGSPEDNEQKQLFVEQHKHYLDEIIEQISEFSKRVILADANLDKVLSAYNKHRDKPIREQAENIIHLFTLTNLGAPAAFKYFDTTIDRKRYTSTKEVLDATLIHQSITGLYETRIDLSQLGGDGGGGGGGGGGGGTLNIEDEYRLHETSKEPDVPLGSTWLSDFPQAWAETGGMGLAVRQAPLIIPLKATSTPVSIKQYPMSQEARLGIKPHIQRLLDQGILVPCQSPWNTPLLPVKKPGTNDYRPVQDLREVNKRVEDIHPTVPNPYNLLSGLPPSHQWYTVLDLKDAFFCLRLHPTSQPLFAFEWRDPEMGISGQLTWTRLPQGFKNSPTLFNEALHRDLADFRIQHPDLILLQYVDDLLLAATSEQDCQRGTRALLQTLGNLGYRASAKKAQICQKQVKYLGYLLKEGQRWLTEARKETVMGQPTPKTPRQLREFLGKAGFCRLFIPGFAEMAAPLYPLTKPGTLFNWGPDQQKAYQEIKQALLTAPALGLPDLTKPFELFVDEKQGYAKGVLTQKLGPWRRPVAYLSKKLDPVAAGWPPCLRMVAAIAVLTKDAGKLTMGQPLVILAPHAVEALVKQPPDRWLSNARMTHYQAMLLDTDRVQFGPVVALNPATLLPLPEKEAPHDCLEILAETHGTRPDLTDQPIPDADYTWYTDGSSFLQEGQRRAGAAVTTETEVIWARALPAGTSAQRAELIALTQALKMAEGKKLNVYTDSRYAFATAHVHGEIYRRRGWLTSEGREIKNKNEILALLKALFLPKRLSIIHCPGHQKGNSAEARGNRMADQAAREAAMKAVLETSTLLAGKRTADGSEFEKRTADGSEFESPKKKAKVE

SEQ ID NO: 6289 - protein, 2090 aa, synthetic construct
MPAAKRVKLDGGDKKYSIGLDIGTNSVGWAVITDEYKVPSKKFKVLGNTDRHSIKKNLIGALLFDSGETAEATRLKRTARRRYTRRKNRICYLQEIFSNEMAKVDDSFFHRLEESFLVEEDKKHERHPIFGNIVDEVAYHEKYPTIYHLRKKLVDSTDKADLRLIYLALAHMIKFRGHFLIEGDLNPDNSDVDKLFIQLVQTYNQLFEENPINASGVDAKAILSARLSKSRRLENLIAQLPGEKKNGLFGNLIALSLGLTPNFKSNFDLAEDAKLQLSKDTYDDDLDNLLAQIGDQYADLFLAAKNLSDAILLSDILRVNTEITKAPLSASMIKRYDEHHQDLTLLKALVRQQLPEKYKEIFFDQSKNGYAGYIDGGASQEEFYKFIKPILEKMDGTEELLVKLNREDLLRKQRTFDNGSIPHQIHLGELHAILRRQEDFYPFLKDNREKIEKILTFRIPYYVGPLARGNSRFAWMTRKSEETITPWNFEEVVDKGASAQSFIERMTNFDKNLPNEKVLPKHSLLYEYFTVYNELTKVKYVTEGMRKPAFLSGEQKKAIVDLLFKTNRKVTVKQLKEDYFKKIECFDSVEISGVEDRFNASLGTYHDLLKIIKDKDFLDNEENEDILEDIVLTLTLFEDREMIEERLKTYAHLFDDKVMKQLKRRRYTGWGRLSRKLINGIRDKQSGKTILDFLKSDGFANRNFMQLIHDDSLTFKEDIQKAQVSGQGDSLHEHIANLAGSPAIKKGILQTVKVVDELVKVMGRHKPENIVIEMARENQTTQKGQKNSRERMKRIEEGIKELGSQILKEHPVENTQLQNEKLYLYYLQNGRDMYVDQELDINRLSDYDVDHIVPQSFLKDDSIDNKVLTRSDKARGKSDNVPSEEVVKKMKNYWRQLLNAKLITQRKFDNLTKAERGGLSELDKAGFIKRQLVETRQITKHVAQILDSRMNTKYDENDKLIREVKVITLKSKLVSDFRKDFQFYKVREINNYHHAHDAYLNAVVGTALIKKYPKLESEFVYGDYKVYDVRKMIAKSEQEIGKATAKYFFYSNIMNFFKTEITLANGEIRKRPLIETNGETGEIVWDKGRDFATVRKVLSMPQVNIVKKTEVQTGGFSKESILPKRNSDKLIARKKDWDPKKYGGFDSPTVAYSVLVVAKVEKGKSKKLKSVKELLGITIMERSSFEKNPIDFLEAKGYKEVKKDLIIKLPKYSLFELENGRKRMLASAGELQKGNELALPSKYVNFLYLASHYEKLKGSPEDNEQKQLFVEQHKHYLDEIIEQISEFSKRVILADANLDKVLSAYNKHRDKPIREQAENIIHLFTLTNLGAPAAFKYFDTTIDRKRYTSTKEVLDATLIHQSITGLYETRIDLSQLGGDGGGSSGGTAPLEEEYRLFLEAPIQNVTLLEQWKREIPKVWAEINPPGLASTQAPIHVQLLSTALPVRVRQYPITLEAKRSLRETIRKFRAAGILRPVHSPWNTPLLPVRKSGTSEYRMVQDLREVNKRVETIHPTVPNPYTLLSLLPPDRIWYSVLDLKDAFFCIPLAPESQLIFAFEWADAEEGESGQLTWTRLPQGFKNSPTLFNEALNRDLQGFRLDHPSVSLLQYVDDLLIAADTQAACLSATRDLLMTLAELGYRVSGKKAQLCQEEVTYLGFKIHKGSRSLSNSRTQAILQIPVPKTKRQVREFLGTIGYCRLWIPGFAELAQPLYAATRPGNDPLVWGEKEEEAFQSLKLALTQPPALALPSLDKPFQLFVEETSGAAKGVLTQALGPWKRPVAYLSKRLDPVAAGWPRCLRAIAAAALLTREASKLTFGQDIEITSSHNLESLLRSPPDKWLTNARITQYQVLLLDPPRVRFKQTAALNPATLLPETDDTLPIHHCLDTLDSLTSTRPDLTDQPLAQAEATLFTDGSSYIRDGKRYAGAAVVTLDSVIWAEPLPIGTSAQKAELIALTKALEWSKDKSVNIYTDSRYAFATLHVHGMIYRERGWLTAGGKAIKNAPEILALLTAVWLPKRVAVMHCKGHQKDDAPTSTGNRRADEVAREVAIRPLSTQATISAGKRTADGSEFEKRTADGSEFESPKKKAKVE

SEQ ID NO: 6290 - protein, 2210 aa, synthetic construct
MPAAKRVKLDGGDKKYSIGLDIGTNSVGWAVITDEYKVPSKKFKVLGNTDRHSIKKNLIGALLFDSGETAEATRLKRTARRRYTRRKNRICYLQEIFSNEMAKVDDSFFHRLEESFLVEEDKKHERHPIFGNIVDEVAYHEKYPTIYHLRKKLVDSTDKADLRLIYLALAHMIKFRGHFLIEGDLNPDNSDVDKLFIQLVQTYNQLFEENPINASGVDAKAILSARLSKSRRLENLIAQLPGEKKNGLFGNLIALSLGLTPNFKSNFDLAEDAKLQLSKDTYDDDLDNLLAQIGDQYADLFLAAKNLSDAILLSDILRVNTEITKAPLSASMIKRYDEHHQDLTLLKALVRQQLPEKYKEIFFDQSKNGYAGYIDGGASQEEFYKFIKPILEKMDGTEELLVKLNREDLLRKQRTFDNGSIPHQIHLGELHAILRRQEDFYPFLKDNREKIEKILTFRIPYYVGPLARGNSRFAWMTRKSEETITPWNFEEVVDKGASAQSFIERMTNFDKNLPNEKVLPKHSLLYEYFTVYNELTKVKYVTEGMRKPAFLSGEQKKAIVDLLFKTNRKVTVKQLKEDYFKKIECFDSVEISGVEDRFNASLGTYHDLLKIIKDKDFLDNEENEDILEDIVLTLTLFEDREMIEERLKTYAHLFDDKVMKQLKRRRYTGWGRLSRKLINGIRDKQSGKTILDFLKSDGFANRNFMQLIHDDSLTFKEDIQKAQVSGQGDSLHEHIANLAGSPAIKKGILQTVKVVDELVKVMGRHKPENIVIEMARENQTTQKGQKNSRERMKRIEEGIKELGSQILKEHPVENTQLQNEKLYLYYLQNGRDMYVDQELDINRLSDYDVDHIVPQSFLKDDSIDNKVLTRSDKARGKSDNVPSEEVVKKMKNYWRQLLNAKLITQRKFDNLTKAERGGLSELDKAGFIKRQLVETRQITKHVAQILDSRMNTKYDENDKLIREVKVITLKSKLVSDFRKDFQFYKVREINNYHHAHDAYLNAVVGTALIKKYPKLESEFVYGDYKVYDVRKMIAKSEQEIGKATAKYFFYSNIMNFFKTEITLANGEIRKRPLIETNGETGEIVWDKGRDFATVRKVLSMPQVNIVKKTEVQTGGFSKESILPKRNSDKLIARKKDWDPKKYGGFDSPTVAYSVLVVAKVEKGKSKKLKSVKELLGITIMERSSFEKNPIDFLEAKGYKEVKKDLIIKLPKYSLFELENGRKRMLASAGELQKGNELALPSKYVNFLYLASHYEKLKGSPEDNEQKQLFVEQHKHYLDEIIEQISEFSKRVILADANLDKVLSAYNKHRDKPIREQAENIIHLFTLTNLGAPAAFKYFDTTIDRKRYTSTKEVLDATLIHQSITGLYETRIDLSQLGGDGGGSSGGTLGDQGSRGSDPLPEPRVTLTVEGIPTEFLVNTGAEHSVLTKPMGKMGSKRTVVAGATGSKVYPWTTKRLLKIGQKQVTHSFLVIPECPAPLLGRDLLTKLKAQIQFSTEGPQVTWEDRPAMCLVLNLEEEYRLHEKPVPPSIDPSWLQLFPMVWAEKAGMGLANQVPPVVVELKSDASPVAVRQYPMSKEAREGIRPHIQRFLDLGILVPCQSPWNTPLLPVKKPGTNDYRPVQDLREVNKRVQDIHPTVPNPYNLLSSLPPSHTWYSVLDLKDAFFCLKLHPNSQPLFAFEWRDPEKGNTGQLTWTRLPQGFKNSPTLFNEALHRDLASFRALNPQVVMLQYVDDLLVAAPTYRDCKEGTRRLLQELSKLGYRVSAKKAQLCREEVTYLGYLLKGGKRWLTPARKATVMKIPTPTTPRQVREFLGTAGFCRLWIPGFASLAAPLYPLTRPKVPFTWTEAHQEAFGRIKEALLSAPALALPDLTKPFALYVDEKEGVARGVLTQTLGPWRRPVAYLSKKLDPVASGWPTCLKAIAAVALLLKDADKLTLGQNVLVIAPHNLESIVRQPPDRWMTNARMTHYQSLLLNERVSFAPPAILNPATLLPVESDDTPIHICSEILAEETGTRPDLRDQPLPGVPAWYTDGSSFIMDGRRQAGAAIVDNKRTVWASNLPEGTSAQKAELIALTQALRLAEGKSINIYTDSRYAFATAHVHGAIYKQRGWLTSAGKDIKNKEEILALLEAIHLPKRVAIIHCPGHQRGTDPVATGNRKADEAAKQAAQSTRILTETTKNAGKRTADGSEFEKRTADGSEFESPKKKAKVE

SEQ ID NO: 6291 - protein, 2088 aa, synthetic construct
MPAAKRVKLDGGDKKYSIGLDIGTNSVGWAVITDEYKVPSKKFKVLGNTDRHSIKKNLIGALLFDSGETAEATRLKRTARRRYTRRKNRICYLQEIFSNEMAKVDDSFFHRLEESFLVEEDKKHERHPIFGNIVDEVAYHEKYPTIYHLRKKLVDSTDKADLRLIYLALAHMIKFRGHFLIEGDLNPDNSDVDKLFIQLVQTYNQLFEENPINASGVDAKAILSARLSKSRRLENLIAQLPGEKKNGLFGNLIALSLGLTPNFKSNFDLAEDAKLQLSKDTYDDDLDNLLAQIGDQYADLFLAAKNLSDAILLSDILRVNTEITKAPLSASMIKRYDEHHQDLTLLKALVRQQLPEKYKEIFFDQSKNGYAGYIDGGASQEEFYKFIKPILEKMDGTEELLVKLNREDLLRKQRTFDNGSIPHQIHLGELHAILRRQEDFYPFLKDNREKIEKILTFRIPYYVGPLARGNSRFAWMTRKSEETITPWNFEEVVDKGASAQSFIERMTNFDKNLPNEKVLPKHSLLYEYFTVYNELTKVKYVTEGMRKPAFLSGEQKKAIVDLLFKTNRKVTVKQLKEDYFKKIECFDSVEISGVEDRFNASLGTYHDLLKIIKDKDFLDNEENEDILEDIVLTLTLFEDREMIEERLKTYAHLFDDKVMKQLKRRRYTGWGRLSRKLINGIRDKQSGKTILDFLKSDGFANRNFMQLIHDDSLTFKEDIQKAQVSGQGDSLHEHIANLAGSPAIKKGILQTVKVVDELVKVMGRHKPENIVIEMARENQTTQKGQKNSRERMKRIEEGIKELGSQILKEHPVENTQLQNEKLYLYYLQNGRDMYVDQELDINRLSDYDVDHIVPQSFLKDDSIDNKVLTRSDKARGKSDNVPSEEVVKKMKNYWRQLLNAKLITQRKFDNLTKAERGGLSELDKAGFIKRQLVETRQITKHVAQILDSRMNTKYDENDKLIREVKVITLKSKLVSDFRKDFQFYKVREINNYHHAHDAYLNAVVGTALIKKYPKLESEFVYGDYKVYDVRKMIAKSEQEIGKATAKYFFYSNIMNFFKTEITLANGEIRKRPLIETNGETGEIVWDKGRDFATVRKVLSMPQVNIVKKTEVQTGGFSKESILPKRNSDKLIARKKDWDPKKYGGFDSPTVAYSVLVVAKVEKGKSKKLKSVKELLGITIMERSSFEKNPIDFLEAKGYKEVKKDLIIKLPKYSLFELENGRKRMLASAGELQKGNELALPSKYVNFLYLASHYEKLKGSPEDNEQKQLFVEQHKHYLDEIIEQISEFSKRVILADANLDKVLSAYNKHRDKPIREQAENIIHLFTLTNLGAPAAFKYFDTTIDRKRYTSTKEVLDATLIHQSITGLYETRIDLSQLGGDGGGSSGGTLNLEDEYRLYETSAEPEVSPGSTWLSDFPQAWAETGGMGLAVRQAPLIIPLKATSTPVSIKQYPMSQEAKLGIKPHIQRLLDQGILVPCQSPWNTPLLPVKKPGTNDYRPVQDLREVNKRVEDIHPTVPNPYNLLSGLPPSHRWYTVLDLKDAFFCLRLHPTSQPLFAFEWRDPGMGISGQLTWTRLPQGFKNSPTLFNEALHRDLADFRIQHPDLILLQYVDDILLAATSELDCQQGTRALLLTLGNLGYRASAKKAQLCQKQVKYLGYLLKEGQRWLTEARKETVMGQPTPKTPRQLREFLGKAGFCRLFIPGFAEMAAPLYPLTKPGTLFNWGPDQQKAYQEIKQALLTAPALGLPDLTKPFELFVDEKQGYAKGVLTQKLGPWRRPVAYLSKKLDPVAAGWPPCLRMVAAIAVLRKDAGKLTMGQPLVILAPHAVEALVKQPPDRWLSNARMTHYQAMLLDTDRVQFGPVVALNPATLLPLPEEGAPHDCLEILAETHGTRPDLTDQPIPDADHTWYTDGSSFLQEGQRKAGAAVTTETEVIWARALPAGTSAQRAELIALTQALKMAEGKRLNVYTDSRYAFATAHIHGEIYRRRGWLTSEGREIKNKSEILALLKALFLPKRLSIIHCLGHQKGDSAEARGNRLADQAAREAAIKTPPDTSTLLAGKRTADGSEFEKRTADGSEFESPKKKAKVE

SEQ ID NO: 6292 - protein, 2088 aa, synthetic construct
MPAAKRVKLDGGDKKYSIGLDIGTNSVGWAVITDEYKVPSKKFKVLGNTDRHSIKKNLIGALLFDSGETAEATRLKRTARRRYTRRKNRICYLQEIFSNEMAKVDDSFFHRLEESFLVEEDKKHERHPIFGNIVDEVAYHEKYPTIYHLRKKLVDSTDKADLRLIYLALAHMIKFRGHFLIEGDLNPDNSDVDKLFIQLVQTYNQLFEENPINASGVDAKAILSARLSKSRRLENLIAQLPGEKKNGLFGNLIALSLGLTPNFKSNFDLAEDAKLQLSKDTYDDDLDNLLAQIGDQYADLFLAAKNLSDAILLSDILRVNTEITKAPLSASMIKRYDEHHQDLTLLKALVRQQLPEKYKEIFFDQSKNGYAGYIDGGASQEEFYKFIKPILEKMDGTEELLVKLNREDLLRKQRTFDNGSIPHQIHLGELHAILRRQEDFYPFLKDNREKIEKILTFRIPYYVGPLARGNSRFAWMTRKSEETITPWNFEEVVDKGASAQSFIERMTNFDKNLPNEKVLPKHSLLYEYFTVYNELTKVKYVTEGMRKPAFLSGEQKKAIVDLLFKTNRKVTVKQLKEDYFKKIECFDSVEISGVEDRFNASLGTYHDLLKIIKDKDFLDNEENEDILEDIVLTLTLFEDREMIEERLKTYAHLFDDKVMKQLKRRRYTGWGRLSRKLINGIRDKQSGKTILDFLKSDGFANRNFMQLIHDDSLTFKEDIQKAQVSGQGDSLHEHIANLAGSPAIKKGILQTVKVVDELVKVMGRHKPENIVIEMARENQTTQKGQKNSRERMKRIEEGIKELGSQILKEHPVENTQLQNEKLYLYYLQNGRDMYVDQELDINRLSDYDVDHIVPQSFLKDDSIDNKVLTRSDKARGKSDNVPSEEVVKKMKNYWRQLLNAKLITQRKFDNLTKAERGGLSELDKAGFIKRQLVETRQITKHVAQILDSRMNTKYDENDKLIREVKVITLKSKLVSDFRKDFQFYKVREINNYHHAHDAYLNAVVGTALIKKYPKLESEFVYGDYKVYDVRKMIAKSEQEIGKATAKYFFYSNIMNFFKTEITLANGEIRKRPLIETNGETGEIVWDKGRDFATVRKVLSMPQVNIVKKTEVQTGGFSKESILPKRNSDKLIARKKDWDPKKYGGFDSPTVAYSVLVVAKVEKGKSKKLKSVKELLGITIMERSSFEKNPIDFLEAKGYKEVKKDLIIKLPKYSLFELENGRKRMLASAGELQKGNELALPSKYVNFLYLASHYEKLKGSPEDNEQKQLFVEQHKHYLDEIIEQISEFSKRVILADANLDKVLSAYNKHRDKPIREQAENIIHLFTLTNLGAPAAFKYFDTTIDRKRYTSTKEVLDATLIHQSITGLYETRIDLSQLGGDGGGSSGGTLGIEDEYRLHETSTEPDVSLGSTWLSDFPQAWAETGGMGLAVRQAPLIIPLKATSTPVSIQQYPMSHEARLGIKPHIQRLLDQGILVPCQSPWNTPLLPVKKPGTNDYRPVQDLREVNKRVEDIHPTVPNPYNLLSGLPPSHQWYTVLDLKDAFFCLRLHPTSQPLFAFEWRDPGMGISGQLTWTRLPQGFKNSPTLFNEALHRDLADFRIQHPDLILLQYVDDILLAATSELDCQQGTRALLQTLGDLGYRASAKKAQICQKQVKYLGYLLREGQRWLTEARKETVMGQPVPKTPRQLREFLGTAGFCRLWIPGFAEMAAPLYPLTKPGTLFSWGPDQQKAYQEIKQALLTAPALGLPDLTKPFELFVDEKQGYAKGVLTQKLGPWRRPVAYLSKKLDPVAAGWPPCLRMVAAIAVLTKDAGKLTMGQPLVILAPHAVEALVKQPPDRWLSNARMTHYQAMLLDTDRVQFGPVVALNPATLLPLPEEGAPHDCLEILAETHGTRPDLTDQPIPDADHTWYTDGSSFLQEGQRKAGAAVTTETEVIWAGALPAGTSAQRAELIALTQALKMAEGKRLNVYTDSRYAFATAHIHGEIYRRRGWLTSEGREIKNKSEILALLKALFLPKRLSIIHCLGHQKGDSAEARGNRLADQAAREAAIKTPPDTSTLLAGKRTADGSEFEKRTADGSEFESPKKKAKVE

SEQ ID NO: 6293 - protein, 2080 aa, synthetic construct
MPAAKRVKLDGGDKKYSIGLDIGTNSVGWAVITDEYKVPSKKFKVLGNTDRHSIKKNLIGALLFDSGETAEATRLKRTARRRYTRRKNRICYLQEIFSNEMAKVDDSFFHRLEESFLVEEDKKHERHPIFGNIVDEVAYHEKYPTIYHLRKKLVDSTDKADLRLIYLALAHMIKFRGHFLIEGDLNPDNSDVDKLFIQLVQTYNQLFEENPINASGVDAKAILSARLSKSRRLENLIAQLPGEKKNGLFGNLIALSLGLTPNFKSNFDLAEDAKLQLSKDTYDDDLDNLLAQIGDQYADLFLAAKNLSDAILLSDILRVNTEITKAPLSASMIKRYDEHHQDLTLLKALVRQQLPEKYKEIFFDQSKNGYAGYIDGGASQEEFYKFIKPILEKMDGTEELLVKLNREDLLRKQRTFDNGSIPHQIHLGELHAILRRQEDFYPFLKDNREKIEKILTFRIPYYVGPLARGNSRFAWMTRKSEETITPWNFEEVVDKGASAQSFIERMTNFDKNLPNEKVLPKHSLLYEYFTVYNELTKVKYVTEGMRKPAFLSGEQKKAIVDLLFKTNRKVTVKQLKEDYFKKIECFDSVEISGVEDRFNASLGTYHDLLKIIKDKDFLDNEENEDILEDIVLTLTLFEDREMIEERLKTYAHLFDDKVMKQLKRRRYTGWGRLSRKLINGIRDKQSGKTILDFLKSDGFANRNFMQLIHDDSLTFKEDIQKAQVSGQGDSLHEHIANLAGSPAIKKGILQTVKVVDELVKVMGRHKPENIVIEMARENQTTQKGQKNSRERMKRIEEGIKELGSQILKEHPVENTQLQNEKLYLYYLQNGRDMYVDQELDINRLSDYDVDHIVPQSFLKDDSIDNKVLTRSDKARGKSDNVPSEEVVKKMKNYWRQLLNAKLITQRKFDNLTKAERGGLSELDKAGFIKRQLVETRQITKHVAQILDSRMNTKYDENDKLIREVKVITLKSKLVSDFRKDFQFYKVREINNYHHAHDAYLNAVVGTALIKKYPKLESEFVYGDYKVYDVRKMIAKSEQEIGKATAKYFFYSNIMNFFKTEITLANGEIRKRPLIETNGETGEIVWDKGRDFATVRKVLSMPQVNIVKKTEVQTGGFSKESILPKRNSDKLIARKKDWDPKKYGGFDSPTVAYSVLVVAKVEKGKSKKLKSVKELLGITIMERSSFEKNPIDFLEAKGYKEVKKDLIIKLPKYSLFELENGRKRMLASAGELQKGNELALPSKYVNFLYLASHYEKLKGSPEDNEQKQLFVEQHKHYLDEIIEQISEFSKRVILADANLDKVLSAYNKHRDKPIREQAENIIHLFTLTNLGAPAAFKYFDTTIDRKRYTSTKEVLDATLIHQSITGLYETRIDLSQLGGDGGGSSGGLDDEYRLYSPLVKPDQNIQFWLEQFPQAWAETAGMGLAKQVPPQVIQLKASATPVSVRQYPLSKEAQEGIRPHVQRLIQQGILVPVQSPWNTPLLPVRKPGTNDYRPVQDLREVNKRVQDIHPTVPNPYNLLCALPPQRSWYTVLDLKDAFFCLRLHPTSQPLFAFEWRDPGTGRTGQLTWTRLPQGFKNSPTIFNEALHRDLANFRIQHPQVTLLQYVDDLLLAGATKQDCLEGTKALLLELSDLGYRASAKKAQICRREVTYLGYSLRDGQRWLTEARKKTVVQIPAPTTAKQVREFLGKAGFCRLFIPGFATLAAPLYPLTKPKGEFSWAPEHQKAFDAIKKALLSAPALALPDVTKPFTLYVDERKGVARGVLTQTLGPWRRPVAYLSKKLDPVASGWPVCLKAIAAVAILVKDADKLTLGQNITVIAPHALENIVRQPPDRWMTNARMTHYQSLLLTERVTFAPPAALNPATLLPEETDEPVTHDCHQLLIEETGVRKDLTDIPLTGEVLTWFTDGSSYVVEGKRMAGAAVVDGTRTIWASSLPEGTSAQKAELMALTQALRLAEGKSINIYTDSRYAFATAHVHGAIYKQRGWLTSAGREIKNKEEILSLLEALHLPKRLAIIHCPGHQKAKDPISRGNQMADRVAKQAAQGVNLLPAGKRTADGSEFEKRTADGSEFESPKKKAKVE

SEQ ID NO: 6294 - protein, 2080 aa, synthetic construct; identical to SEQ ID NO: 6293

SEQ ID NO: 6295 - protein, 2168 aa, synthetic construct
MPAAKRVKLDGGDKKYSIGLDIGTNSVGWAVITDEYKVPSKKFKVLGNTDRHSIKKNLIGALLFDSGETAEATRLKRTARRRYTRRKNRICYLQEIFSNEMAKVDDSFFHRLEESFLVEEDKKHERHPIFGNIVDEVAYHEKYPTIYHLRKKLVDSTDKADLRLIYLALAHMIKFRGHFLIEGDLNPDNSDVDKLFIQLVQTYNQLFEENPINASGVDAKAILSARLSKSRRLENLIAQLPGEKKNGLFGNLIALSLGLTPNFKSNFDLAEDAKLQLSKDTYDDDLDNLLAQIGDQYADLFLAAKNLSDAILLSDILRVNTEITKAPLSASMIKRYDEHHQDLTLLKALVRQQLPEKYKEIFFDQSKNGYAGYIDGGASQEEFYKFIKPILEKMDGTEELLVKLNREDLLRKQRTFDNGSIPHQIHLGELHAILRRQEDFYPFLKDNREKIEKILTFRIPYYVGPLARGNSRFAWMTRKSEETITPWNFEEVVDKGASAQSFIERMTNFDKNLPNEKVLPKHSLLYEYFTVYNELTKVKYVTEGMRKPAFLSGEQKKAIVDLLFKTNRKVTVKQLKEDYFKKIECFDSVEISGVEDRFNASLGTYHDLLKIIKDKDFLDNEENEDILEDIVLTLTLFEDREMIEERLKTYAHLFDDKVMKQLKRRRYTGWGRLSRKLINGIRDKQSGKTILDFLKSDGFANRNFMQLIHDDSLTFKEDIQKAQVSGQGDSLHEHIANLAGSPAIKKGILQTVKVVDELVKVMGRHKPENIVIEMARENQTTQKGQKNSRERMKRIEEGIKELGSQILKEHPVENTQLQNEKLYLYYLQNGRDMYVDQELDINRLSDYDVDHIVPQSFLKDDSIDNKVLTRSDKARGKSDNVPSEEVVKKMKNYWRQLLNAKLITQRKFDNLTKAERGGLSELDKAGFIKRQLVETRQITKHVAQILDSRMNTKYDENDKLIREVKVITLKSKLVSDFRKDFQFYKVREINNYHHAHDAYLNAVVGTALIKKYPKLESEFVYGDYKVYDVRKMIAKSEQEIGKATAKYFFYSNIMNFFKTEITLANGEIRKRPLIETNGETGEIVWDKGRDFATVRKVLSMPQVNIVKKTEVQTGGFSKESILPKRNSDKLIARKKDWDPKKYGGFDSPTVAYSVLVVAKVEKGKSKKLKSVKELLGITIMERSSFEKNPIDFLEAKGYKEVKKDLIIKLPKYSLFELENGRKRMLASAGELQKGNELALPSKYVNFLYLASHYEKLKGSPEDNEQKQLFVEQHKHYLDEIIEQISEFSKRVILADANLDKVLSAYNKHRDKPIREQAENIIHLFTLTNLGAPAAFKYFDTTIDRKRYTSTKEVLDATLIHQSITGLYETRIDLSQLGGDGGGSSGGMDPLQLLQPLEAEIKGTKLKAHWNSGATITCVPQAFLEEEVPIKNIWIKTIHGEKEQPVYYLTFKIQGRKVEAEVISSPYDYILVSPSDIPWLMKKPLQLTTLVPLQEYEERLLKQTMLTGSYKEKLQSLFLKYDALWQHWENQVGHRRIKPHHIATGTVNPRPQKQYPINPKAKASIQTVINDLLKQGVLIQQNSIMNTPVYPVPKPDGKWRMVLDYREVNKTIPLIAAQNQHSAGILSSIFRGKYKTTLDLSNGFWAHSITPESYWLTAFTWLGQQYCWTRLPQGFLNSPALFNADVVDLLKEVPNVQVYVDDIYISHDDPREHLEQLEKVFSLLLNAGYVVSLKKSEIAQHEVEFLGFNITKEGRGLTETFKQKLLNITPPRDLKQLQSILGLLNFARNFIPNFSELVKPLYNIIATAPGKYITWTTDNSQQLQNIISMLNSAENLEERNPEVRLIMKVNTSPSAGYIRFYNEFAKRPIMYLNYVYTKAEVKFTNTEKLLTTIHKGLIKALDLGMGQEILVYSPIVSMTKIQKTPLPERKALPIRWITWMSYLEDPRIQFHYDKTLPELQQVPTVTDDIIAKIKHPSEFSMVFYTDGSAIKHPNVNKSHNAGMGIAQVQFKPEFTVINTWSIPLGDHTAQLAEVAAVEFACKKALKIDGPVLIVTDSFYVAESVNKELPYWQSNGFFNNKKKPLKHVSKWKSIADCIQLKPDIIIIHEKGHQPTASTFHTEGNNLADKLATQGSYVVNAGKRTADGSEFEKRTADGSEFESPKKKAKVE

SEQ ID NO: 6296 - protein, 2079 aa, synthetic construct
MPAAKRVKLDGGDKKYSIGLDIGTNSVGWAVITDEYKVPSKKFKVLGNTDRHSIKKNLIGALLFDSGETAEATRLKRTARRRYTRRKNRICYLQEIFSNEMAKVDDSFFHRLEESFLVEEDKKHERHPIFGNIVDEVAYHEKYPTIYHLRKKLVDSTDKADLRLIYLALAHMIKFRGHFLIEGDLNPDNSDVDKLFIQLVQTYNQLFEENPINASGVDAKAILSARLSKSRRLENLIAQLPGEKKNGLFGNLIALSLGLTPNFKSNFDLAEDAKLQLSKDTYDDDLDNLLAQIGDQYADLFLAAKNLSDAILLSDILRVNTEITKAPLSASMIKRYDEHHQDLTLLKALVRQQLPEKYKEIFFDQSKNGYAGYIDGGASQEEFYKFIKPILEKMDGTEELLVKLNREDLLRKQRTFDNGSIPHQIHLGELHAILRRQEDFYPFLKDNREKIEKILTFRIPYYVGPLARGNSRFAWMTRKSEETITPWNFEEVVDKGASAQSFIERMTNFDKNLPNEKVLPKHSLLYEYFTVYNELTKVKYVTEGMRKPAFLSGEQKKAIVDLLFKTNRKVTVKQLKEDYFKKIECFDSVEISGVEDRFNASLGTYHDLLKIIKDKDFLDNEENEDILEDIVLTLTLFEDREMIEERLKTYAHLFDDKVMKQLKRRRYTGWGRLSRKLINGIRDKQSGKTILDFLKSDGFANRNFMQLIHDDSLTFKEDIQKAQVSGQGDSLHEHIANLAGSPAIKKGILQTVKVVDELVKVMGRHKPENIVIEMARENQTTQKGQKNSRERMKRIEEGIKELGSQILKEHPVENTQLQNEKLYLYYLQNGRDMYVDQELDINRLSDYDVDHIVPQSFLKDDSIDNKVLTRSDKARGKSDNVPSEEVVKKMKNYWRQLLNAKLITQRKFDNLTKAERGGLSELDKAGFIKRQLVETRQITKHVAQILDSRMNTKYDENDKLIREVKVITLKSKLVSDFRKDFQFYKVREINNYHHAHDAYLNAVVGTALIKKYPKLESEFVYGDYKVYDVRKMIAKSEQEIGKATAKYFFYSNIMNFFKTEITLANGEIRKRPLIETNGETGEIVWDKGRDFATVRKVLSMPQVNIVKKTEVQTGGFSKESILPKRNSDKLIARKKDWDPKKYGGFDSPTVAYSVLVVAKVEKGKSKKLKSVKELLGITIMERSSFEKNPIDFLEAKGYKEVKKDLIIKLPKYSLFELENGRKRMLASAGELQKGNELALPSKYVNFLYLASHYEKLKGSPEDNEQKQLFVEQHKHYLDEIIEQISEFSKRVILADANLDKVLSAYNKHRDKPIREQAENIIHLFTLTNLGAPAAFKYFDTTIDRKRYTSTKEVLDATLIHQSITGLYETRIDLSQLGGDGGGSSGGVPWLTQQPLQLTILVPLQEYQDRILNKTALPEEQKQQLKALFTKYDNLWQHWENQVGHRKIRPHNIATGDYPPRPQKQYPINPKAKPSIQIVIDDLLKQGVLTPQNSTMNTPVYPVPKPDGRWRMVLDYREVNKTIPLTAAQNQHSAGILATIVRQKYKTTLDLANGFWAHPITPDSYWLTAFTWQGKQYCWTRLPQGFLNSPALFTADAVDLLKEVPNVQVYVDDIYLSHDNPHEHIQQLEKVFQILLQAGYVVSLKKSEIGQRTVEFLGFNITKEGRGLTDTFKTKLLNVTPPKDLKQLQSILGLLNFARNFIPNFAELVQTLYNLIASSKGKYIEWTEDNTKQLNKVIEALNTASNLEERLPDQRLVIKVNTSPSAGYVRYYNESGKKPIMYLNYVFSKAELKFSMLEKLLTTMHKALIKAMDLAMGQEILVYSPIVSMTKIQKTPLPERKALPIRWITWMTYLEDPRIQFHYDKTLPELKHIPDVYTSSIPPLKHPSQYEGVFCTDGSAIKSPDPTKSNNAGMGIVHAIYNPEYKILNQWSIPLGHHTAQMAEIAAVEFACKKALKVPGPVLVITDSFYVAESANKELPYWKSNGFVNNKKEPLKHISKWKSIAECLSIKPDITIQHEKGHQPINTSIHTEGNALADKLATQGSYVVNAGKRTADGSEFEKRTADGSEFESPKKKAKVE

SEQ ID NO: 6297 - protein, 2088 aa, synthetic construct
MPAAKRVKLDGGDKKYSIGLDIGTNSVGWAVITDEYKVPSKKFKVLGNTDRHSIKKNLIGALLFDSGETAEATRLKRTARRRYTRRKNRICYLQEIFSNEMAKVDDSFFHRLEESFLVEEDKKHERHPIFGNIVDEVAYHEKYPTIYHLRKKLVDSTDKADLRLIYLALAHMIKFRGHFLIEGDLNPDNSDVDKLFIQLVQTYNQLFEENPINASGVDAKAILSARLSKSRRLENLIAQLPGEKKNGLFGNLIALSLGLTPNFKSNFDLAEDAKLQLSKDTYDDDLDNLLAQIGDQYADLFLAAKNLSDAILLSDILRVNTEITKAPLSASMIKRYDEHHQDLTLLKALVRQQLPEKYKEIFFDQSKNGYAGYIDGGASQEEFYKFIKPILEKMDGTEELLVKLNREDLLRKQRTFDNGSIPHQIHLGELHAILRRQEDFYPFLKDNREKIEKILTFRIPYYVGPLARGNSRFAWMTRKSEETITPWNFEEVVDKGASAQSFIERMTNFDKNLPNEKVLPKHSLLYEYFTVYNELTKVKYVTEGMRKPAFLSGEQKKAIVDLLFKTNRKVTVKQLKEDYFKKIECFDSVEISGVEDRFNASLGTYHDLLKIIKDKDFLDNEENEDILEDIVLTLTLFEDREMIEERLKTYAHLFDDKVMKQLKRRRYTGWGRLSRKLINGIRDKQSGKTILDFLKSDGFANRNFMQLIHDDSLTFKEDIQKAQVSGQGDSLHEHIANLAGSPAIKKGILQTVKVVDELVKVMGRHKPENIVIEMARENQTTQKGQKNSRERMKRIEEGIKELGSQILKEHPVENTQLQNEKLYLYYLQNGRDMYVDQELDINRLSDYDVDHIVPQSFLKDDSIDNKVLTRSDKARGKSDNVPSEEVVKKMKNYWRQLLNAKLITQRKFDNLTKAERGGLSELDKAGFIKRQLVETRQITKHVAQILDSRMNTKYDENDKLIREVKVITLKSKLVSDFRKDFQFYKVREINNYHHAHDAYLNAVVGTALIKKYPKLESEFVYGDYKVYDVRKMIAKSEQEIGKATAKYFFYSNIMNFFKTEITLANGEIRKRPLIETNGETGEIVWDKGRDFATVRKVLSMPQVNIVKKTEVQTGGFSKESILPKRNSDKLIARKKDWDPKKYGGFDSPTVAYSVLVVAKVEKGKSKKLKSVKELLGITIMERSSFEKNPIDFLEAKGYKEVKKDLIIKLPKYSLFELENGRKRMLASAGELQKGNELALPSKYVNFLYLASHYEKLKGSPEDNEQKQLFVEQHKHYLDEIIEQISEFSKRVILADANLDKVLSAYNKHRDKPIREQAENIIHLFTLTNLGAPAAFKYFDTTIDRKRYTSTKEVLDATLIHQSITGLYETRIDLSQLGGDGGGSSGGTLNIEDEYRLHETSKEPDVPLGSTWLSDFPQAWAETGGMGLAVRQAPLIIPLKATSTPVSIKQYPMSQEARLGIKPHIQRLLDQGILVPCQSPWNTPLLPVKKPGTNDYRPVQDLREVNKRVEDIHPTVPNPYNLLSGLPPSHQWYTVLDLKDAFFCLRLHPTSQPLFAFEWRDPEMGISGQLTWTRLPQGFKNSPTLFNEALHRDLADFRIQHPDLILLQYVDDLLLAATSEQDCQRGTRALLQTLGNLGYRASAKKAQICQKQVKYLGYLLKEGQRWLTEARKETVMGQPTPKTPRQLREFLGTAGFCRLWIPGFAEMAAPLYPLTKPGTLFNWGPDQQKAYQEIKQALLTAPALGLPDLTKPFELFVDEKQGYAKGVLTQKLGPWRRPVAYLSKKLDPVAAGWPPCLRMVAAIAVLTKDAGKLTMGQPLVILAPHAVEALVKQPPDRWLSNARMTHYQAMLLDTDRVQFGPVVALNPATLLPLPEKEAPHDCLEILAETHGTRPDLTDQPIPDADYTWYTDGSSFLQEGQRRAGAAVTTETEVIWARALPAGTSAQRAELIALTQALKMAEGKKLNVYTDSRYAFATAHVHGEIYRRRGWLTSEGREIKNKNEILALLKALFLPKRLSIIHCPGHQKGNSAEARGNRMADQAAREAAMKAVLETSTLLAGKRTADGSEFEKRTADGSEFESPKKKAKVE

SEQ ID NO: 6298 - protein, 2089 aa, synthetic construct
MPAAKRVKLDGGDKKYSIGLDIGTNSVGWAVITDEYKVPSKKFKVLGNTDRHSIKKNLIGALLFDSGETAEATRLKRTARRRYTRRKNRICYLQEIFSNEMAKVDDSFFHRLEESFLVEEDKKHERHPIFGNIVDEVAYHEKYPTIYHLRKKLVDSTDKADLRLIYLALAHMIKFRGHFLIEGDLNPDNSDVDKLFIQLVQTYNQLFEENPINASGVDAKAILSARLSKSRRLENLIAQLPGEKKNGLFGNLIALSLGLTPNFKSNFDLAEDAKLQLSKDTYDDDLDNLLAQIGDQYADLFLAAKNLSDAILLSDILRVNTEITKAPLSASMIKRYDEHHQDLTLLKALVRQQLPEKYKEIFFDQSKNGYAGYIDGGASQEEFYKFIKPILEKMDGTEELLVKLNREDLLRKQRTFDNGSIPHQIHLGELHAILRRQEDFYPFLKDNREKIEKILTFRIPYYVGPLARGNSRFAWMTRKSEETITPWNFEEVVDKGASAQSFIERMTNFDKNLPNEKVLPKHSLLYEYFTVYNELTKVKYVTEGMRKPAFLSGEQKKAIVDLLFKTNRKVTVKQLKEDYFKKIECFDSVEISGVEDRFNASLGTYHDLLKIIKDKDFLDNEENEDILEDIVLTLTLFEDREMIEERLKTYAHLFDDKVMKQLKRRRYTGWGRLSRKLINGIRDKQSGKTILDFLKSDGFANRNFMQLIHDDSLTFKEDIQKAQVSGQGDSLHEHIANLAGSPAIKKGILQTVKVVDELVKVMGRHKPENIVIEMARENQTTQKGQKNSRERMKRIEEGIKELGSQILKEHPVENTQLQNEKLYLYYLQNGRDMYVDQELDINRLSDYDVDHIVPQSFLKDDSIDNKVLTRSDKARGKSDNVPSEEVVKKMKNYWRQLLNAKLITQRKFDNLTKAERGGLSELDKAGFIKRQLVETRQITKHVAQILDSRMNTKYDENDKLIREVKVITLKSKLVSDFRKDFQFYKVREINNYHHAHDAYLNAVVGTALIKKYPKLESEFVYGDYKVYDVRKMIAKSEQEIGKATAKYFFYSNIMNFFKTEITLANGEIRKRPLIETNGETGEIVWDKGRDFATVRKVLSMPQVNIVKKTEVQTGGFSKESILPKRNSDKLIARKKDWDPKKYGGFDSPTVAYSVLVVAKVEKGKSKKLKSVKELLGITIMERSSFEKNPIDFLEAKGYKEVKKDLIIKLPKYSLFELENGRKRMLASAGELQKGNELALPSKYVNFLYLASHYEKLKGSPEDNEQKQLFVEQHKHYLDEIIEQISEFSKRVILADANLDKVLSAYNKHRDKPIREQAENIIHLFTLTNLGAPAAFKYFDTTIDRKRYTSTKEVLDATLIHQSITGLYETRIDLSQLGGDGGGSSGSSGGVLNLEEEYRLHEKPVPSSIDPSWLQLFPTVWAERAGMGLANQVPPVVVELRSGASPVAVRQYPMSKEAREGIRPHIQKFLDLGVLVPCRSPWNTPLLPVKKPGTNDYRPVQDLREINKRVQDIHPTVPNPYNLLSSLPPSYTWYSVLDLKDAFFCLRLHPNSQPLFAFEWKDPEKGNTGQLTWTRLPQGFKNSPTLFDEALHRDLAPFRALNPQVVLLQYVDDLLVAAPTYEDCKKGTQKLLQELSKLGYRVSAKKAQLCQREVTYLGYLLKEGKRWLTPARKATVMKIPVPTTPRQVREFLGTAGFCRLWIPGFASLAAPLYPLTKESIPFIWTEEHQQAFDHIKKALLSAPALALPDLTKPFTLYIDERAGVARGVLTQTLGPWRRPVAYLSKKLDPVASGWPTCLKAVAAVALLLKDADKLTLGQNVTVIASHSLESIVRQPPDRWMTNARMTHYQSLLLNERVSFAPPAVLNPATLLPVESEATPVHRCSEILAEETGTRRDLEDQPLPGVPTWYTDGSSFITEGKRRAGAPIVDGKRTVWASSLPEGTSAQKAELVALTQALRLAEGKNINIYTDSRYAFATAHIHGAIYKQRGLLTSAGKDIKNKEEILALLEAIHLPRRVAIIHCPGHQRGSNPVATGNRRADEAAKQAALSTRVLAGTTKPAGKRTADGSEFEKRTADGSEFESPKKKAKVE

SEQ ID NO: 6299 - protein, 2213 aa, synthetic construct
MPAAKRVKLDGGDKKYSIGLDIGTNSVGWAVITDEYKVPSKKFKVLGNTDRHSIKKNLIGALLFDSGETAEATRLKRTARRRYTRRKNRICYLQEIFSNEMAKVDDSFFHRLEESFLVEEDKKHERHPIFGNIVDEVAYHEKYPTIYHLRKKLVDSTDKADLRLIYLALAHMIKFRGHFLIEGDLNPDNSDVDKLFIQLVQTYNQLFEENPINASGVDAKAILSARLSKSRRLENLIAQLPGEKKNGLFGNLIALSLGLTPNFKSNFDLAEDAKLQLSKDTYDDDLDNLLAQIGDQYADLFLAAKNLSDAILLSDILRVNTEITKAPLSASMIKRYDEHHQDLTLLKALVRQQLPEKYKEIFFDQSKNGYAGYIDGGASQEEFYKFIKPILEKMDGTEELLVKLNREDLLRKQRTFDNGSIPHQIHLGELHAILRRQEDFYPFLKDNREKIEKILTFRIPYYVGPLARGNSRFAWMTRKSEETITPWNFEEVVDKGASAQSFIERMTNFDKNLPNEKVLPKHSLLYEYFTVYNELTKVKYVTEGMRKPAFLSGEQKKAIVDLLFKTNRKVTVKQLKEDYFKKIECFDSVEISGVEDRFNASLGTYHDLLKIIKDKDFLDNEENEDILEDIVLTLTLFEDREMIEERLKTYAHLFDDKVMKQLKRRRYTGWGRLSRKLINGIRDKQSGKTILDFLKSDGFANRNFMQLIHDDSLTFKEDIQKAQVSGQGDSLHEHIANLAGSPAIKKGILQTVKVVDELVKVMGRHKPENIVIEMARENQTTQKGQKNSRERMKRIEEGIKELGSQILKEHPVENTQLQNEKLYLYYLQNGRDMYVDQELDINRLSDYDVDHIVPQSFLKDDSIDNKVLTRSDKARGKSDNVPSEEVVKKMKNYWRQLLNAKLITQRKFDNLTKAERGGLSELDKAGFIKRQLVETRQITKHVAQILDSRMNTKYDENDKLIREVKVITLKSKLVSDFRKDFQFYKVREINNYHHAHDAYLNAVVGTALIKKYPKLESEFVYGDYKVYDVRKMIAKSEQEIGKATAKYFFYSNIMNFFKTEITLANGEIRKRPLIETNGETGEIVWDKGRDFATVRKVLSMPQVNIVKKTEVQTGGFSKESILPKRNSDKLIARKKDWDPKKYGGFDSPTVAYSVLVVAKVEKGKSKKLKSVKELLGITIMERSSFEKNPIDFLEAKGYKEVKKDLIIKLPKYSLFELENGRKRMLASAGELQKGNELALPSKYVNFLYLASHYEKLKGSPEDNEQKQLFVEQHKHYLDEIIEQISEFSKRVILADANLDKVLSAYNKHRDKPIREQAENIIHLFTLTNLGAPAAFKYFDTTIDRKRYTSTKEVLDATLIHQSITGLYETRIDLSQLGGDGGGSSGSSGGTLGDQGSRGSDPLPEPRVTLTVEGIPTEFLVNTGAEHSVLTKPMGKMGSKRTVVAGATGSKVYPWTTKRLLKIGQKQVTHSFLVIPECPAPLLGRDLLTKLKAQIQFSTEGPQVTWEDRPAMCLVLNLEEEYRLHEKPVPPSIDPSWLQLFPMVWAEKAGMGLANQVPPVVVELKSDASPVAVRQYPMSKEAREGIRPHIQRFLDLGILVPCQSPWNTPLLPVKKPGTNDYRPVQDLREVNKRVQDIHPTVPNPYNLLSSLPPSHTWYSVLDLKDAFFCLKLHPNSQPLFAFEWRDPEKGNTGQLTWTRLPQGFKNSPTLFNEALHRDLASFRALNPQVVMLQYVDDLLVAAPTYRDCKEGTRRLLQELSKLGYRVSAKKAQLCREEVTYLGYLLKGGKRWLTPARKATVMKIPTPTTPRQVREFLGTAGFCRLWIPGFASLAAPLYPLTRPKVPFTWTEAHQEAFGRIKEALLSAPALALPDLTKPFALYVDEKEGVARGVLTQTLGPWRRPVAYLSKKLDPVASGWPTCLKAIAAVALLLKDADKLTLGQNVLVIAPHNLESIVRQPPDRWMTNARMTHYQSLLLNERVSFAPPAILNPATLLPVESDDTPIHICSEILAEETGTRPDLRDQPLPGVPAWYTDGSSFIMDGRRQAGAAIVDNKRTVWASNLPEGTSAQKAELIALTQALRLAEGKSINIYTDSRYAFATAHVHGAIYKQRGWLTSAGKDIKNKEEILALLEAIHLPKRVAIIHCPGHQRGTDPVATGNRKADEAAKQAAQSTRILTETTKNAGKRTADGSEFEKRTADGSEFESPKKKAKVE

SEQ ID NO: 6300 - protein, 2091 aa, synthetic construct
MPAAKRVKLDGGDKKYSIGLDIGTNSVGWAVITDEYKVPSKKFKVLGNTDRHSIKKNLIGALLFDSGETAEATRLKRTARRRYTRRKNRICYLQEIFSNEMAKVDDSFFHRLEESFLVEEDKKHERHPIFGNIVDEVAYHEKYPTIYHLRKKLVDSTDKADLRLIYLALAHMIKFRGHFLIEGDLNPDNSDVDKLFIQLVQTYNQLFEENPINASGVDAKAILSARLSKSRRLENLIAQLPGEKKNGLFGNLIALSLGLTPNFKSNFDLAEDAKLQLSKDTYDDDLDNLLAQIGDQYADLFLAAKNLSDAILLSDILRVNTEITKAPLSASMIKRYDEHHQDLTLLKALVRQQLPEKYKEIFFDQSKNGYAGYIDGGASQEEFYKFIKPILEKMDGTEELLVKLNREDLLRKQRTFDNGSIPHQIHLGELHAILRRQEDFYPFLKDNREKIEKILTFRIPYYVGPLARGNSRFAWMTRKSEETITPWNFEEVVDKGASAQSFIERMTNFDKNLPNEKVLPKHSLLYEYFTVYNELTKVKYVTEGMRKPAFLSGEQKKAIVDLLFKTNRKVTVKQLKEDYFKKIECFDSVEISGVEDRFNASLGTYHDLLKIIKDKDFLDNEENEDILEDIVLTLTLFEDREMIEERLKTYAHLFDDKVMKQLKRRRYTGWGRLSRKLINGIRDKQSGKTILDFLKSDGFANRNFMQLIHDDSLTFKEDIQKAQVSGQGDSLHEHIANLAGSPAIKKGILQTVKVVDELVKVMGRHKPENIVIEMARENQTTQKGQKNSRERMKRIEEGIKELGSQILKEHPVENTQLQNEKLYLYYLQNGRDMYVDQELDINRLSDYDVDHIVPQSFLKDDSIDNKVLTRSDKARGKSDNVPSEEVVKKMKNYWRQLLNAKLITQRKFDNLTKAERGGLSELDKAGFIKRQLVETRQITKHVAQILDSRMNTKYDENDKLIREVKVITLKSKLVSDFRKDFQFYKVREINNYHHAHDAYLNAVVGTALIKKYPKLESEFVYGDYKVYDVRKMIAKSEQEIGKATAKYFFYSNIMNFFKTEITLANGEIRKRPLIETNGETGEIVWDKGRDFATVRKVLSMPQVNIVKKTEVQTGGFSKESILPKRNSDKLIARKKDWDPKKYGGFDSPTVAYSVLVVAKVEKGKSKKLKSVKELLGITIMERSSFEKNPIDFLEAKGYKEVKKDLIIKLPKYSLFELENGRKRMLASAGELQKGNELALPSKYVNFLYLASHYEKLKGSPEDNEQKQLFVEQHKHYLDEIIEQISEFSKRVILADANLDKVLSAYNKHRDKPIREQAENIIHLFTLTNLGAPAAFKYFDTTIDRKRYTSTKEVLDATLIHQSITGLYETRIDLSQLGGDGGGSSGSSGGTLGIEDEYRLHETSTEPDVSLGSTWLSDFPQAWAETGGMGLAVRQAPLIIPLKATSTPVSIQQYPMSHEARLGIKPHIQRLLDQGILVPCQSPWNTPLLPVKKPGTNDYRPVQDLREVNKRVEDIHPTVPNPYNLLSGLPPSHQWYTVLDLKDAFFCLRLHPTSQPLFAFEWRDPGMGISGQLTWTRLPQGFKNSPTLFNEALHRDLADFRIQHPDLILLQYVDDILLAATSELDCQQGTRALLQTLGDLGYRASAKKAQICQKQVKYLGYLLREGQRWLTEARKETVMGQPVPKTPRQLREFLGTAGFCRLWIPGFAEMAAPLYPLTKPGTLFSWGPDQQKAYQEIKQALLTAPALGLPDLTKPFELFVDEKQGYAKGVLTQKLGPWRRPVAYLSKKLDPVAAGWPPCLRMVAAIAVLTKDAGKLTMGQPLVILAPHAVEALVKQPPDRWLSNARMTHYQAMLLDTDRVQFGPVVALNPATLLPLPEEGAPHDCLEILAETHGTRPDLTDQPIPDADHTWYTDGSSFLQEGQRKAGAAVTTETEVIWAGALPAGTSAQRAELIALTQALKMAEGKRLNVYTDSRYAFATAHIHGEIYRRRGWLTSEGREIKNKSEILALLKALFLPKRLSIIHCLGHQKGDSAEARGNRLADQAAREAAIKTPPDTSTLLAGKRTADGSEFEKRTADGSEFESPKKKAKVE

SEQ ID NO: 6301 - protein, 2091 aa, synthetic construct
MPAAKRVKLDGGDKKYSIGLDIGTNSVGWAVITDEYKVPSKKFKVLGNTDRHSIKKNLIGALLFDSGETAEATRLKRTARRRYTRRKNRICYLQEIFSNEMAKVDDSFFHRLEESFLVEEDKKHERHPIFGNIVDEVAYHEKYPTIYHLRKKLVDSTDKADLRLIYLALAHMIKFRGHFLIEGDLNPDNSDVDKLFIQLVQTYNQLFEENPINASGVDAKAILSARLSKSRRLENLIAQLPGEKKNGLFGNLIALSLGLTPNFKSNFDLAEDAKLQLSKDTYDDDLDNLLAQIGDQYADLFLAAKNLSDAILLSDILRVNTEITKAPLSASMIKRYDEHHQDLTLLKALVRQQLPEKYKEIFFDQSKNGYAGYIDGGASQEEFYKFIKPILEKMDGTEELLVKLNREDLLRKQRTFDNGSIPHQIHLGELHAILRRQEDFYPFLKDNREKIEKILTFRIPYYVGPLARGNSRFAWMTRKSEETITPWNFEEVVDKGASAQSFIERMTNFDKNLPNEKVLPKHSLLYEYFTVYNELTKVKYVTEGMRKPAFLSGEQKKAIVDLLFKTNRKVTVKQLKEDYFKKIECFDSVEISGVEDRFNASLGTYHDLLKIIKDKDFLDNEENEDILEDIVLTLTLFEDREMIEERLKTYAHLFDDKVMKQLKRRRYTGWGRLSRKLINGIRDKQSGKTILDFLKSDGFANRNFMQLIHDDSLTFKEDIQKAQVSGQGDSLHEHIANLAGSPAIKKGILQTVKVVDELVKVMGRHKPENIVIEMARENQTTQKGQKNSRERMKRIEEGIKELGSQILKEHPVENTQLQNEKLYLYYLQNGRDMYVDQELDINRLSDYDVDHIVPQSFLKDDSIDNKVLTRSDKARGKSDNVPSEEVVKKMKNYWRQLLNAKLITQRKFDNLTKAERGGLSELDKAGFIKRQLVETRQITKHVAQILDSRMNTKYDENDKLIREVKVITLKSKLVSDFRKDFQFYKVREINNYHHAHDAYLNAVVGTALIKKYPKLESEFVYGDYKVYDVRKMIAKSEQEIGKATAKYFFYSNIMNFFKTEITLANGEIRKRPLIETNGETGEIVWDKGRDFATVRKVLSMPQVNIVKKTEVQTGGFSKESILPKRNSDKLIARKKDWDPKKYGGFDSPTVAYSVLVVAKVEKGKSKKLKSVKELLGITIMERSSFEKNPIDFLEAKGYKEVKKDLIIKLPKYSLFELENGRKRMLASAGELQKGNELALPSKYVNFLYLASHYEKLKGSPEDNEQKQLFVEQHKHYLDEIIEQISEFSKRVILADANLDKVLSAYNKHRDKPIREQAENIIHLFTLTNLGAPAAFKYFDTTIDRKRYTSTKEVLDATLIHQSITGLYETRIDLSQLGGDGGGSSGSSGGTLNIEDEHRLHETSKEPDVSLGSTWLSDFPQAWAETGGMGLAVRQAPLIIPLKATSTPVSIKQYPMSQEARLGIKPHIQRLLDQGILVPCQSPWNTPLLPVKKPGTNDYRPVQDLREVNKRVEDIHPTVPNPYNLLSGLPPSHQWYTVLDLKDAFFCLRLHPTSQPLFAFEWRDPEMGISGQLTWTRLPQGFKNSPTLFDEALHRDLADFRIQHPDLILLQYVDDLLLAATSELDCQQGTRALLQTLGNLGYRASAKKAQICQKQVKYLGYLLKEGQRWLTEARKETVMGQPTPKTPRQLREFLGTAGFCRLWIPGFAEMAAPLYPLTKTGTLFNWGPDQQKAYQEIKQALLTAPALGLPDLTKPFELFVDEKQGYAKGVLTQKLGPWRRPVAYLSKKLDPVAAGWPPCLRMVAAIAVLTKDAGKLTMGQPLVILAPHAVEALVKQPPDRWLSNARMTHYQALLLDTDRVQFGPVVALNPATLLPLPEEGLQHNCLDILAEAHGTRPDLTDQPLPDADHTWYTDGSSLLQEGQRKAGAAVTTETEVIWAKALPAGTSAQRAELIALTQALKMAEGKKLNVYTDSRYAFATAHIHGEIYRRRGLLTSEGKEIKNKDEILALLKALFLPKRLSIIHCPGHQKGHSAEARGNRMADQAARKAAITETPDTSTLLAGKRTADGSEFEKRTADGSEFESPKKKAKVE

SEQ ID NO: 6302 - protein, 2089 aa, synthetic construct
MPAAKRVKLDGGDKKYSIGLDIGTNSVGWAVITDEYKVPSKKFKVLGNTDRHSIKKNLIGALLFDSGETAEATRLKRTARRRYTRRKNRICYLQEIFSNEMAKVDDSFFHRLEESFLVEEDKKHERHPIFGNIVDEVAYHEKYPTIYHLRKKLVDSTDKADLRLIYLALAHMIKFRGHFLIEGDLNPDNSDVDKLFIQLVQTYNQLFEENPINASGVDAKAILSARLSKSRRLENLIAQLPGEKKNGLFGNLIALSLGLTPNFKSNFDLAEDAKLQLSKDTYDDDLDNLLAQIGDQYADLFLAAKNLSDAILLSDILRVNTEITKAPLSASMIKRYDEHHQDLTLLKALVRQQLPEKYKEIFFDQSKNGYAGYIDGGASQEEFYKFIKPILEKMDGTEELLVKLNREDLLRKQRTFDNGSIPHQIHLGELHAILRRQEDFYPFLKDNREKIEKILTFRIPYYVGPLARGNSRFAWMTRKSEETITPWNFEEVVDKGASAQSFIERMTNFDKNLPNEKVLPKHSLLYEYFTVYNELTKVKYVTEGMRKPAFLSGEQKKAIVDLLFKTNRKVTVKQLKEDYFKKIECFDSVEISGVEDRFNASLGTYHDLLKIIKDKDFLDNEENEDILEDIVLTLTLFEDREMIEERLKTYAHLFDDKVMKQLKRRRYTGWGRLSRKLINGIRDKQSGKTILDFLKSDGFANRNFMQLIHDDSLTFKEDIQKAQVSGQGDSLHEHIANLAGSPAIKKGILQTVKVVDELVKVMGRHKPENIVIEMARENQTTQKGQKNSRERMKRIEEGIKELGSQILKEHPVENTQLQNEKLYLYYLQNGRDMYVDQELDINRLSDYDVDHIVPQSFLKDDSIDNKVLTRSDKARGKSDNVPSEEVVKKMKNYWRQLLNAKLITQRKFDNLTKAERGGLSELDKAGFIKRQLVETRQITKHVAQILDSRMNTKYDENDKLIREVKVITLKSKLVSDFRKDFQFYKVREINNYHHAHDAYLNAVVGTALIKKYPKLESEFVYGDYKVYDVRKMIAKSEQEIGKATAKYFFYSNIMNFFKTEITLANGEIRKRPLIETNGETGEIVWDKGRDFATVRKVLSMPQVNIVKKTEVQTGGFSKESILPKRNSDKLIARKKDWDPKKYGGFDSPTVAYSVLVVAKVEKGKSKKLKSVKELLGITIMERSSFEKNPIDFLEAKGYKEVKKDLIIKLPKYSLFELENGRKRMLASAGELQKGNELALPSKYVNFLYLASHYEKLKGSPEDNEQKQLFVEQHKHYLDEIIEQISEFSKRVILADANLDKVLSAYNKHRDKPIREQAENIIHLFTLTNLGAPAAFKYFDTTIDRKRYTSTKEVLDATLIHQSITGLYETRIDLSQLGGDGGGSSGSSGGVLNLEEEYRLHEKPVPSSIDPSWLQLFPTVWAERAGMGLANQVPPVVVELRSGASPVAVRQYPMSKEAREGIRPHIQRFLDLGVLVPCQSPWNTPLLPVKKPGTNDYRPVQDLREINKRVQDIHPTVPNPYNLLSSLPPSHTWYSVLDLKDAFFCLKLHPNSQPLFAFEWRDPEKGNTGQLTWTRLPQGFKNSPTLFNEALHRDLAPFRALNPQVVLLQYVDDLLVAAPTYRDCKEGTQKLLQELSKLGYRVSAKKAQLCQKEVTYLGYLLKEGKRWLTPARKATVMKIPPPTTPRQVREFLGTAGFCRLWIPGFASLAAPLYPLTKPSIPFIWTEEHQKAFDRIKEALLSAPALALPDLTKPFTLYVDERAGVARGVLTQTLGPWRRPVAYLSKKLDPVASGWPTCLKAVAAVALLLKDADKLTLGQNVTVIASHSLESIVRQPPDRWMTNARMTHYQSLLLNERVSFAPPAVLNPATLLPVESEATPVHRCSEILAEETGTRRDLKDQPLPGVPAWYTDGSSFIAEGKRRAGAAIVDGKRTVWASSLPEGTSAQKAELVALTQALRLAEGKDINIYTDSRYAFATAHIHGAIYKQRGWLTSAGKDIKNKEEILALLEAIHLPKRVAIIHCPGHQKGNDPVATGNRRADEAAKQAALSTRVLAETTKPAGKRTADGSEFEKRTADGSEFESPKKKAKVE

SEQ ID NO: 6303 - protein, 2091 aa, synthetic construct
MPAAKRVKLDGGDKKYSIGLDIGTNSVGWAVITDEYKVPSKKFKVLGNTDRHSIKKNLIGALLFDSGETAEATRLKRTARRRYTRRKNRICYLQEIFSNEMAKVDDSFFHRLEESFLVEEDKKHERHPIFGNIVDEVAYHEKYPTIYHLRKKLVDSTDKADLRLIYLALAHMIKFRGHFLIEGDLNPDNSDVDKLFIQLVQTYNQLFEENPINASGVDAKAILSARLSKSRRLENLIAQLPGEKKNGLFGNLIALSLGLTPNFKSNFDLAEDAKLQLSKDTYDDDLDNLLAQIGDQYADLFLAAKNLSDAILLSDILRVNTEITKAPLSASMIKRYDEHHQDLTLLKALVRQQLPEKYKEIFFDQSKNGYAGYIDGGASQEEFYKFIKPILEKMDGTEELLVKLNREDLLRKQRTFDNGSIPHQIHLGELHAILRRQEDFYPFLKDNREKIEKILTFRIPYYVGPLARGNSRFAWMTRKSEETITPWNFEEVVDKGASAQSFIERMTNFDKNLPNEKVLPKHSLLYEYFTVYNELTKVKYVTEGMRKPAFLSGEQKKAIVDLLFKTNRKVTVKQLKEDYFKKIECFDSVEISGVEDRFNASLGTYHDLLKIIKDKDFLDNEENEDILEDIVLTLTLFEDREMIEERLKTYAHLFDDKVMKQLKRRRYTGWGRLSRKLINGIRDKQSGKTILDFLKSDGFANRNFMQLIHDDSLTFKEDIQKAQVSGQGDSLHEHIANLAGSPAIKKGILQTVKVVDELVKVMGRHKPENIVIEMARENQTTQKGQKNSRERMKRIEEGIKELGSQILKEHPVENTQLQNEKLYLYYLQNGRDMYVDQELDINRLSDYDVDHIVPQSFLKDDSIDNKVLTRSDKARGKSDNVPSEEVVKKMKNYWRQLLNAKLITQRKFDNLTKAERGGLSELDKAGFIKRQLVETRQITKHVAQILDSRMNTKYDENDKLIREVKVITLKSKLVSDFRKDFQFYKVREINNYHHAHDAYLNAVVGTALIKKYPKLESEFVYGDYKVYDVRKMIAKSEQEIGKATAKYFFYSNIMNFFKTEITLANGEIRKRPLIETNGETGEIVWDKGRDFATVRKVLSMPQVNIVKKTEVQTGGFSKESILPKRNSDKLIARKKDWDPKKYGGFDSPTVAYSVLVVAKVEKGKSKKLKSVKELLGITIMERSSFEKNPIDFLEAKGYKEVKKDLIIKLPKYSLFELENGRKRMLASAGELQKGNELALPSKYVNFLYLASHYEKLKGSPEDNEQKQLFVEQHKHYLDEIIEQISEFSKRVILADANLDKVLSAYNKHRDKPIREQAENIIHLFTLTNLGAPAAFKYFDTTIDRKRYTSTKEVLDATLIHQSITGLYETRIDLSQLGGDGGGSSGSSGGTLNIEDEYRLHETSKEPDVPLGSTWLSDFPQAWAETGGMGLAVRQAPLIIPLKATSTPVSIKQYPMSQEARLGIKPHIQRLLDQGILVPCQSPWNTPLLPVKKPGTNDYRPVQDLREVNKRVEDIHPTVPNPYNLLSGLPPSHQWYTVLDLKDAFFCLRLHPTSQPLFAFEWRDPEMGISGQLTWTRLPQGFKNSPTLFNEALHRDLADFRIQHPDLILLQYVDDLLLAATSEQDCQRGTRALLQTLGNLGYRASAKKAQICQKQVKYLGYLLKEGQRWLTEARKETVMGQPTPKTPRQLREFLGTAGFCRLWIPGFAEMAAPLYPLTKPGTLFNWGPDQQKAYQEIKQALLTAPALGLPDLTKPFELFVDEKQGYAKGVLTQKLGPWRRPVAYLSKKLDPVAAGWPPCLRMVAAIAVLTKDAGKLTMGQPLVILAPHAVEALVKQPPDRWLSNARMTHYQAMLLDTDRVQFGPVVALNPATLLPLPEKEAPHDCLEILAETHGTRPDLTDQPIPDADYTWYTDGSSFLQEGQRRAGAAVTTETEVIWARALPAGTSAQRAELIALTQALKMAEGKKLNVYTDSRYAFATAHVHGEIYRRRGWLTSEGREIKNKNEILALLKALFLPKRLSIIHCPGHQKGNSAEARGNRMADQAAREAAMKAVLETSTLLAGKRTADGSEFEKRTADGSEFESPKKKAKVE

SEQ ID NO: 6304 - protein, 2096 aa, synthetic construct
MPAAKRVKLDGGDKKYSIGLDIGTNSVGWAVITDEYKVPSKKFKVLGNTDRHSIKKNLIGALLFDSGETAEATRLKRTARRRYTRRKNRICYLQEIFSNEMAKVDDSFFHRLEESFLVEEDKKHERHPIFGNIVDEVAYHEKYPTIYHLRKKLVDSTDKADLRLIYLALAHMIKFRGHFLIEGDLNPDNSDVDKLFIQLVQTYNQLFEENPINASGVDAKAILSARLSKSRRLENLIAQLPGEKKNGLFGNLIALSLGLTPNFKSNFDLAEDAKLQLSKDTYDDDLDNLLAQIGDQYADLFLAAKNLSDAILLSDILRVNTEITKAPLSASMIKRYDEHHQDLTLLKALVRQQLPEKYKEIFFDQSKNGYAGYIDGGASQEEFYKFIKPILEKMDGTEELLVKLNREDLLRKQRTFDNGSIPHQIHLGELHAILRRQEDFYPFLKDNREKIEKILTFRIPYYVGPLARGNSRFAWMTRKSEETITPWNFEEVVDKGASAQSFIERMTNFDKNLPNEKVLPKHSLLYEYFTVYNELTKVKYVTEGMRKPAFLSGEQKKAIVDLLFKTNRKVTVKQLKEDYFKKIECFDSVEISGVEDRFNASLGTYHDLLKIIKDKDFLDNEENEDILEDIVLTLTLFEDREMIEERLKTYAHLFDDKVMKQLKRRRYTGWGRLSRKLINGIRDKQSGKTILDFLKSDGFANRNFMQLIHDDSLTFKEDIQKAQVSGQGDSLHEHIANLAGSPAIKKGILQTVKVVDELVKVMGRHKPENIVIEMARENQTTQKGQKNSRERMKRIEEGIKELGSQILKEHPVENTQLQNEKLYLYYLQNGRDMYVDQELDINRLSDYDVDHIVPQSFLKDDSIDNKVLTRSDKARGKSDNVPSEEVVKKMKNYWRQLLNAKLITQRKFDNLTKAERGGLSELDKAGFIKRQLVETRQITKHVAQILDSRMNTKYDENDKLIREVKVITLKSKLVSDFRKDFQFYKVREINNYHHAHDAYLNAVVGTALIKKYPKLESEFVYGDYKVYDVRKMIAKSEQEIGKATAKYFFYSNIMNFFKTEITLANGEIRKRPLIETNGETGEIVWDKGRDFATVRKVLSMPQVNIVKKTEVQTGGFSKESILPKRNSDKLIARKKDWDPKKYGGFDSPTVAYSVLVVAKVEKGKSKKLKSVKELLGITIMERSSFEKNPIDFLEAKGYKEVKKDLIIKLPKYSLFELENGRKRMLASAGELQKGNELALPSKYVNFLYLASHYEKLKGSPEDNEQKQLFVEQHKHYLDEIIEQISEFSKRVILADANLDKVLSAYNKHRDKPIREQAENIIHLFTLTNLGAPAAFKYFDTTIDRKRYTSTKEVLDATLIHQSITGLYETRIDLSQLGGDGGGSSGSSGSSGGTAPLEEEYRLFLEAPIQNVTLLEQWKREIPKVWAEINPPGLASTQAPIHVQLLSTALPVRVRQYPITLEAKRSLRETIRKFRAAGILRPVHSPWNTPLLPVRKSGTSEYRMVQDLREVNKRVETIHPTVPNPYTLLSLLPPDRIWYSVLDLKDAFFCIPLAPESQLIFAFEWADAEEGESGQLTWTRLPQGFKNSPTLFNEALNRDLQGFRLDHPSVSLLQYVDDLLIAADTQAACLSATRDLLMTLAELGYRVSGKKAQLCQEEVTYLGFKIHKGSRSLSNSRTQAILQIPVPKTKRQVREFLGTIGYCRLWIPGFAELAQPLYAATRPGNDPLVWGEKEEEAFQSLKLALTQPPALALPSLDKPFQLFVEETSGAAKGVLTQALGPWKRPVAYLSKRLDPVAAGWPRCLRAIAAAALLTREASKLTFGQDIEITSSHNLESLLRSPPDKWLTNARITQYQVLLLDPPRVRFKQTAALNPATLLPETDDTLPIHHCLDTLDSLTSTRPDLTDQPLAQAEATLFTDGSSYIRDGKRYAGAAVVTLDSVIWAEPLPIGTSAQKAELIALTKALEWSKDKSVNIYTDSRYAFATLHVHGMIYRERGWLTAGGKAIKNAPEILALLTAVWLPKRVAVMHCKGHQKDDAPTSTGNRRADEVAREVAIRPLSTQATISAGKRTADGSEFEKRTADGSEFESPKKKAKVE

SEQ ID NO: 6305 - protein, 2096 aa, synthetic construct
MPAAKRVKLDGGDKKYSIGLDIGTNSVGWAVITDEYKVPSKKFKVLGNTDRHSIKKNLIGALLFDSGETAEATRLKRTARRRYTRRKNRICYLQEIFSNEMAKVDDSFFHRLEESFLVEEDKKHERHPIFGNIVDEVAYHEKYPTIYHLRKKLVDSTDKADLRLIYLALAHMIKFRGHFLIEGDLNPDNSDVDKLFIQLVQTYNQLFEENPINASGVDAKAILSARLSKSRRLENLIAQLPGEKKNGLFGNLIALSLGLTPNFKSNFDLAEDAKLQLSKDTYDDDLDNLLAQIGDQYADLFLAAKNLSDAILLSDILRVNTEITKAPLSASMIKRYDEHHQDLTLLKALVRQQLPEKYKEIFFDQSKNGYAGYIDGGASQEEFYKFIKPILEKMDGTEELLVKLNREDLLRKQRTFDNGSIPHQIHLGELHAILRRQEDFYPFLKDNREKIEKILTFRIPYYVGPLARGNSRFAWMTRKSEETITPWNFEEVVDKGASAQSFIERMTNFDKNLPNEKVLPKHSLLYEYFTVYNELTKVKYVTEGMRKPAFLSGEQKKAIVDLLFKTNRKVTVKQLKEDYFKKIECFDSVEISGVEDRFNASLGTYHDLLKIIKDKDFLDNEENEDILEDIVLTLTLFEDREMIEERLKTYAHLFDDKVMKQLKRRRYTGWGRLSRKLINGIRDKQSGKTILDFLKSDGFANRNFMQLIHDDSLTFKEDIQKAQVSGQGDSLHEHIANLAGSPAIKKGILQTVKVVDELVKVMGRHKPENIVIEMARENQTTQKGQKNSRERMKRIEEGIKELGSQILKEHPVENTQLQNEKLYLYYLQNGRDMYVDQELDINRLSDYDVDHIVPQSFLKDDSIDNKVLTRSDKARGKSDNVPSEEVVKKMKNYWRQLLNAKLITQRKFDNLTKAERGGLSELDKAGFIKRQLVETRQITKHVAQILDSRMNTKYDENDKLIREVKVITLKSKLVSDFRKDFQFYKVREINNYHHAHDAYLNAVVGTALIKKYPKLESEFVYGDYKVYDVRKMIAKSEQEIGKATAKYFFYSNIMNFFKTEITLANGEIRKRPLIETNGETGEIVWDKGRDFATVRKVLSMPQVNIVKKTEVQTGGFSKESILPKRNSDKLIARKKDWDPKKYGGFDSPTVAYSVLVVAKVEKGKSKKLKSVKELLGITIMERSSFEKNPIDFLEAKGYKEVKKDLIIKLPKYSLFELENGRKRMLASAGELQKGNELALPSKYVNFLYLASHYEKLKGSPEDNEQKQLFVEQHKHYLDEIIEQISEFSKRVILADANLDKVLSAYNKHRDKPIREQAENIIHLFTLTNLGAPAAFKYFDTTIDRKRYTSTKEVLDATLIHQSITGLYETRIDLSQLGGDGGGSSGSSGSSGGTAPLEEEYRLFLEAPIQNVTLLEQWKREIPKVWAEINPPGLASTQAPIHVQLLSTALPVRVRQYPITLEAKRSLRETIRKFRAAGILRPVHSPWNTPLLPVRKSGTSEYRMVQDLREVNKRVETIHPTVPNPYTLLSLLPPDRIWYSVLDLKDAFFCIPLAPESQLIFAFEWADAEEGESGQLTWTRLPQGFKNSPTLFNEALNRDLQGFRLDHPSVSLLQYVDDLLIAADTQAACLSATRDLLMTLAELGYRVSGKKAQLCQEEVTYLGFKIHKGSRSLSNSRTQAILQIPVPKTKRQVREFLGKIGYCRLFIPGFAELAQPLYAATRPGNDPLVWGEKEEEAFQSLKLALTQPPALALPSLDKPFQLFVEETSGAAKGVLTQALGPWKRPVAYLSKRLDPVAAGWPRCLRAIAAAALLTREASKLTFGQDIEITSSHNLESLLRSPPDKWLTNARITQYQVLLLDPPRVRFKQTAALNPATLLPETDDTLPIHHCLDTLDSLTSTRPDLTDQPLAQAEATLFTDGSSYIRDGKRYAGAAVVTLDSVIWAEPLPIGTSAQKAELIALTKALEWSKDKSVNIYTDSRYAFATLHVHGMIYRERGWLTAGGKAIKNAPEILALLTAVWLPKRVAVMHCKGHQKDDAPTSTGNRRADEVAREVAIRPLSTQATISAGKRTADGSEFEKRTADGSEFESPKKKAKVE

SEQ ID NO: 6306 - protein, 2085 aa, synthetic construct
MPAAKRVKLDGGDKKYSIGLDIGTNSVGWAVITDEYKVPSKKFKVLGNTDRHSIKKNLIGALLFDSGETAEATRLKRTARRRYTRRKNRICYLQEIFSNEMAKVDDSFFHRLEESFLVEEDKKHERHPIFGNIVDEVAYHEKYPTIYHLRKKLVDSTDKADLRLIYLALAHMIKFRGHFLIEGDLNPDNSDVDKLFIQLVQTYNQLFEENPINASGVDAKAILSARLSKSRRLENLIAQLPGEKKNGLFGNLIALSLGLTPNFKSNFDLAEDAKLQLSKDTYDDDLDNLLAQIGDQYADLFLAAKNLSDAILLSDILRVNTEITKAPLSASMIKRYDEHHQDLTLLKALVRQQLPEKYKEIFFDQSKNGYAGYIDGGASQEEFYKFIKPILEKMDGTEELLVKLNREDLLRKQRTFDNGSIPHQIHLGELHAILRRQEDFYPFLKDNREKIEKILTFRIPYYVGPLARGNSRFAWMTRKSEETITPWNFEEVVDKGASAQSFIERMTNFDKNLPNEKVLPKHSLLYEYFTVYNELTKVKYVTEGMRKPAFLSGEQKKAIVDLLFKTNRKVTVKQLKEDYFKKIECFDSVEISGVEDRFNASLGTYHDLLKIIKDKDFLDNEENEDILEDIVLTLTLFEDREMIEERLKTYAHLFDDKVMKQLKRRRYTGWGRLSRKLINGIRDKQSGKTILDFLKSDGFANRNFMQLIHDDSLTFKEDIQKAQVSGQGDSLHEHIANLAGSPAIKKGILQTVKVVDELVKVMGRHKPENIVIEMARENQTTQKGQKNSRERMKRIEEGIKELGSQILKEHPVENTQLQNEKLYLYYLQNGRDMYVDQELDINRLSDYDVDHIVPQSFLKDDSIDNKVLTRSDKARGKSDNVPSEEVVKKMKNYWRQLLNAKLITQRKFDNLTKAERGGLSELDKAGFIKRQLVETRQITKHVAQILDSRMNTKYDENDKLIREVKVITLKSKLVSDFRKDFQFYKVREINNYHHAHDAYLNAVVGTALIKKYPKLESEFVYGDYKVYDVRKMIAKSEQEIGKATAKYFFYSNIMNFFKTEITLANGEIRKRPLIETNGETGEIVWDKGRDFATVRKVLSMPQVNIVKKTEVQTGGFSKESILPKRNSDKLIARKKDWDPKKYGGFDSPTVAYSVLVVAKVEKGKSKKLKSVKELLGITIMERSSFEKNPIDFLEAKGYKEVKKDLIIKLPKYSLFELENGRKRMLASAGELQKGNELALPSKYVNFLYLASHYEKLKGSPEDNEQKQLFVEQHKHYLDEIIEQISEFSKRVILADANLDKVLSAYNKHRDKPIREQAENIIHLFTLTNLGAPAAFKYFDTTIDRKRYTSTKEVLDATLIHQSITGLYETRIDLSQLGGDGGGSSGSSGSSGGVPWILKKPLELTIKLDLEEQQGTLLNNSILSKKGKEELKQLFEKYSALWQSWENQVGHRRIRPHKIATGTVKPTPQKQYHINPKAKPDIQIVINDLLKQGVLIQKESTMNTPVYPVPKPNGRWRMVLDYRAVNKVTPLIAVQNQHSYGILGSLFKGRYKTTIDLSNGFWAHPIVPEDYWITAFTWQGKQYCWTVLPQGFLNSPGLFTGDVVDLLQGIPNVEVYVDDVYISHDSEKEHLEYLDILFNRLKEAGYIISLKKSNIANSIVDFLGFQITNEGRGLTDTFKEKLENITAPTTLKQLQSILGLLNFARNFIPDFTELIAPLYALIPKSTKNYVPWQIEHSTTLETLITKLNGAEYLQGRKGDKTLIMKVNASYTTGYIRYYNEGEKKPISYVSIVFSKTELKFTELEKLLTTVHKGLLKALDLSMGQNIHVYSPIVSMQNIQKTPQTAKKALASRWLSWLSYLEDPRIRFFYDPQMPALKDLPAVDTGKDNKKHPSNFQHIFYTDGSAITSPTKEGHLNAGMGIVYFINKDGNLQKQQEWSISLGNHTAQFAEIAAFEFALKKCLPLGGNILVVTDSNYVAKAYNEELDVWASNGFVNNRKKPLKHISKWKSVADLKRLRPDVVVTHEPGHQKLDSSPHAYGNNLADQLATQASFKVHAGKRTADGSEFEKRTADGSEFESPKKKAKVE

SEQ ID NO: 6307 - protein, 2125 aa, synthetic construct
MPAAKRVKLDGGDKKYSIGLDIGTNSVGWAVITDEYKVPSKKFKVLGNTDRHSIKKNLIGALLFDSGETAEATRLKRTARRRYTRRKNRICYLQEIFSNEMAKVDDSFFHRLEESFLVEEDKKHERHPIFGNIVDEVAYHEKYPTIYHLRKKLVDSTDKADLRLIYLALAHMIKFRGHFLIEGDLNPDNSDVDKLFIQLVQTYNQLFEENPINASGVDAKAILSARLSKSRRLENLIAQLPGEKKNGLFGNLIALSLGLTPNFKSNFDLAEDAKLQLSKDTYDDDLDNLLAQIGDQYADLFLAAKNLSDAILLSDILRVNTEITKAPLSASMIKRYDEHHQDLTLLKALVRQQLPEKYKEIFFDQSKNGYAGYIDGGASQEEFYKFIKPILEKMDGTEELLVKLNREDLLRKQRTFDNGSIPHQIHLGELHAILRRQEDFYPFLKDNREKIEKILTFRIPYYVGPLARGNSRFAWMTRKSEETITPWNFEEVVDKGASAQSFIERMTNFDKNLPNEKVLPKHSLLYEYFTVYNELTKVKYVTEGMRKPAFLSGEQKKAIVDLLFKTNRKVTVKQLKEDYFKKIECFDSVEISGVEDRFNASLGTYHDLLKIIKDKDFLDNEENEDILEDIVLTLTLFEDREMIEERLKTYAHLFDDKVMKQLKRRRYTGWGRLSRKLINGIRDKQSGKTILDFLKSDGFANRNFMQLIHDDSLTFKEDIQKAQVSGQGDSLHEHIANLAGSPAIKKGILQTVKVVDELVKVMGRHKPENIVIEMARENQTTQKGQKNSRERMKRIEEGIKELGSQILKEHPVENTQLQNEKLYLYYLQNGRDMYVDQELDINRLSDYDVDHIVPQSFLKDDSIDNKVLTRSDKARGKSDNVPSEEVVKKMKNYWRQLLNAKLITQRKFDNLTKAERGGLSELDKAGFIKRQLVETRQITKHVAQILDSRMNTKYDENDKLIREVKVITLKSKLVSDFRKDFQFYKVREINNYHHAHDAYLNAVVGTALIKKYPKLESEFVYGDYKVYDVRKMIAKSEQEIGKATAKYFFYSNIMNFFKTEITLANGEIRKRPLIETNGETGEIVWDKGRDFATVRKVLSMPQVNIVKKTEVQTGGFSKESILPKRNSDKLIARKKDWDPKKYGGFDSPTVAYSVLVVAKVEKGKSKKLKSVKELLGITIMERSSFEKNPIDFLEAKGYKEVKKDLIIKLPKYSLFELENGRKRMLASAGELQKGNELALPSKYVNFLYLASHYEKLKGSPEDNEQKQLFVEQHKHYLDEIIEQISEFSKRVILADANLDKVLSAYNKHRDKPIREQAENIIHLFTLTNLGAPAAFKYFDTTIDRKRYTSTKEVLDATLIHQSITGLYETRIDLSQLGGDGGGSSGSSGSSGGLLGRDLLTKLKAQIQFSTEGPQVTWEDRPAMCLVLNLEEEYRLHEKPVPPSIDPSWLQLFPMVWAEKAGMGLANQVPPVVVELKSDASPVAVRQYPMSKEAREGIRPHIQRFLDLGILVPCQSPWNTPLLPVKKPGTNDYRPVQDLREVNKRVQDIHPTVPNPYNLLSSLPPSHTWYSVLDLKDAFFCLKLHPNSQPLFAFEWRDPEKGNTGQLTWTRLPQGFKNSPTLFNEALHRDLASFRALNPQVVMLQYVDDLLVAAPTYRDCKEGTRRLLQELSKLGYRVSAKKAQLCREEVTYLGYLLKGGKRWLTPARKATVMKIPTPTTPRQVREFLGTAGFCRLWIPGFASLAAPLYPLTRPKVPFTWTEAHQEAFGRIKEALLSAPALALPDLTKPFALYVDEKEGVARGVLTQTLGPWRRPVAYLSKKLDPVASGWPTCLKAIAAVALLLKDADKLTLGQNVLVIAPHNLESIVRQPPDRWMTNARMTHYQSLLLNERVSFAPPAILNPATLLPVESDDTPIHICSEILAEETGTRPDLRDQPLPGVPAWYTDGSSFIMDGRRQAGAAIVDNKRTVWASNLPEGTSAQKAELIALTQALRLAEGKSINIYTDSRYAFATAHVHGAIYKQRGWLTSAGKDIKNKEEILALLEAIHLPKRVAIIHCPGHQRGTDPVATGNRKADEAAKQAAQSTRILTETTKNAGKRTADGSEFEKRTADGSEFESPKKKAKVE

SEQ ID NO: 6308 - protein, 2094 aa, synthetic construct
MPAAKRVKLDGGDKKYSIGLDIGTNSVGWAVITDEYKVPSKKFKVLGNTDRHSIKKNLIGALLFDSGETAEATRLKRTARRRYTRRKNRICYLQEIFSNEMAKVDDSFFHRLEESFLVEEDKKHERHPIFGNIVDEVAYHEKYPTIYHLRKKLVDSTDKADLRLIYLALAHMIKFRGHFLIEGDLNPDNSDVDKLFIQLVQTYNQLFEENPINASGVDAKAILSARLSKSRRLENLIAQLPGEKKNGLFGNLIALSLGLTPNFKSNFDLAEDAKLQLSKDTYDDDLDNLLAQIGDQYADLFLAAKNLSDAILLSDILRVNTEITKAPLSASMIKRYDEHHQDLTLLKALVRQQLPEKYKEIFFDQSKNGYAGYIDGGASQEEFYKFIKPILEKMDGTEELLVKLNREDLLRKQRTFDNGSIPHQIHLGELHAILRRQEDFYPFLKDNREKIEKILTFRIPYYVGPLARGNSRFAWMTRKSEETITPWNFEEVVDKGASAQSFIERMTNFDKNLPNEKVLPKHSLLYEYFTVYNELTKVKYVTEGMRKPAFLSGEQKKAIVDLLFKTNRKVTVKQLKEDYFKKIECFDSVEISGVEDRFNASLGTYHDLLKIIKDKDFLDNEENEDILEDIVLTLTLFEDREMIEERLKTYAHLFDDKVMKQLKRRRYTGWGRLSRKLINGIRDKQSGKTILDFLKSDGFANRNFMQLIHDDSLTFKEDIQKAQVSGQGDSLHEHIANLAGSPAIKKGILQTVKVVDELVKVMGRHKPENIVIEMARENQTTQKGQKNSRERMKRIEEGIKELGSQILKEHPVENTQLQNEKLYLYYLQNGRDMYVDQELDINRLSDYDVDHIVPQSFLKDDSIDNKVLTRSDKARGKSDNVPSEEVVKKMKNYWRQLLNAKLITQRKFDNLTKAERGGLSELDKAGFIKRQLVETRQITKHVAQILDSRMNTKYDENDKLIREVKVITLKSKLVSDFRKDFQFYKVREINNYHHAHDAYLNAVVGTALIKKYPKLESEFVYGDYKVYDVRKMIAKSEQEIGKATAKYFFYSNIMNFFKTEITLANGEIRKRPLIETNGETGEIVWDKGRDFATVRKVLSMPQVNIVKKTEVQTGGFSKESILPKRNSDKLIARKKDWDPKKYGGFDSPTVAYSVLVVAKVEKGKSKKLKSVKELLGITIMERSSFEKNPIDFLEAKGYKEVKKDLIIKLPKYSLFELENGRKRMLASAGELQKGNELALPSKYVNFLYLASHYEKLKGSPEDNEQKQLFVEQHKHYLDEIIEQISEFSKRVILADANLDKVLSAYNKHRDKPIREQAENIIHLFTLTNLGAPAAFKYFDTTIDRKRYTSTKEVLDATLIHQSITGLYETRIDLSQLGGDGGGSSGSSGSSGGTLNLEDEYRLYETSAEPEVSPGSTWLSDFPQAWAETGGMGLAVRQAPLIIPLKATSTPVSIKQYPMSQEAKLGIKPHIQRLLDQGILVPCQSPWNTPLLPVKKPGTNDYRPVQDLREVNKRVEDIHPTVPNPYNLLSGLPPSHRWYTVLDLKDAFFCLRLHPTSQPLFAFEWRDPGMGISGQLTWTRLPQGFKNSPTLFNEALHRDLADFRIQHPDLILLQYVDDILLAATSELDCQQGTRALLLTLGNLGYRASAKKAQLCQKQVKYLGYLLKEGQRWLTEARKETVMGQPTPKTPRQLREFLGTAGFCRLWIPGFAEMAAPLYPLTKPGTLFNWGPDQQKAYQEIKQALLTAPALGLPDLTKPFELFVDEKQGYAKGVLTQKLGPWRRPVAYLSKKLDPVAAGWPPCLRMVAAIAVLRKDAGKLTMGQPLVILAPHAVEALVKQPPDRWLSNARMTHYQAMLLDTDRVQFGPVVALNPATLLPLPEEGAPHDCLEILAETHGTRPDLTDQPIPDADHTWYTDGSSFLQEGQRKAGAAVTTETEVIWARALPAGTSAQRAELIALTQALKMAEGKRLNVYTDSRYAFATAHIHGEIYRRRGWLTSEGREIKNKSEILALLKALFLPKRLSIIHCLGHQKGDSAEARGNRLADQAAREAAIKTPPDTSTLLAGKRTADGSEFEKRTADGSEFESPKKKAKVE

SEQ ID NO: 6309 - protein, 2094 aa, synthetic construct
MPAAKRVKLDGGDKKYSIGLDIGTNSVGWAVITDEYKVPSKKFKVLGNTDRHSIKKNLIGALLFDSGETAEATRLKRTARRRYTRRKNRICYLQEIFSNEMAKVDDSFFHRLEESFLVEEDKKHERHPIFGNIVDEVAYHEKYPTIYHLRKKLVDSTDKADLRLIYLALAHMIKFRGHFLIEGDLNPDNSDVDKLFIQLVQTYNQLFEENPINASGVDAKAILSARLSKSRRLENLIAQLPGEKKNGLFGNLIALSLGLTPNFKSNFDLAEDAKLQLSKDTYDDDLDNLLAQIGDQYADLFLAAKNLSDAILLSDILRVNTEITKAPLSASMIKRYDEHHQDLTLLKALVRQQLPEKYKEIFFDQSKNGYAGYIDGGASQEEFYKFIKPILEKMDGTEELLVKLNREDLLRKQRTFDNGSIPHQIHLGELHAILRRQEDFYPFLKDNREKIEKILTFRIPYYVGPLARGNSRFAWMTRKSEETITPWNFEEVVDKGASAQSFIERMTNFDKNLPNEKVLPKHSLLYEYFTVYNELTKVKYVTEGMRKPAFLSGEQKKAIVDLLFKTNRKVTVKQLKEDYFKKIECFDSVEISGVEDRFNASLGTYHDLLKIIKDKDFLDNEENEDILEDIVLTLTLFEDREMIEERLKTYAHLFDDKVMKQLKRRRYTGWGRLSRKLINGIRDKQSGKTILDFLKSDGFANRNFMQLIHDDSLTFKEDIQKAQVSGQGDSLHEHIANLAGSPAIKKGILQTVKVVDELVKVMGRHKPENIVIEMARENQTTQKGQKNSRERMKRIEEGIKELGSQILKEHPVENTQLQNEKLYLYYLQNGRDMYVDQELDINRLSDYDVDHIVPQSFLKDDSIDNKVLTRSDKARGKSDNVPSEEVVKKMKNYWRQLLNAKLITQRKFDNLTKAERGGLSELDKAGFIKRQLVETRQITKHVAQILDSRMNTKYDENDKLIREVKVITLKSKLVSDFRKDFQFYKVREINNYHHAHDAYLNAVVGTALIKKYPKLESEFVYGDYKVYDVRKMIAKSEQEIGKATAKYFFYSNIMNFFKTEITLANGEIRKRPLIETNGETGEIVWDKGRDFATVRKVLSMPQVNIVKKTEVQTGGFSKESILPKRNSDKLIARKKDWDPKKYGGFDSPTVAYSVLVVAKVEKGKSKKLKSVKELLGITIMERSSFEKNPIDFLEAKGYKEVKKDLIIKLPKYSLFELENGRKRMLASAGELQKGNELALPSKYVNFLYLASHYEKLKGSPEDNEQKQLFVEQHKHYLDEIIEQISEFSKRVILADANLDKVLSAYNKHRDKPIREQAENIIHLFTLTNLGAPAAFKYFDTTIDRKRYTSTKEVLDATLIHQSITGLYETRIDLSQLGGDGGGSSGSSGSSGGTLGIEDEYRLHETSTEPDVSLGSTWLSDFPQAWAETGGMGLAVRQAPLIIPLKATSTPVSIQQYPMSHEARLGIKPHIQRLLDQGILVPCQSPWNTPLLPVKKPGTNDYRPVQDLREVNKRVEDIHPTVPNPYNLLSGLPPSHQWYTVLDLKDAFFCLRLHPTSQPLFAFEWRDPGMGISGQLTWTRLPQGFKNSPTLFDEALHRDLADFRIQHPDLILLQYVDDILLAATSELDCQQGTRALLQTLGDLGYRASAKKAQICQKQVKYLGYLLREGQRWLTEARKETVMGQPVPKTPRQLREFLGTAGFCRLWIPGFAEMAAPLYPLTKTGTLFSWGPDQQKAYQEIKQALLTAPALGLPDLTKPFELFVDEKQGYAKGVLTQKLGPWRRPVAYLSKKLDPVAAGWPPCLRMVAAIAVLTKDAGKLTMGQPLVILAPHAVEALVKQPPDRWLSNARMTHYQAMLLDTDRVQFGPVVALNPATLLPLPEEGAPHDCLEILAETHGTRPDLTDQPIPDADHTWYTDGSSFLQEGQRKAGAAVTTETEVIWAGALPAGTSAQRAELIALTQALKMAEGKRLNVYTDSRYAFATAHIHGEIYRRRGLLTSEGREIKNKSEILALLKALFLPKRLSIIHCLGHQKGDSAEARGNRLADQAAREAAIKTPPDTSTLLAGKRTADGSEFEKRTADGSEFESPKKKAKVE

SEQ ID NO: 6310 - protein, 2094 aa, synthetic construct
MPAAKRVKLDGGDKKYSIGLDIGTNSVGWAVITDEYKVPSKKFKVLGNTDRHSIKKNLIGALLFDSGETAEATRLKRTARRRYTRRKNRICYLQEIFSNEMAKVDDSFFHRLEESFLVEEDKKHERHPIFGNIVDEVAYHEKYPTIYHLRKKLVDSTDKADLRLIYLALAHMIKFRGHFLIEGDLNPDNSDVDKLFIQLVQTYNQLFEENPINASGVDAKAILSARLSKSRRLENLIAQLPGEKKNGLFGNLIALSLGLTPNFKSNFDLAEDAKLQLSKDTYDDDLDNLLAQIGDQYADLFLAAKNLSDAILLSDILRVNTEITKAPLSASMIKRYDEHHQDLTLLKALVRQQLPEKYKEIFFDQSKNGYAGYIDGGASQEEFYKFIKPILEKMDGTEELLVKLNREDLLRKQRTFDNGSIPHQIHLGELHAILRRQEDFYPFLKDNREKIEKILTFRIPYYVGPLARGNSRFAWMTRKSEETITPWNFEEVVDKGASAQSFIERMTNFDKNLPNEKVLPKHSLLYEYFTVYNELTKVKYVTEGMRKPAFLSGEQKKAIVDLLFKTNRKVTVKQLKEDYFKKIECFDSVEISGVEDRFNASLGTYHDLLKIIKDKDFLDNEENEDILEDIVLTLTLFEDREMIEERLKTYAHLFDDKVMKQLKRRRYTGWGRLSRKLINGIRDKQSGKTILDFLKSDGFANRNFMQLIHDDSLTFKEDIQKAQVSGQGDSLHEHIANLAGSPAIKKGILQTVKVVDELVKVMGRHKPENIVIEMARENQTTQKGQKNSRERMKRIEEGIKELGSQILKEHPVENTQLQNEKLYLYYLQNGRDMYVDQELDINRLSDYDVDHIVPQSFLKDDSIDNKVLTRSDKARGKSDNVPSEEVVKKMKNYWRQLLNAKLITQRKFDNLTKAERGGLSELDKAGFIKRQLVETRQITKHVAQILDSRMNTKYDENDKLIREVKVITLKSKLVSDFRKDFQFYKVREINNYHHAHDAYLNAVVGTALIKKYPKLESEFVYGDYKVYDVRKMIAKSEQEIGKATAKYFFYSNIMNFFKTEITLANGEIRKRPLIETNGETGEIVWDKGRDFATVRKVLSMPQVNIVKKTEVQTGGFSKESILPKRNSDKLIARKKDWDPKKYGGFDSPTVAYSVLVVAKVEKGKSKKLKSVKELLGITIMERSSFEKNPIDFLEAKGYKEVKKDLIIKLPKYSLFELENGRKRMLASAGELQKGNELALPSKYVNFLYLASHYEKLKGSPEDNEQKQLFVEQHKHYLDEIIEQISEFSKRVILADANLDKVLSAYNKHRDKPIREQAENIIHLFTLTNLGAPAAFKYFDTTIDRKRYTSTKEVLDATLIHQSITGLYETRIDLSQLGGDGGGSSGSSGSSGGTLNIEDEYRLHETSKEPDVSLGSTWLSDFPQAWAETGGMGLAVRQAPLIIPLKATSTPVSIKQYPMSQEARLGIKPHIQRLLDQGILVPCQSPWNTPLLPVKKPGTNDYRPVQDLREVNKRVEDIHPTVPNPYNLLSGLPPSHQWYTVLDLKDAFFCLRLHPTSQPLFAFEWRDPEMGISGQLTWTRLPQGFKNSPTLFNEALHRDLAGFRIQHPDLILLQYVDDLLLAATSELDCQQGTRALLQTLGDLGYRASAKKAQICQKQVKYLGYLLKEGQRWLTEARKETVMGQPIPKTPRQLREFLGTAGFCRLWIPGFAEMAAPLYPLTKPGTLFNWGPDQQKAFQEIKQALLTAPALGLPDLTKPFELFVDEKQGYAKGVLTQKLGPWRRPVAYLSKKLDPVAAGWPPCLRMVAAIAVLTKDAGKLTMGQPLVILAPHAVEALVKQPPDRWLSNARMTHYQALLLDTDRVQFGPVVALNPATLLPLPEEGLQHDCLDILAEAHGTRSDLMDQPLPDADHTWYTDGSSFLQEGQRKAGAAVTTETEVIWARALPAGTSAQRAELIALTQALKMAEGKKLNVYTDSRYAFATAHIHGEIYRRRGWLTSEGKEIKNKDEILALLKALFLPKRLSIIHCPGHQKGNSAEARGNRMADQAAREVATRETPETSTLLAGKRTADGSEFEKRTADGSEFESPKKKAKVE

SEQ ID NO: 6311 - protein, 2094 aa, synthetic construct; identical to SEQ ID NO: 4505

SEQ ID NO: 6312 - protein, 2094 aa, synthetic construct; identical to SEQ ID NO: 4505

SEQ ID NO: 6313 - protein, 2088 aa, synthetic construct
MPAAKRVKLDGGDKKYSIGLDIGTNSVGWAVITDEYKVPSKKFKVLGNTDRHSIKKNLIGALLFDSGETAEATRLKRTARRRYTRRKNRICYLQEIFSNEMAKVDDSFFHRLEESFLVEEDKKHERHPIFGNIVDEVAYHEKYPTIYHLRKKLVDSTDKADLRLIYLALAHMIKFRGHFLIEGDLNPDNSDVDKLFIQLVQTYNQLFEENPINASGVDAKAILSARLSKSRRLENLIAQLPGEKKNGLFGNLIALSLGLTPNFKSNFDLAEDAKLQLSKDTYDDDLDNLLAQIGDQYADLFLAAKNLSDAILLSDILRVNTEITKAPLSASMIKRYDEHHQDLTLLKALVRQQLPEKYKEIFFDQSKNGYAGYIDGGASQEEFYKFIKPILEKMDGTEELLVKLNREDLLRKQRTFDNGSIPHQIHLGELHAILRRQEDFYPFLKDNREKIEKILTFRIPYYVGPLARGNSRFAWMTRKSEETITPWNFEEVVDKGASAQSFIERMTNFDKNLPNEKVLPKHSLLYEYFTVYNELTKVKYVTEGMRKPAFLSGEQKKAIVDLLFKTNRKVTVKQLKEDYFKKIECFDSVEISGVEDRFNASLGTYHDLLKIIKDKDFLDNEENEDILEDIVLTLTLFEDREMIEERLKTYAHLFDDKVMKQLKRRRYTGWGRLSRKLINGIRDKQSGKTILDFLKSDGFANRNFMQLIHDDSLTFKEDIQKAQVSGQGDSLHEHIANLAGSPAIKKGILQTVKVVDELVKVMGRHKPENIVIEMARENQTTQKGQKNSRERMKRIEEGIKELGSQILKEHPVENTQLQNEKLYLYYLQNGRDMYVDQELDINRLSDYDVDHIVPQSFLKDDSIDNKVLTRSDKARGKSDNVPSEEVVKKMKNYWRQLLNAKLITQRKFDNLTKAERGGLSELDKAGFIKRQLVETRQITKHVAQILDSRMNTKYDENDKLIREVKVITLKSKLVSDFRKDFQFYKVREINNYHHAHDAYLNAVVGTALIKKYPKLESEFVYGDYKVYDVRKMIAKSEQEIGKATAKYFFYSNIMNFFKTEITLANGEIRKRPLIETNGETGEIVWDKGRDFATVRKVLSMPQVNIVKKTEVQTGGFSKESILPKRNSDKLIARKKDWDPKKYGGFDSPTVAYSVLVVAKVEKGKSKKLKSVKELLGITIMERSSFEKNPIDFLEAKGYKEVKKDLIIKLPKYSLFELENGRKRMLASAGELQKGNELALPSKYVNFLYLASHYEKLKGSPEDNEQKQLFVEQHKHYLDEIIEQISEFSKRVILADANLDKVLSAYNKHRDKPIREQAENIIHLFTLTNLGAPAAFKYFDTTIDRKRYTSTKEVLDATLIHQSITGLYETRIDLSQLGGDGGGSSGSSGSSGGTLQLDDEYRLYSPLVKPDQNIQFWLEQFPQAWAETAGMGLAKQVPPQVIQLKASATPVSVRQYPLSKEAQEGIRPHVQRLIQQGILVPVQSPWNTPLLPVRKPGTNDYRPVQDLREVNKRVQDIHPTVPNPYNLLCALPPQRSWYTVLDLKDAFFCLRLHPTSQPLFAFEWRDPGTGRTGQLTWTRLPQGFKNSPTIFDEALHRDLANFRIQHPQVTLLQYVDDLLLAGATKQDCLEGTKALLLELSDLGYRASAKKAQICRREVTYLGYSLRDGQRWLTEARKKTVVQIPAPTTAKQVREFLGTAGFCRLWIPGFATLAAPLYPLTKEKGEFSWAPEHQKAFDAIKKALLSAPALALPDVTKPFTLYVDERKGVARGVLTQTLGPWRRPVAYLSKKLDPVASGWPVCLKAIAAVAILVKDADKLTLGQNITVIAPHALENIVRQPPDRWMTNARMTHYQSLLLTERVTFAPPAALNPATLLPEETDEPVTHDCHQLLIEETGVRKDLTDIPLTGEVLTWFTDGSSYVVEGKRMAGAAVVDGTRTIWASSLPEGTSAQKAELMALTQALRLAEGKSINIYTDSRYAFATAHVHGAIYKQRGLLTSAGREIKNKEEILSLLEALHLPKRLAIIHCPGHQKAKDPISRGNQMADRVAKQAAQGVNLLAGKRTADGSEFEKRTADGSEFESPKKKAKVE

SEQ ID NO: 6314 - protein, 2088 aa, synthetic construct; identical to SEQ ID NO: 6313

SEQ ID NO: 6315 - protein, 2099 aa, synthetic construct
MPAAKRVKLDGGDKKYSIGLDIGTNSVGWAVITDEYKVPSKKFKVLGNTDRHSIKKNLIGALLFDSGETAEATRLKRTARRRYTRRKNRICYLQEIFSNEMAKVDDSFFHRLEESFLVEEDKKHERHPIFGNIVDEVAYHEKYPTIYHLRKKLVDSTDKADLRLIYLALAHMIKFRGHFLIEGDLNPDNSDVDKLFIQLVQTYNQLFEENPINASGVDAKAILSARLSKSRRLENLIAQLPGEKKNGLFGNLIALSLGLTPNFKSNFDLAEDAKLQLSKDTYDDDLDNLLAQIGDQYADLFLAAKNLSDAILLSDILRVNTEITKAPLSASMIKRYDEHHQDLTLLKALVRQQLPEKYKEIFFDQSKNGYAGYIDGGASQEEFYKFIKPILEKMDGTEELLVKLNREDLLRKQRTFDNGSIPHQIHLGELHAILRRQEDFYPFLKDNREKIEKILTFRIPYYVGPLARGNSRFAWMTRKSEETITPWNFEEVVDKGASAQSFIERMTNFDKNLPNEKVLPKHSLLYEYFTVYNELTKVKYVTEGMRKPAFLSGEQKKAIVDLLFKTNRKVTVKQLKEDYFKKIECFDSVEISGVEDRFNASLGTYHDLLKIIKDKDFLDNEENEDILEDIVLTLTLFEDREMIEERLKTYAHLFDDKVMKQLKRRRYTGWGRLSRKLINGIRDKQSGKTILDFLKSDGFANRNFMQLIHDDSLTFKEDIQKAQVSGQGDSLHEHIANLAGSPAIKKGILQTVKVVDELVKVMGRHKPENIVIEMARENQTTQKGQKNSRERMKRIEEGIKELGSQILKEHPVENTQLQNEKLYLYYLQNGRDMYVDQELDINRLSDYDVDHIVPQSFLKDDSIDNKVLTRSDKARGKSDNVPSEEVVKKMKNYWRQLLNAKLITQRKFDNLTKAERGGLSELDKAGFIKRQLVETRQITKHVAQILDSRMNTKYDENDKLIREVKVITLKSKLVSDFRKDFQFYKVREINNYHHAHDAYLNAVVGTALIKKYPKLESEFVYGDYKVYDVRKMIAKSEQEIGKATAKYFFYSNIMNFFKTEITLANGEIRKRPLIETNGETGEIVWDKGRDFATVRKVLSMPQVNIVKKTEVQTGGFSKESILPKRNSDKLIARKKDWDPKKYGGFDSPTVAYSVLVVAKVEKGKSKKLKSVKELLGITIMERSSFEKNPIDFLEAKGYKEVKKDLIIKLPKYSLFELENGRKRMLASAGELQKGNELALPSKYVNFLYLASHYEKLKGSPEDNEQKQLFVEQHKHYLDEIIEQISEFSKRVILADANLDKVLSAYNKHRDKPIREQAENIIHLFTLTNLGAPAAFKYFDTTIDRKRYTSTKEVLDATLIHQSITGLYETRIDLSQLGGDGGGSSGSSGSSGSSGGTAPLEEEYRLFLEAPIQNVTLLEQWKREIPKVWAEINPPGLASTQAPIHVQLLSTALPVRVRQYPITLEAKRSLRETIRKFRAAGILRPVHSPWNTPLLPVRKSGTSEYRMVQDLREVNKRVETIHPTVPNPYTLLSLLPPDRIWYSVLDLKDAFFCIPLAPESQLIFAFEWADAEEGESGQLTWTRLPQGFKNSPTLFDEALNRDLQGFRLDHPSVSLLQYVDDLLIAADTQAACLSATRDLLMTLAELGYRVSGKKAQLCQEEVTYLGFKIHKGSRSLSNSRTQAILQIPVPKTKRQVREFLGTIGYCRLWIPGFAELAQPLYAATRGGNDPLVWGEKEEEAFQSLKLALTQPPALALPSLDKPFQLFVEETSGAAKGVLTQALGPWKRPVAYLSKRLDPVAAGWPRCLRAIAAAALLTREASKLTFGQDIEITSSHNLESLLRSPPDKWLTNARITQYQVLLLDPPRVRFKQTAALNPATLLPETDDTLPIHHCLDTLDSLTSTRPDLTDQPLAQAEATLFTDGSSYIRDGKRYAGAAVVTLDSVIWAEPLPIGTSAQKAELIALTKALEWSKDKSVNIYTDSRYAFATLHVHGMIYRERGLLTAGGKAIKNAPEILALLTAVWLPKRVAVMHCKGHQKDDAPTSTGNRRADEVAREVAIRPLSTQATISAGKRTADGSEFEKRTADGSEFESPKKKAKVE

SEQ ID NO: 6316 - protein, 2099 aa, synthetic construct
MPAAKRVKLDGGDKKYSIGLDIGTNSVGWAVITDEYKVPSKKFKVLGNTDRHSIKKNLIGALLFDSGETAEATRLKRTARRRYTRRKNRICYLQEIFSNEMAKVDDSFFHRLEESFLVEEDKKHERHPIFGNIVDEVAYHEKYPTIYHLRKKLVDSTDKADLRLIYLALAHMIKFRGHFLIEGDLNPDNSDVDKLFIQLVQTYNQLFEENPINASGVDAKAILSARLSKSRRLENLIAQLPGEKKNGLFGNLIALSLGLTPNFKSNFDLAEDAKLQLSKDTYDDDLDNLLAQIGDQYADLFLAAKNLSDAILLSDILRVNTEITKAPLSASMIKRYDEHHQDLTLLKALVRQQLPEKYKEIFFDQSKNGYAGYIDGGASQEEFYKFIKPILEKMDGTEELLVKLNREDLLRKQRTFDNGSIPHQIHLGELHAILRRQEDFYPFLKDNREKIEKILTFRIPYYVGPLARGNSRFAWMTRKSEETITPWNFEEVVDKGASAQSFIERMTNFDKNLPNEKVLPKHSLLYEYFTVYNELTKVKYVTEGMRKPAFLSGEQKKAIVDLLFKTNRKVTVKQLKEDYFKKIECFDSVEISGVEDRFNASLGTYHDLLKIIKDKDFLDNEENEDILEDIVLTLTLFEDREMIEERLKTYAHLFDDKVMKQLKRRRYTGWGRLSRKLINGIRDKQSGKTILDFLKSDGFANRNFMQLIHDDSLTFKEDIQKAQVSGQGDSLHEHIANLAGSPAIKKGILQTVKVVDELVKVMGRHKPENIVIEMARENQTTQKGQKNSRERMKRIEEGIKELGSQILKEHPVENTQLQNEKLYLYYLQNGRDMYVDQELDINRLSDYDVDHIVPQSFLKDDSIDNKVLTRSDKARGKSDNVPSEEVVKKMKNYWRQLLNAKLITQRKFDNLTKAERGGLSELDKAGFIKRQLVETRQITKHVAQILDSRMNTKYDENDKLIREVKVITLKSKLVSDFRKDFQFYKVREINNYHHAHDAYLNAVVGTALIKKYPKLESEFVYGDYKVYDVRKMIAKSEQEIGKATAKYFFYSNIMNFFKTEITLANGEIRKRPLIETNGETGEIVWDKGRDFATVRKVLSMPQVNIVKKTEVQTGGFSKESILPKRNSDKLIARKKDWDPKKYGGFDSPTVAYSVLVVAKVEKGKSKKLKSVKELLGITIMERSSFEKNPIDFLEAKGYKEVKKDLIIKLPKYSLFELENGRKRMLASAGELQKGNELALPSKYVNFLYLASHYEKLKGSPEDNEQKQLFVEQHKHYLDEIIEQISEFSKRVILADANLDKVLSAYNKHRDKPIREQAENIIHLFTLTNLGAPAAFKYFDTTIDRKRYTSTKEVLDATLIHQSITGLYETRIDLSQLGGDGGGSSGSSGSSGSSGGTAPLEEEYRLFLEAPIQNVTLLEQWKREIPKVWAEINPPGLASTQAPIHVQLLSTALPVRVRQYPITLEAKRSLRETIRKFRAAGILRPVHSPWNTPLLPVRKSGTSEYRMVQDLREVNKRVETIHPTVPNPYTLLSLLPPDRIWYSVLDLKDAFFCIPLAPESQLIFAFEWADAEEGESGQLTWTRLPQGFKNSPTLFNEALNRDLQGFRLDHPSVSLLQYVDDLLIAADTQAACLSATRDLLMTLAELGYRVSGKKAQLCQEEVTYLGFKIHKGSRSLSNSRTQAILQIPVPKTKRQVREFLGTIGYCRLWIPGFAELAQPLYAATRPGNDPLVWGEKEEEAFQSLKLALTQPPALALPSLDKPFQLFVEETSGAAKGVLTQALGPWKRPVAYLSKRLDPVAAGWPRCLRAIAAAALLTREASKLTFGQDIEITSSHNLESLLRSPPDKWLTNARITQYQVLLLDPPRVRFKQTAALNPATLLPETDDTLPIHHCLDTLDSLTSTRPDLTDQPLAQAEATLFTDGSSYIRDGKRYAGAAVVTLDSVIWAEPLPIGTSAQKAELIALTKALEWSKDKSVNIYTDSRYAFATLHVHGMIYRERGWLTAGGKAIKNAPEILALLTAVWLPKRVAVMHCKGHQKDDAPTSTGNRRADEVAREVAIRPLSTQATISAGKRTADGSEFEKRTADGSEFESPKKKAKVE

SEQ ID NO: 6317 - protein, 2103 aa, synthetic construct
MPAAKRVKLDGGDKKYSIGLDIGTNSVGWAVITDEYKVPSKKFKVLGNTDRHSIKKNLIGALLFDSGETAEATRLKRTARRRYTRRKNRICYLQEIFSNEMAKVDDSFFHRLEESFLVEEDKKHERHPIFGNIVDEVAYHEKYPTIYHLRKKLVDSTDKADLRLIYLALAHMIKFRGHFLIEGDLNPDNSDVDKLFIQLVQTYNQLFEENPINASGVDAKAILSARLSKSRRLENLIAQLPGEKKNGLFGNLIALSLGLTPNFKSNFDLAEDAKLQLSKDTYDDDLDNLLAQIGDQYADLFLAAKNLSDAILLSDILRVNTEITKAPLSASMIKRYDEHHQDLTLLKALVRQQLPEKYKEIFFDQSKNGYAGYIDGGASQEEFYKFIKPILEKMDGTEELLVKLNREDLLRKQRTFDNGSIPHQIHLGELHAILRRQEDFYPFLKDNREKIEKILTFRIPYYVGPLARGNSRFAWMTRKSEETITPWNFEEVVDKGASAQSFIERMTNFDKNLPNEKVLPKHSLLYEYFTVYNELTKVKYVTEGMRKPAFLSGEQKKAIVDLLFKTNRKVTVKQLKEDYFKKIECFDSVEISGVEDRFNASLGTYHDLLKIIKDKDFLDNEENEDILEDIVLTLTLFEDREMIEERLKTYAHLFDDKVMKQLKRRRYTGWGRLSRKLINGIRDKQSGKTILDFLKSDGFANRNFMQLIHDDSLTFKEDIQKAQVSGQGDSLHEHIANLAGSPAIKKGILQTVKVVDELVKVMGRHKPENIVIEMARENQTTQKGQKNSRERMKRIEEGIKELGSQILKEHPVENTQLQNEKLYLYYLQNGRDMYVDQELDINRLSDYDVDHIVPQSFLKDDSIDNKVLTRSDKARGKSDNVPSEEVVKKMKNYWRQLLNAKLITQRKFDNLTKAERGGLSELDKAGFIKRQLVETRQITKHVAQILDSRMNTKYDENDKLIREVKVITLKSKLVSDFRKDFQFYKVREINNYHHAHDAYLNAVVGTALIKKYPKLESEFVYGDYKVYDVRKMIAKSEQEIGKATAKYFFYSNIMNFFKTEITLANGEIRKRPLIETNGETGEIVWDKGRDFATVRKVLSMPQVNIVKKTEVQTGGFSKESILPKRNSDKLIARKKDWDPKKYGGFDSPTVAYSVLVVAKVEKGKSKKLKSVKELLGITIMERSSFEKNPIDFLEAKGYKEVKKDLIIKLPKYSLFELENGRKRMLASAGELQKGNELALPSKYVNFLYLASHYEKLKGSPEDNEQKQLFVEQHKHYLDEIIEQISEFSKRVILADANLDKVLSAYNKHRDKPIREQAENIIHLFTLTNLGAPAAFKYFDTTIDRKRYTSTKEVLDATLIHQSITGLYETRIDLSQLGGDGGGSSGSSGSSGSSGGTVSLQDEHRLFDIPVTTSLPDVWLQDFPQAWAETGGLGRAKCQAPIIIDLKPTAVPVSIKQYPMSLEAHMGIRQHIIKFLELGVLRPCRSPWNTPLLPVKKPGTQDYRPVQDLREINKRTVDIHPTVPNPYNLLSTLKPDYSWYTVLDLKDAFFCLPLAPQSQELFAFEWKDPERGISGQLTWTRLPQGFKNSPTLFNEALHRDLTDFRTQHPEVTLLQYVDDLLLAAPTKKACTQGTRHLLQELGEKGYRASAKKAQICQTKVTYLGYILSEGKRWLTPGRIETVARIPPPRNPREVREFLGTAGFCRLWIPGFAELAAPLYALTKPSTPFTWQTEHQLAFEALKKALLSAPALGLPDTSKPFTLFLDERQGIAKGVLTQKLGPWKRPVAYLSKKLDPVAAGWPPCLRIMAATAMLVKDSAKLTLGQPLTVITPHTLEAIVRQPPDRWITNARLTHYQALLLDTDRVQFGPPVTLNPATLLPVPENQPSPHDCRQVLAETHGTREDLKDQELPDADHTWYTDGSSYLDSGTRRAGAAVVDGHNTIWAQSLPPGTSAQKAELIALTKALELSKGKKANIYTDSRYAFATAHTHGSIYERRGWLTSEGKEIKNKAEIIALLKALFLPQEVAIIHCPGHQKGQDPVAVGNRQADRVARQAAMAEVLTLATEPDNTSHITAGKRTADGSEFEKRTADGSEFESPKKKAKVE

SEQ ID NO: 6318 - protein, 2096 aa, synthetic construct
MPAAKRVKLDGGDKKYSIGLDIGTNSVGWAVITDEYKVPSKKFKVLGNTDRHSIKKNLIGALLFDSGETAEATRLKRTARRRYTRRKNRICYLQEIFSNEMAKVDDSFFHRLEESFLVEEDKKHERHPIFGNIVDEVAYHEKYPTIYHLRKKLVDSTDKADLRLIYLALAHMIKFRGHFLIEGDLNPDNSDVDKLFIQLVQTYNQLFEENPINASGVDAKAILSARLSKSRRLENLIAQLPGEKKNGLFGNLIALSLGLTPNFKSNFDLAEDAKLQLSKDTYDDDLDNLLAQIGDQYADLFLAAKNLSDAILLSDILRVNTEITKAPLSASMIKRYDEHHQDLTLLKALVRQQLPEKYKEIFFDQSKNGYAGYIDGGASQEEFYKFIKPILEKMDGTEELLVKLNREDLLRKQRTFDNGSIPHQIHLGELHAILRRQEDFYPFLKDNREKIEKILTFRIPYYVGPLARGNSRFAWMTRKSEETITPWNFEEVVDKGASAQSFIERMTNFDKNLPNEKVLPKHSLLYEYFTVYNELTKVKYVTEGMRKPAFLSGEQKKAIVDLLFKTNRKVTVKQLKEDYFKKIECFDSVEISGVEDRFNASLGTYHDLLKIIKDKDFLDNEENEDILEDIVLTLTLFEDREMIEERLKTYAHLFDDKVMKQLKRRRYTGWGRLSRKLINGIRDKQSGKTILDFLKSDGFANRNFMQLIHDDSLTFKEDIQKAQVSGQGDSLHEHIANLAGSPAIKKGILQTVKVVDELVKVMGRHKPENIVIEMARENQTTQKGQKNSRERMKRIEEGIKELGSQILKEHPVENTQLQNEKLYLYYLQNGRDMYVDQELDINRLSDYDVDHIVPQSFLKDDSIDNKVLTRSDKARGKSDNVPSEEVVKKMKNYWRQLLNAKLITQRKFDNLTKAERGGLSELDKAGFIKRQLVETRQITKHVAQILDSRMNTKYDENDKLIREVKVITLKSKLVSDFRKDFQFYKVREINNYHHAHDAYLNAVVGTALIKKYPKLESEFVYGDYKVYDVRKMIAKSEQEIGKATAKYFFYSNIMNFFKTEITLANGEIRKRPLIETNGETGEIVWDKGRDFATVRKVLSMPQVNIVKKTEVQTGGFSKESILPKRNSDKLIARKKDWDPKKYGGFDSPTVAYSVLVVAKVEKGKSKKLKSVKELLGITIMERSSFEKNPIDFLEAKGYKEVKKDLIIKLPKYSLFELENGRKRMLASAGELQKGNELALPSKYVNFLYLASHYEKLKGSPEDNEQKQLFVEQHKHYLDEIIEQISEFSKRVILADANLDKVLSAYNKHRDKPIREQAENIIHLFTLTNLGAPAAFKYFDTTIDRKRYTSTKEVLDATLIHQSITGLYETRIDLSQLGGDGGGSSGSSGSSGSSGGTLQLEEEYRLFEPESTQKQEMDIWLKNFPQAWAETGGMGTAHCQAPVLIQLKATATPISIRQYPMPHEAYQGIKPHIRRMLDQGILKPCQSPWNTPLLPVKKPGTEDYRPVQDLREVNKRVEDIHPTVPNPYNLLSTLPPSHPWYTVLDLKDAFFCLRLHSESQLLFAFEWRDPEIGLSGQLTWTRLPQGFKNSPTLFNEALHSDLADFRVRYPALVLLQYVDDLLLAAATRTECLEGTKALLETLGNKGYRASAKKAQICLQEVTYLGYSLKDGQRWLTKARKEAILSIPVPKNSRQVREFLGTAGYCRLWIPGFAELAAPLYPLTRPGTLFQWGTEQQLAFEDIKKALLSSPALGLPDITKPFELFIDENSGFAKGVLVQKLGPWKRPVAYLSKKLDTVASGWPPCLRMVAAIAILVKDAGKLTLGQPLTILTSHPVEALVRQPPNKWLSNARMTHYQAMLLDAERVHFGPTVSLNPATLLPLPSGGNHHDCLQILAETHGTRPDLTDQPLPDADLTWYTDGSSFIRNGEREAGAAVTTESEVIWAAPLPPGTSAQRAELIALTQALKMAEGKKLTVYTDSRYAFATTHVHGEIYRRRGWLTSEGKEIKNKNEILALLEALFLPKRLSIIHCPGHQKGDSPQAKGNRLADDTAKKAATETHSSLTVLPAGKRTADGSEFEKRTADGSEFESPKKKAKVE

SEQ ID NO: 6319 - protein, 2219 aa, synthetic construct
MPAAKRVKLDGGDKKYSIGLDIGTNSVGWAVITDEYKVPSKKFKVLGNTDRHSIKKNLIGALLFDSGETAEATRLKRTARRRYTRRKNRICYLQEIFSNEMAKVDDSFFHRLEESFLVEEDKKHERHPIFGNIVDEVAYHEKYPTIYHLRKKLVDSTDKADLRLIYLALAHMIKFRGHFLIEGDLNPDNSDVDKLFIQLVQTYNQLFEENPINASGVDAKAILSARLSKSRRLENLIAQLPGEKKNGLFGNLIALSLGLTPNFKSNFDLAEDAKLQLSKDTYDDDLDNLLAQIGDQYADLFLAAKNLSDAILLSDILRVNTEITKAPLSASMIKRYDEHHQDLTLLKALVRQQLPEKYKEIFFDQSKNGYAGYIDGGASQEEFYKFIKPILEKMDGTEELLVKLNREDLLRKQRTFDNGSIPHQIHLGELHAILRRQEDFYPFLKDNREKIEKILTFRIPYYVGPLARGNSRFAWMTRKSEETITPWNFEEVVDKGASAQSFIERMTNFDKNLPNEKVLPKHSLLYEYFTVYNELTKVKYVTEGMRKPAFLSGEQKKAIVDLLFKTNRKVTVKQLKEDYFKKIECFDSVEISGVEDRFNASLGTYHDLLKIIKDKDFLDNEENEDILEDIVLTLTLFEDREMIEERLKTYAHLFDDKVMKQLKRRRYTGWGRLSRKLINGIRDKQSGKTILDFLKSDGFANRNFMQLIHDDSLTFKEDIQKAQVSGQGDSLHEHIANLAGSPAIKKGILQTVKVVDELVKVMGRHKPENIVIEMARENQTTQKGQKNSRERMKRIEEGIKELGSQILKEHPVENTQLQNEKLYLYYLQNGRDMYVDQELDINRLSDYDVDHIVPQSFLKDDSIDNKVLTRSDKARGKSDNVPSEEVVKKMKNYWRQLLNAKLITQRKFDNLTKAERGGLSELDKAGFIKRQLVETRQITKHVAQILDSRMNTKYDENDKLIREVKVITLKSKLVSDFRKDFQFYKVREINNYHHAHDAYLNAVVGTALIKKYPKLESEFVYGDYKVYDVRKMIAKSEQEIGKATAKYFFYSNIMNFFKTEITLANGEIRKRPLIETNGETGEIVWDKGRDFATVRKVLSMPQVNIVKKTEVQTGGFSKESILPKRNSDKLIARKKDWDPKKYGGFDSPTVAYSVLVVAKVEKGKSKKLKSVKELLGITIMERSSFEKNPIDFLEAKGYKEVKKDLIIKLPKYSLFELENGRKRMLASAGELQKGNELALPSKYVNFLYLASHYEKLKGSPEDNEQKQLFVEQHKHYLDEIIEQISEFSKRVILADANLDKVLSAYNKHRDKPIREQAENIIHLFTLTNLGAPAAFKYFDTTIDRKRYTSTKEVLDATLIHQSITGLYETRIDLSQLGGDGGGSSGSSGSSGSSGGTLGDQGSRGSDPLPEPRVTLTVEGIPTEFLVNTGAEHSVLTKPMGKMGSKRTVVAGATGSKVYPWTTKRLLKIGQKQVTHSFLVIPECPAPLLGRDLLTKLKAQIQFSTEGPQVTWEDRPAMCLVLNLEEEYRLHEKPVPPSIDPSWLQLFPMVWAEKAGMGLANQVPPVVVELKSDASPVAVRQYPMSKEAREGIRPHIQRFLDLGILVPCQSPWNTPLLPVKKPGTNDYRPVQDLREVNKRVQDIHPTVPNPYNLLSSLPPSHTWYSVLDLKDAFFCLKLHPNSQPLFAFEWRDPEKGNTGQLTWTRLPQGFKNSPTLFDEALHRDLASFRALNPQVVMLQYVDDLLVAAPTYRDCKEGTRRLLQELSKLGYRVSAKKAQLCREEVTYLGYLLKGGKRWLTPARKATVMKIPTPTTPRQVREFLGTAGFCRLWIPGFASLAAPLYPLTREKVPFTWTEAHQEAFGRIKEALLSAPALALPDLTKPFALYVDEKEGVARGVLTQTLGPWRRPVAYLSKKLDPVASGWPTCLKAIAAVALLLKDADKLTLGQNVLVIAPHNLESIVRQPPDRWMTNARMTHYQSLLLNERVSFAPPAILNPATLLPVESDDTPIHICSEILAEETGTRPDLRDQPLPGVPAWYTDGSSFIMDGRRQAGAAIVDNKRTVWASNLPEGTSAQKAELIALTQALRLAEGKSINIYTDSRYAFATAHVHGAIYKQRGLLTSAGKDIKNKEEILALLEAIHLPKRVAIIHCPGHQRGTDPVATGNRKADEAAKQAAQSTRILTETTKNAGKRTADGSEFEKRTADGSEFESPKKKAKVE

SEQ ID NO: 6320 - protein, 2128 aa, synthetic construct
MPAAKRVKLDGGDKKYSIGLDIGTNSVGWAVITDEYKVPSKKFKVLGNTDRHSIKKNLIGALLFDSGETAEATRLKRTARRRYTRRKNRICYLQEIFSNEMAKVDDSFFHRLEESFLVEEDKKHERHPIFGNIVDEVAYHEKYPTIYHLRKKLVDSTDKADLRLIYLALAHMIKFRGHFLIEGDLNPDNSDVDKLFIQLVQTYNQLFEENPINASGVDAKAILSARLSKSRRLENLIAQLPGEKKNGLFGNLIALSLGLTPNFKSNFDLAEDAKLQLSKDTYDDDLDNLLAQIGDQYADLFLAAKNLSDAILLSDILRVNTEITKAPLSASMIKRYDEHHQDLTLLKALVRQQLPEKYKEIFFDQSKNGYAGYIDGGASQEEFYKFIKPILEKMDGTEELLVKLNREDLLRKQRTFDNGSIPHQIHLGELHAILRRQEDFYPFLKDNREKIEKILTFRIPYYVGPLARGNSRFAWMTRKSEETITPWNFEEVVDKGASAQSFIERMTNFDKNLPNEKVLPKHSLLYEYFTVYNELTKVKYVTEGMRKPAFLSGEQKKAIVDLLFKTNRKVTVKQLKEDYFKKIECFDSVEISGVEDRFNASLGTYHDLLKIIKDKDFLDNEENEDILEDIVLTLTLFEDREMIEERLKTYAHLFDDKVMKQLKRRRYTGWGRLSRKLINGIRDKQSGKTILDFLKSDGFANRNFMQLIHDDSLTFKEDIQKAQVSGQGDSLHEHIANLAGSPAIKKGILQTVKVVDELVKVMGRHKPENIVIEMARENQTTQKGQKNSRERMKRIEEGIKELGSQILKEHPVENTQLQNEKLYLYYLQNGRDMYVDQELDINRLSDYDVDHIVPQSFLKDDSIDNKVLTRSDKARGKSDNVPSEEVVKKMKNYWRQLLNAKLITQRKFDNLTKAERGGLSELDKAGFIKRQLVETRQITKHVAQILDSRMNTKYDENDKLIREVKVITLKSKLVSDFRKDFQFYKVREINNYHHAHDAYLNAVVGTALIKKYPKLESEFVYGDYKVYDVRKMIAKSEQEIGKATAKYFFYSNIMNFFKTEITLANGEIRKRPLIETNGETGEIVWDKGRDFATVRKVLSMPQVNIVKKTEVQTGGFSKESILPKRNSDKLIARKKDWDPKKYGGFDSPTVAYSVLVVAKVEKGKSKKLKSVKELLGITIMERSSFEKNPIDFLEAKGYKEVKKDLIIKLPKYSLFELENGRKRMLASAGELQKGNELALPSKYVNFLYLASHYEKLKGSPEDNEQKQLFVEQHKHYLDEIIEQISEFSKRVILADANLDKVLSAYNKHRDKPIREQAENIIHLFTLTNLGAPAAFKYFDTTIDRKRYTSTKEVLDATLIHQSITGLYETRIDLSQLGGDGGGSSGSSGSSGSSGGLLGRDLLTKLKAQIQFSTEGPQVTWEDRPAMCLVLNLEEEYRLHEKPVPPSIDPSWLQLFPMVWAEKAGMGLANQVPPVVVELKSDASPVAVRQYPMSKEAREGIRPHIQRFLDLGILVPCQSPWNTPLLPVKKPGTNDYRPVQDLREVNKRVQDIHPTVPNPYNLLSSLPPSHTWYSVLDLKDAFFCLKLHPNSQPLFAFEWRDPEKGNTGQLTWTRLPQGFKNSPTLFNEALHRDLASFRALNPQVVMLQYVDDLLVAAPTYRDCKEGTRRLLQELSKLGYRVSAKKAQLCREEVTYLGYLLKGGKRWLTPARKATVMKIPTPTTPRQVREFLGTAGFCRLWIPGFASLAAPLYPLTRPKVPFTWTEAHQEAFGRIKEALLSAPALALPDLTKPFALYVDEKEGVARGVLTQTLGPWRRPVAYLSKKLDPVASGWPTCLKAIAAVALLLKDADKLTLGQNVLVIAPHNLESIVRQPPDRWMTNARMTHYQSLLLNERVSFAPPAILNPATLLPVESDDTPIHICSEILAEETGTRPDLRDQPLPGVPAWYTDGSSFIMDGRRQAGAAIVDNKRTVWASNLPEGTSAQKAELIALTQALRLAEGKSINIYTDSRYAFATAHVHGAIYKQRGWLTSAGKDIKNKEEILALLEAIHLPKRVAIIHCPGHQRGTDPVATGNRKADEAAKQAAQSTRILTETTKNAGKRTADGSEFEKRTADGSEFESPKKKAKVE

SEQ ID NO: 6321 - protein, 2219 aa, synthetic construct
MPAAKRVKLDGGDKKYSIGLDIGTNSVGWAVITDEYKVPSKKFKVLGNTDRHSIKKNLIGALLFDSGETAEATRLKRTARRRYTRRKNRICYLQEIFSNEMAKVDDSFFHRLEESFLVEEDKKHERHPIFGNIVDEVAYHEKYPTIYHLRKKLVDSTDKADLRLIYLALAHMIKFRGHFLIEGDLNPDNSDVDKLFIQLVQTYNQLFEENPINASGVDAKAILSARLSKSRRLENLIAQLPGEKKNGLFGNLIALSLGLTPNFKSNFDLAEDAKLQLSKDTYDDDLDNLLAQIGDQYADLFLAAKNLSDAILLSDILRVNTEITKAPLSASMIKRYDEHHQDLTLLKALVRQQLPEKYKEIFFDQSKNGYAGYIDGGASQEEFYKFIKPILEKMDGTEELLVKLNREDLLRKQRTFDNGSIPHQIHLGELHAILRRQEDFYPFLKDNREKIEKILTFRIPYYVGPLARGNSRFAWMTRKSEETITPWNFEEVVDKGASAQSFIERMTNFDKNLPNEKVLPKHSLLYEYFTVYNELTKVKYVTEGMRKPAFLSGEQKKAIVDLLFKTNRKVTVKQLKEDYFKKIECFDSVEISGVEDRFNASLGTYHDLLKIIKDKDFLDNEENEDILEDIVLTLTLFEDREMIEERLKTYAHLFDDKVMKQLKRRRYTGWGRLSRKLINGIRDKQSGKTILDFLKSDGFANRNFMQLIHDDSLTFKEDIQKAQVSGQGDSLHEHIANLAGSPAIKKGILQTVKVVDELVKVMGRHKPENIVIEMARENQTTQKGQKNSRERMKRIEEGIKELGSQILKEHPVENTQLQNEKLYLYYLQNGRDMYVDQELDINRLSDYDVDHIVPQSFLKDDSIDNKVLTRSDKARGKSDNVPSEEVVKKMKNYWRQLLNAKLITQRKFDNLTKAERGGLSELDKAGFIKRQLVETRQITKHVAQILDSRMNTKYDENDKLIREVKVITLKSKLVSDFRKDFQFYKVREINNYHHAHDAYLNAVVGTALIKKYPKLESEFVYGDYKVYDVRKMIAKSEQEIGKATAKYFFYSNIMNFFKTEITLANGEIRKRPLIETNGETGEIVWDKGRDFATVRKVLSMPQVNIVKKTEVQTGGFSKESILPKRNSDKLIARKKDWDPKKYGGFDSPTVAYSVLVVAKVEKGKSKKLKSVKELLGITIMERSSFEKNPIDFLEAKGYKEVKKDLIIKLPKYSLFELENGRKRMLASAGELQKGNELALPSKYVNFLYLASHYEKLKGSPEDNEQKQLFVEQHKHYLDEIIEQISEFSKRVILADANLDKVLSAYNKHRDKPIREQAENIIHLFTLTNLGAPAAFKYFDTTIDRKRYTSTKEVLDATLIHQSITGLYETRIDLSQLGGDGGGSSGSSGSSGSSGGTLGDQGSRGSDPLPEPRVTLTVEGIPTEFLVNTGAEHSVLTKPMGKMGSKRTVVAGATGSKVYPWTTKRLLKIGQKQVTHSFLVIPECPAPLLGRDLLTKLKAQIQFSTEGPQVTWEDRPAMCLVLNLEEEYRLHEKPVPPSIDPSWLQLFPMVWAEKAGMGLANQVPPVVVELKSDASPVAVRQYPMSKEAREGIRPHIQRFLDLGILVPCQSPWNTPLLPVKKPGTNDYRPVQDLREVNKRVQDIHPTVPNPYNLLSSLPPSHTWYSVLDLKDAFFCLKLHPNSQPLFAFEWRDPEKGNTGQLTWTRLPQGFKNSPTLFNEALHRDLASFRALNPQVVMLQYVDDLLVAAPTYRDCKEGTRRLLQELSKLGYRVSAKKAQLCREEVTYLGYLLKGGKRWLTPARKATVMKIPTPTTPRQVREFLGKAGFCRLFIPGFASLAAPLYPLTRPKVPFTWTEAHQEAFGRIKEALLSAPALALPDLTKPFALYVDEKEGVARGVLTQTLGPWRRPVAYLSKKLDPVASGWPTCLKAIAAVALLLKDADKLTLGQNVLVIAPHNLESIVRQPPDRWMTNARMTHYQSLLLNERVSFAPPAILNPATLLPVESDDTPIHICSEILAEETGTRPDLRDQPLPGVPAWYTDGSSFIMDGRRQAGAAIVDNKRTVWASNLPEGTSAQKAELIALTQALRLAEGKSINIYTDSRYAFATAHVHGAIYKQRGWLTSAGKDIKNKEEILALLEAIHLPKRVAIIHCPGHQRGTDPVATGNRKADEAAKQAAQSTRILTETTKNAGKRTADGSEFEKRTADGSEFESPKKKAKVE

SEQ ID NO: 6322 - protein, 2097 aa, synthetic construct
MPAAKRVKLDGGDKKYSIGLDIGTNSVGWAVITDEYKVPSKKFKVLGNTDRHSIKKNLIGALLFDSGETAEATRLKRTARRRYTRRKNRICYLQEIFSNEMAKVDDSFFHRLEESFLVEEDKKHERHPIFGNIVDEVAYHEKYPTIYHLRKKLVDSTDKADLRLIYLALAHMIKFRGHFLIEGDLNPDNSDVDKLFIQLVQTYNQLFEENPINASGVDAKAILSARLSKSRRLENLIAQLPGEKKNGLFGNLIALSLGLTPNFKSNFDLAEDAKLQLSKDTYDDDLDNLLAQIGDQYADLFLAAKNLSDAILLSDILRVNTEITKAPLSASMIKRYDEHHQDLTLLKALVRQQLPEKYKEIFFDQSKNGYAGYIDGGASQEEFYKFIKPILEKMDGTEELLVKLNREDLLRKQRTFDNGSIPHQIHLGELHAILRRQEDFYPFLKDNREKIEKILTFRIPYYVGPLARGNSRFAWMTRKSEETITPWNFEEVVDKGASAQSFIERMTNFDKNLPNEKVLPKHSLLYEYFTVYNELTKVKYVTEGMRKPAFLSGEQKKAIVDLLFKTNRKVTVKQLKEDYFKKIECFDSVEISGVEDRFNASLGTYHDLLKIIKDKDFLDNEENEDILEDIVLTLTLFEDREMIEERLKTYAHLFDDKVMKQLKRRRYTGWGRLSRKLINGIRDKQSGKTILDFLKSDGFANRNFMQLIHDDSLTFKEDIQKAQVSGQGDSLHEHIANLAGSPAIKKGILQTVKVVDELVKVMGRHKPENIVIEMARENQTTQKGQKNSRERMKRIEEGIKELGSQILKEHPVENTQLQNEKLYLYYLQNGRDMYVDQELDINRLSDYDVDHIVPQSFLKDDSIDNKVLTRSDKARGKSDNVPSEEVVKKMKNYWRQLLNAKLITQRKFDNLTKAERGGLSELDKAGFIKRQLVETRQITKHVAQILDSRMNTKYDENDKLIREVKVITLKSKLVSDFRKDFQFYKVREINNYHHAHDAYLNAVVGTALIKKYPKLESEFVYGDYKVYDVRKMIAKSEQEIGKATAKYFFYSNIMNFFKTEITLANGEIRKRPLIETNGETGEIVWDKGRDFATVRKVLSMPQVNIVKKTEVQTGGFSKESILPKRNSDKLIARKKDWDPKKYGGFDSPTVAYSVLVVAKVEKGKSKKLKSVKELLGITIMERSSFEKNPIDFLEAKGYKEVKKDLIIKLPKYSLFELENGRKRMLASAGELQKGNELALPSKYVNFLYLASHYEKLKGSPEDNEQKQLFVEQHKHYLDEIIEQISEFSKRVILADANLDKVLSAYNKHRDKPIREQAENIIHLFTLTNLGAPAAFKYFDTTIDRKRYTSTKEVLDATLIHQSITGLYETRIDLSQLGGDGGGSSGSSGSSGSSGGLGIEDEYRLHETSTEPDVSLGSTWLSDFPQAWAETGGMGLAVRQAPLIIPLKATSTPVSIQQYPMSHEARLGIKPHIQRLLDQGILVPCQSPWNTPLLPVKKPGTNDYRPVQDLREVNKRVEDIHPTVPNPYNLLSGLPPSHQWYTVLDLKDAFFCLRLHPTSQPLFAFEWRDPGMGISGQLTWTRLPQGFKNSPTLFNEALHRDLADFRIQHPDLILLQYVDDILLAATSELDCQQGTRALLQTLGDLGYRASAKKAQICQKQVKYLGYLLREGQRWLTEARKETVMGQPVPKTPRQLREFLGKAGFCRLFIPGFAEMAAPLYPLTKPGTLFSWGPDQQKAYQEIKQALLTAPALGLPDLTKPFELFVDEKQGYAKGVLTQKLGPWRRPVAYLSKKLDPVAAGWPPCLRMVAAIAVLTKDAGKLTMGQPLVILAPHAVEALVKQPPDRWLSNARMTHYQAMLLDTDRVQFGPVVALNPATLLPLPEEGAPHDCLEILAETHGTRPDLTDQPIPDADHTWYTDGSSFLQEGQRKAGAAVTTETEVIWAGALPAGTSAQRAELIALTQALKMAEGKRLNVYTDSRYAFATAHIHGEIYRRRGWLTSEGREIKNKSEILALLKALFLPKRLSIIHCLGHQKGDSAEARGNRLADQAAREAAIKTPPDTSTLLIAGKRTADGSEFEKRTADGSEFESPKKKAKVE

SEQ ID NO: 6323 - protein, 2097 aa, synthetic construct
MPAAKRVKLDGGDKKYSIGLDIGTNSVGWAVITDEYKVPSKKFKVLGNTDRHSIKKNLIGALLFDSGETAEATRLKRTARRRYTRRKNRICYLQEIFSNEMAKVDDSFFHRLEESFLVEEDKKHERHPIFGNIVDEVAYHEKYPTIYHLRKKLVDSTDKADLRLIYLALAHMIKFRGHFLIEGDLNPDNSDVDKLFIQLVQTYNQLFEENPINASGVDAKAILSARLSKSRRLENLIAQLPGEKKNGLFGNLIALSLGLTPNFKSNFDLAEDAKLQLSKDTYDDDLDNLLAQIGDQYADLFLAAKNLSDAILLSDILRVNTEITKAPLSASMIKRYDEHHQDLTLLKALVRQQLPEKYKEIFFDQSKNGYAGYIDGGASQEEFYKFIKPILEKMDGTEELLVKLNREDLLRKQRTFDNGSIPHQIHLGELHAILRRQEDFYPFLKDNREKIEKILTFRIPYYVGPLARGNSRFAWMTRKSEETITPWNFEEVVDKGASAQSFIERMTNFDKNLPNEKVLPKHSLLYEYFTVYNELTKVKYVTEGMRKPAFLSGEQKKAIVDLLFKTNRKVTVKQLKEDYFKKIECFDSVEISGVEDRFNASLGTYHDLLKIIKDKDFLDNEENEDILEDIVLTLTLFEDREMIEERLKTYAHLFDDKVMKQLKRRRYTGWGRLSRKLINGIRDKQSGKTILDFLKSDGFANRNFMQLIHDDSLTFKEDIQKAQVSGQGDSLHEHIANLAGSPAIKKGILQTVKVVDELVKVMGRHKPENIVIEMARENQTTQKGQKNSRERMKRIEEGIKELGSQILKEHPVENTQLQNEKLYLYYLQNGRDMYVDQELDINRLSDYDVDHIVPQSFLKDDSIDNKVLTRSDKARGKSDNVPSEEVVKKMKNYWRQLLNAKLITQRKFDNLTKAERGGLSELDKAGFIKRQLVETRQITKHVAQILDSRMNTKYDENDKLIREVKVITLKSKLVSDFRKDFQFYKVREINNYHHAHDAYLNAVVGTALIKKYPKLESEFVYGDYKVYDVRKMIAKSEQEIGKATAKYFFYSNIMNFFKTEITLANGEIRKRPLIETNGETGEIVWDKGRDFATVRKVLSMPQVNIVKKTEVQTGGFSKESILPKRNSDKLIARKKDWDPKKYGGFDSPTVAYSVLVVAKVEKGKSKKLKSVKELLGITIMERSSFEKNPIDFLEAKGYKEVKKDLIIKLPKYSLFELENGRKRMLASAGELQKGNELALPSKYVNFLYLASHYEKLKGSPEDNEQKQLFVEQHKHYLDEIIEQISEFSKRVILADANLDKVLSAYNKHRDKPIREQAENIIHLFTLTNLGAPAAFKYFDTTIDRKRYTSTKEVLDATLIHQSITGLYETRIDLSQLGGDGGGSSGSSGSSGSSGGTLGIEDEYRLHETSTEPDVSLGSTWLSDFPQAWAETGGMGLAVRQAPLIIPLKATSTPVSIQQYPMSHEARLGIKPHIQRLLDQGILVPCQSPWNTPLLPVKKPGTNDYRPVQDLREVNKRVEDIHPTVPNPYNLLSGLPPSHQWYTVLDLKDAFFCLRLHPTSQPLFAFEWRDPGMGISGQLTWTRLPQGFKNSPTLFNEALHRDLADFRIQHPDLILLQYVDDILLAATSELDCQQGTRALLQTLGDLGYRASAKKAQICQKQVKYLGYLLREGQRWLTEARKETVMGQPVPKTPRQLREFLGTAGFCRLWIPGFAEMAAPLYPLTKPGTLFSWGPDQQKAYQEIKQALLTAPALGLPDLTKPFELFVDEKQGYAKGVLTQKLGPWRRPVAYLSKKLDPVAAGWPPCLRMVAAIAVLTKDAGKLTMGQPLVILAPHAVEALVKQPPDRWLSNARMTHYQAMLLDTDRVQFGPVVALNPATLLPLPEEGAPHDCLEILAETHGTRPDLTDQPIPDADHTWYTDGSSFLQEGQRKAGAAVTTETEVIWAGALPAGTSAQRAELIALTQALKMAEGKRLNVYTDSRYAFATAHIHGEIYRRRGWLTSEGREIKNKSEILALLKALFLPKRLSIIHCLGHQKGDSAEARGNRLADQAAREAAIKTPPDTSTLLAGKRTADGSEFEKRTADGSEFESPKKKAKVE

SEQ ID NO: 6324 - protein, 2097 aa, synthetic construct
MPAAKRVKLDGGDKKYSIGLDIGTNSVGWAVITDEYKVPSKKFKVLGNTDRHSIKKNLIGALLFDSGETAEATRLKRTARRRYTRRKNRICYLQEIFSNEMAKVDDSFFHRLEESFLVEEDKKHERHPIFGNIVDEVAYHEKYPTIYHLRKKLVDSTDKADLRLIYLALAHMIKFRGHFLIEGDLNPDNSDVDKLFIQLVQTYNQLFEENPINASGVDAKAILSARLSKSRRLENLIAQLPGEKKNGLFGNLIALSLGLTPNFKSNFDLAEDAKLQLSKDTYDDDLDNLLAQIGDQYADLFLAAKNLSDAILLSDILRVNTEITKAPLSASMIKRYDEHHQDLTLLKALVRQQLPEKYKEIFFDQSKNGYAGYIDGGASQEEFYKFIKPILEKMDGTEELLVKLNREDLLRKQRTFDNGSIPHQIHLGELHAILRRQEDFYPFLKDNREKIEKILTFRIPYYVGPLARGNSRFAWMTRKSEETITPWNFEEVVDKGASAQSFIERMTNFDKNLPNEKVLPKHSLLYEYFTVYNELTKVKYVTEGMRKPAFLSGEQKKAIVDLLFKTNRKVTVKQLKEDYFKKIECFDSVEISGVEDRFNASLGTYHDLLKIIKDKDFLDNEENEDILEDIVLTLTLFEDREMIEERLKTYAHLFDDKVMKQLKRRRYTGWGRLSRKLINGIRDKQSGKTILDFLKSDGFANRNFMQLIHDDSLTFKEDIQKAQVSGQGDSLHEHIANLAGSPAIKKGILQTVKVVDELVKVMGRHKPENIVIEMARENQTTQKGQKNSRERMKRIEEGIKELGSQILKEHPVENTQLQNEKLYLYYLQNGRDMYVDQELDINRLSDYDVDHIVPQSFLKDDSIDNKVLTRSDKARGKSDNVPSEEVVKKMKNYWRQLLNAKLITQRKFDNLTKAERGGLSELDKAGFIKRQLVETRQITKHVAQILDSRMNTKYDENDKLIREVKVITLKSKLVSDFRKDFQFYKVREINNYHHAHDAYLNAVVGTALIKKYPKLESEFVYGDYKVYDVRKMIAKSEQEIGKATAKYFFYSNIMNFFKTEITLANGEIRKRPLIETNGETGEIVWDKGRDFATVRKVLSMPQVNIVKKTEVQTGGFSKESILPKRNSDKLIARKKDWDPKKYGGFDSPTVAYSVLVVAKVEKGKSKKLKSVKELLGITIMERSSFEKNPIDFLEAKGYKEVKKDLIIKLPKYSLFELENGRKRMLASAGELQKGNELALPSKYVNFLYLASHYEKLKGSPEDNEQKQLFVEQHKHYLDEIIEQISEFSKRVILADANLDKVLSAYNKHRDKPIREQAENIIHLFTLTNLGAPAAFKYFDTTIDRKRYTSTKEVLDATLIHQSITGLYETRIDLSQLGGDGGGSSGSSGSSGSSGGTLNIEDEYRLHETSKGPDVPLGSTWLSDFPQAWAETGGMGLAVRQAPLIIPLKATSTPVSIKQYPMSQEARLGIKPHIQRLLDQGILVPCQSPWNTPLLPVKKPGTNDYRPVQDLREVNKRVEDIHPTVPNPYNLLSGLPPSHQWYTVLDLKDAFFCLRLHPTSQSLFAFEWRDPEMGISGQLTWTRLPQGFKNSPTLFNEALHRDLADFRIQHPDLILLQYVDDLLLAATSELDCQQGTRALLQTLGDLGYRASAKKAQICQKQVKYLGYLLKEGQRWLTEARKETVMGQPTPKTPRQLREFLGTAGFCRLWIPGFAEMAAPLYPLTKPGTLFEWGPDQQKAYQEIKQALLTAPALGLPDLTKPFELFVDEKQGYAKGVLTQKLGPWRRPVAYLSKKLDPVAAGWPPCLRMVAAIAVLTKDAGKLTMGQPLVILAPHAVEALVKQPPDRWLSNARMTHYQALLLDTDRVQFGPIVALNPATLLPLPEEGLQHDCLDILAEAHGTRPDLTDQPLPDADHTWYTDGSSFLQEGQRKAGAAVTTETEVVWAKALPAGTSAQRAELIALTQALKMAEGKKLNVYTDSRYAFATAHIHGEIYRRRGWLTSEGKEIKNKDEILALLKALFLPKRLSIIHCPGHQKGNRAEARGNRMADQAAREVATRETPETSTLLAGKRTADGSEFEKRTADGSEFESPKKKAKVE

SEQ ID NO: 6325 - protein, 2088 aa, synthetic construct
MPAAKRVKLDGGDKKYSIGLDIGTNSVGWAVITDEYKVPSKKFKVLGNTDRHSIKKNLIGALLFDSGETAEATRLKRTARRRYTRRKNRICYLQEIFSNEMAKVDDSFFHRLEESFLVEEDKKHERHPIFGNIVDEVAYHEKYPTIYHLRKKLVDSTDKADLRLIYLALAHMIKFRGHFLIEGDLNPDNSDVDKLFIQLVQTYNQLFEENPINASGVDAKAILSARLSKSRRLENLIAQLPGEKKNGLFGNLIALSLGLTPNFKSNFDLAEDAKLQLSKDTYDDDLDNLLAQIGDQYADLFLAAKNLSDAILLSDILRVNTEITKAPLSASMIKRYDEHHQDLTLLKALVRQQLPEKYKEIFFDQSKNGYAGYIDGGASQEEFYKFIKPILEKMDGTEELLVKLNREDLLRKQRTFDNGSIPHQIHLGELHAILRRQEDFYPFLKDNREKIEKILTFRIPYYVGPLARGNSRFAWMTRKSEETITPWNFEEVVDKGASAQSFIERMTNFDKNLPNEKVLPKHSLLYEYFTVYNELTKVKYVTEGMRKPAFLSGEQKKAIVDLLFKTNRKVTVKQLKEDYFKKIECFDSVEISGVEDRFNASLGTYHDLLKIIKDKDFLDNEENEDILEDIVLTLTLFEDREMIEERLKTYAHLFDDKVMKQLKRRRYTGWGRLSRKLINGIRDKQSGKTILDFLKSDGFANRNFMQLIHDDSLTFKEDIQKAQVSGQGDSLHEHIANLAGSPAIKKGILQTVKVVDELVKVMGRHKPENIVIEMARENQTTQKGQKNSRERMKRIEEGIKELGSQILKEHPVENTQLQNEKLYLYYLQNGRDMYVDQELDINRLSDYDVDHIVPQSFLKDDSIDNKVLTRSDKARGKSDNVPSEEVVKKMKNYWRQLLNAKLITQRKFDNLTKAERGGLSELDKAGFIKRQLVETRQITKHVAQILDSRMNTKYDENDKLIREVKVITLKSKLVSDFRKDFQFYKVREINNYHHAHDAYLNAVVGTALIKKYPKLESEFVYGDYKVYDVRKMIAKSEQEIGKATAKYFFYSNIMNFFKTEITLANGEIRKRPLIETNGETGEIVWDKGRDFATVRKVLSMPQVNIVKKTEVQTGGFSKESILPKRNSDKLIARKKDWDPKKYGGFDSPTVAYSVLVVAKVEKGKSKKLKSVKELLGITIMERSSFEKNPIDFLEAKGYKEVKKDLIIKLPKYSLFELENGRKRMLASAGELQKGNELALPSKYVNFLYLASHYEKLKGSPEDNEQKQLFVEQHKHYLDEIIEQISEFSKRVILADANLDKVLSAYNKHRDKPIREQAENIIHLFTLTNLGAPAAFKYFDTTIDRKRYTSTKEVLDATLIHQSITGLYETRIDLSQLGGDGGGSSGSSGSSGSSGGIPWLMKKPLQLTTLVPLQEYEERLLKQTMLTGSYKEKLQSLFLKYDALWQHWENQVGHRRIKPHHIATGTVNPRPQKQYPINPKAKASIQTVINDLLKQGVLIQQNSIMNTPVYPVPKPDGKWRMVLDYREVNKTIPLIAAQNQHSAGILSSIFRGKYKTTLDLSNGFWAHSITPESYWLTAFTWLGQQYCWTRLPQGFLNSPALFNADVVDLLKEVPNVQVYVDDIYISHDDPREHLEQLEKVFSLLLNAGYVVSLKKSEIAQHEVEFLGFNITKEGRGLTETFKQKLLNITPPRDLKQLQSILGLLNFARNFIPNFSELVKPLYNIIATAPGKYITWTTDNSQQLQNIISMLNSAENLEERNPEVRLIMKVNTSPSAGYIRFYNEFAKRPIMYLNYVYTKAEVKFTNTEKLLTTIHKGLIKALDLGMGQEILVYSPIVSMTKIQKTPLPERKALPIRWITWMSYLEDPRIQFHYDKTLPELQQVPTVTDDIIAKIKHPSEFSMVFYTDGSAIKHPNVNKSHNAGMGIAQVQFKPEFTVINTWSIPLGDHTAQLAEVAAVEFACKKALKIDGPVLIVTDSFYVAESVNKELPYWQSNGFFNNKKKPLKHVSKWKSIADCIQLKPDIIIIHEKGHQPTASTFHTEGNNLADKLATQGSYVVNAGKRTADGSEFEKRTADGSEFESPKKKAKVE

SEQ ID NO: 6326 - protein, 2177 aa, synthetic construct
MPAAKRVKLDGGDKKYSIGLDIGTNSVGWAVITDEYKVPSKKFKVLGNTDRHSIKKNLIGALLFDSGETAEATRLKRTARRRYTRRKNRICYLQEIFSNEMAKVDDSFFHRLEESFLVEEDKKHERHPIFGNIVDEVAYHEKYPTIYHLRKKLVDSTDKADLRLIYLALAHMIKFRGHFLIEGDLNPDNSDVDKLFIQLVQTYNQLFEENPINASGVDAKAILSARLSKSRRLENLIAQLPGEKKNGLFGNLIALSLGLTPNFKSNFDLAEDAKLQLSKDTYDDDLDNLLAQIGDQYADLFLAAKNLSDAILLSDILRVNTEITKAPLSASMIKRYDEHHQDLTLLKALVRQQLPEKYKEIFFDQSKNGYAGYIDGGASQEEFYKFIKPILEKMDGTEELLVKLNREDLLRKQRTFDNGSIPHQIHLGELHAILRRQEDFYPFLKDNREKIEKILTFRIPYYVGPLARGNSRFAWMTRKSEETITPWNFEEVVDKGASAQSFIERMTNFDKNLPNEKVLPKHSLLYEYFTVYNELTKVKYVTEGMRKPAFLSGEQKKAIVDLLFKTNRKVTVKQLKEDYFKKIECFDSVEISGVEDRFNASLGTYHDLLKIIKDKDFLDNEENEDILEDIVLTLTLFEDREMIEERLKTYAHLFDDKVMKQLKRRRYTGWGRLSRKLINGIRDKQSGKTILDFLKSDGFANRNFMQLIHDDSLTFKEDIQKAQVSGQGDSLHEHIANLAGSPAIKKGILQTVKVVDELVKVMGRHKPENIVIEMARENQTTQKGQKNSRERMKRIEEGIKELGSQILKEHPVENTQLQNEKLYLYYLQNGRDMYVDQELDINRLSDYDVDHIVPQSFLKDDSIDNKVLTRSDKARGKSDNVPSEEVVKKMKNYWRQLLNAKLITQRKFDNLTKAERGGLSELDKAGFIKRQLVETRQITKHVAQILDSRMNTKYDENDKLIREVKVITLKSKLVSDFRKDFQFYKVREINNYHHAHDAYLNAVVGTALIKKYPKLESEFVYGDYKVYDVRKMIAKSEQEIGKATAKYFFYSNIMNFFKTEITLANGEIRKRPLIETNGETGEIVWDKGRDFATVRKVLSMPQVNIVKKTEVQTGGFSKESILPKRNSDKLIARKKDWDPKKYGGFDSPTVAYSVLVVAKVEKGKSKKLKSVKELLGITIMERSSFEKNPIDFLEAKGYKEVKKDLIIKLPKYSLFELENGRKRMLASAGELQKGNELALPSKYVNFLYLASHYEKLKGSPEDNEQKQLFVEQHKHYLDEIIEQISEFSKRVILADANLDKVLSAYNKHRDKPIREQAENIIHLFTLTNLGAPAAFKYFDTTIDRKRYTSTKEVLDATLIHQSITGLYETRIDLSQLGGDGGGSSGSSGSSGSSGGMDPLQLLQPLEAEIKGTKLKAHWNSGATITCVPQAFLEEEVPIKNIWIKTIHGEKEQPVYYLTFKIQGRKVEAEVISSPYDYILVSPSDIPWLMKKPLQLTTLVPLQEYEERLLKQTMLTGSYKEKLQSLFLKYDALWQHWENQVGHRRIKPHHIATGTVNPRPQKQYPINPKAKASIQTVINDLLKQGVLIQQNSIMNTPVYPVPKPDGKWRMVLDYREVNKTIPLIAAQNQHSAGILSSIFRGKYKTTLDLSNGFWAHSITPESYWLTAFTWLGQQYCWTRLPQGFLNSPALFNADVVDLLKEVPNVQVYVDDIYISHDDPREHLEQLEKVFSLLLNAGYVVSLKKSEIAQHEVEFLGFNITKEGRGLTETFKQKLLNITPPRDLKQLQSILGKLNFARNFIPNFSELVKPLYNIIATAPGKYITWTTDNSQQLQNIISMLNSAENLEERNPEVRLIMKVNTSPSAGYIRFYNEFAKRPIMYLNYVYTKAEVKFTNTEKLLTTIHKGLIKALDLGMGQEILVYSPIVSMTKIQKTPLPERKALPIRWITWMSYLEDPRIQFHYDKTLPELQQVPTVTDDIIAKIKHPSEFSMVFYTDGSAIKHPNVNKSHNAGMGIAQVQFKPEFTVINTWSIPLGDHTAQLAEVAAVEFACKKALKIDGPVLIVTDSFYVAESVNKELPYWQSNGFFNNKKKPLKHVSKWKSIADCIQLKPDIIIIHEKGHQPTASTFHTEGNNLADKLATQGSYVVNAGKRTADGSEFEKRTADGSEFESPKKKAKVE

SEQ ID NO: 6327 - protein, 2097 aa, synthetic construct
MPAAKRVKLDGGDKKYSIGLDIGTNSVGWAVITDEYKVPSKKFKVLGNTDRHSIKKNLIGALLFDSGETAEATRLKRTARRRYTRRKNRICYLQEIFSNEMAKVDDSFFHRLEESFLVEEDKKHERHPIFGNIVDEVAYHEKYPTIYHLRKKLVDSTDKADLRLIYLALAHMIKFRGHFLIEGDLNPDNSDVDKLFIQLVQTYNQLFEENPINASGVDAKAILSARLSKSRRLENLIAQLPGEKKNGLFGNLIALSLGLTPNFKSNFDLAEDAKLQLSKDTYDDDLDNLLAQIGDQYADLFLAAKNLSDAILLSDILRVNTEITKAPLSASMIKRYDEHHQDLTLLKALVRQQLPEKYKEIFFDQSKNGYAGYIDGGASQEEFYKFIKPILEKMDGTEELLVKLNREDLLRKQRTFDNGSIPHQIHLGELHAILRRQEDFYPFLKDNREKIEKILTFRIPYYVGPLARGNSRFAWMTRKSEETITPWNFEEVVDKGASAQSFIERMTNFDKNLPNEKVLPKHSLLYEYFTVYNELTKVKYVTEGMRKPAFLSGEQKKAIVDLLFKTNRKVTVKQLKEDYFKKIECFDSVEISGVEDRFNASLGTYHDLLKIIKDKDFLDNEENEDILEDIVLTLTLFEDREMIEERLKTYAHLFDDKVMKQLKRRRYTGWGRLSRKLINGIRDKQSGKTILDFLKSDGFANRNFMQLIHDDSLTFKEDIQKAQVSGQGDSLHEHIANLAGSPAIKKGILQTVKVVDELVKVMGRHKPENIVIEMARENQTTQKGQKNSRERMKRIEEGIKELGSQILKEHPVENTQLQNEKLYLYYLQNGRDMYVDQELDINRLSDYDVDHIVPQSFLKDDSIDNKVLTRSDKARGKSDNVPSEEVVKKMKNYWRQLLNAKLITQRKFDNLTKAERGGLSELDKAGFIKRQLVETRQITKHVAQILDSRMNTKYDENDKLIREVKVITLKSKLVSDFRKDFQFYKVREINNYHHAHDAYLNAVVGTALIKKYPKLESEFVYGDYKVYDVRKMIAKSEQEIGKATAKYFFYSNIMNFFKTEITLANGEIRKRPLIETNGETGEIVWDKGRDFATVRKVLSMPQVNIVKKTEVQTGGFSKESILPKRNSDKLIARKKDWDPKKYGGFDSPTVAYSVLVVAKVEKGKSKKLKSVKELLGITIMERSSFEKNPIDFLEAKGYKEVKKDLIIKLPKYSLFELENGRKRMLASAGELQKGNELALPSKYVNFLYLASHYEKLKGSPEDNEQKQLFVEQHKHYLDEIIEQISEFSKRVILADANLDKVLSAYNKHRDKPIREQAENIIHLFTLTNLGAPAAFKYFDTTIDRKRYTSTKEVLDATLIHQSITGLYETRIDLSQLGGDGGGSSGSSGSSGSSGGTLNIEDEYRLHETSKEPDVPLGSTWLSDFPQAWAETGGMGLAVRQAPLIIPLKATSTPVSIKQYPMSQEARLGIKPHIQRLLDQGILVPCQSPWNTPLLPVKKPGTNDYRPVQDLREVNKRVEDIHPTVPNPYNLLSGLPPSHQWYTVLDLKDAFFCLRLHPTSQPLFAFEWRDPEMGISGQLTWTRLPQGFKNSPTLFNEALHRDLADFRIQHPDLILLQYVDDLLLAATSEQDCQRGTRALLQTLGNLGYRASAKKAQICQKQVKYLGYLLKEGQRWLTEARKETVMGQPTPKTPRQLREFLGTAGFCRLWIPGFAEMAAPLYPLTKPGTLFNWGPDQQKAYQEIKQALLTAPALGLPDLTKPFELFVDEKQGYAKGVLTQKLGPWRRPVAYLSKKLDPVAAGWPPCLRMVAAIAVLTKDAGKLTMGQPLVILAPHAVEALVKQPPDRWLSNARMTHYQAMLLDTDRVQFGPVVALNPATLLPLPEKEAPHDCLEILAETHGTRPDLTDQPIPDADYTWYTDGSSFLQEGQRRAGAAVTTETEVIWARALPAGTSAQRAELIALTQALKMAEGKKLNVYTDSRYAFATAHVHGEIYRRRGWLTSEGREIKNKNEILALLKALFLPKRLSIIHCPGHQKGNSAEARGNRMADQAAREAAMKAVLETSTLLAGKRTADGSEFEKRTADGSEFESPKKKAKVE

SEQ ID NO: 6328 - protein, 2102 aa, synthetic construct
MPAAKRVKLDGGDKKYSIGLDIGTNSVGWAVITDEYKVPSKKFKVLGNTDRHSIKKNLIGALLFDSGETAEATRLKRTARRRYTRRKNRICYLQEIFSNEMAKVDDSFFHRLEESFLVEEDKKHERHPIFGNIVDEVAYHEKYPTIYHLRKKLVDSTDKADLRLIYLALAHMIKFRGHFLIEGDLNPDNSDVDKLFIQLVQTYNQLFEENPINASGVDAKAILSARLSKSRRLENLIAQLPGEKKNGLFGNLIALSLGLTPNFKSNFDLAEDAKLQLSKDTYDDDLDNLLAQIGDQYADLFLAAKNLSDAILLSDILRVNTEITKAPLSASMIKRYDEHHQDLTLLKALVRQQLPEKYKEIFFDQSKNGYAGYIDGGASQEEFYKFIKPILEKMDGTEELLVKLNREDLLRKQRTFDNGSIPHQIHLGELHAILRRQEDFYPFLKDNREKIEKILTFRIPYYVGPLARGNSRFAWMTRKSEETITPWNFEEVVDKGASAQSFIERMTNFDKNLPNEKVLPKHSLLYEYFTVYNELTKVKYVTEGMRKPAFLSGEQKKAIVDLLFKTNRKVTVKQLKEDYFKKIECFDSVEISGVEDRFNASLGTYHDLLKIIKDKDFLDNEENEDILEDIVLTLTLFEDREMIEERLKTYAHLFDDKVMKQLKRRRYTGWGRLSRKLINGIRDKQSGKTILDFLKSDGFANRNFMQLIHDDSLTFKEDIQKAQVSGQGDSLHEHIANLAGSPAIKKGILQTVKVVDELVKVMGRHKPENIVIEMARENQTTQKGQKNSRERMKRIEEGIKELGSQILKEHPVENTQLQNEKLYLYYLQNGRDMYVDQELDINRLSDYDVDHIVPQSFLKDDSIDNKVLTRSDKARGKSDNVPSEEVVKKMKNYWRQLLNAKLITQRKFDNLTKAERGGLSELDKAGFIKRQLVETRQITKHVAQILDSRMNTKYDENDKLIREVKVITLKSKLVSDFRKDFQFYKVREINNYHHAHDAYLNAVVGTALIKKYPKLESEFVYGDYKVYDVRKMIAKSEQEIGKATAKYFFYSNIMNFFKTEITLANGEIRKRPLIETNGETGEIVWDKGRDFATVRKVLSMPQVNIVKKTEVQTGGFSKESILPKRNSDKLIARKKDWDPKKYGGFDSPTVAYSVLVVAKVEKGKSKKLKSVKELLGITIMERSSFEKNPIDFLEAKGYKEVKKDLIIKLPKYSLFELENGRKRMLASAGELQKGNELALPSKYVNFLYLASHYEKLKGSPEDNEQKQLFVEQHKHYLDEIIEQISEFSKRVILADANLDKVLSAYNKHRDKPIREQAENIIHLFTLTNLGAPAAFKYFDTTIDRKRYTSTKEVLDATLIHQSITGLYETRIDLSQLGGDGGGSSGSSGSSGSSGSSGGTAPLEEEYRLFLEAPIQNVTLLEQWKREIPKVWAEINPPGLASTQAPIHVQLLSTALPVRVRQYPITLEAKRSLRETIRKFRAAGILRPVHSPWNTPLLPVRKSGTSEYRMVQDLREVNKRVETIHPTVPNPYTLLSLLPPDRIWYSVLDLKDAFFCIPLAPESQLIFAFEWADAEEGESGQLTWTRLPQGFKNSPTLFDEALNRDLQGFRLDHPSVSLLQYVDDLLIAADTQAACLSATRDLLMTLAELGYRVSGKKAQLCQEEVTYLGFKIHKGSRSLSNSRTQAILQIPVPKTKRQVREFLGTIGYCRLWIPGFAELAQPLYAATRGGNDPLVWGEKEEEAFQSLKLALTQPPALALPSLDKPFQLFVEETSGAAKGVLTQALGPWKRPVAYLSKRLDPVAAGWPRCLRAIAAAALLTREASKLTFGQDIEITSSHNLESLLRSPPDKWLTNARITQYQVLLLDPPRVRFKQTAALNPATLLPETDDTLPIHHCLDTLDSLTSTRPDLTDQPLAQAEATLFTDGSSYIRDGKRYAGAAVVTLDSVIWAEPLPIGTSAQKAELIALTKALEWSKDKSVNIYTDSRYAFATLHVHGMIYRERGLLTAGGKAIKNAPEILALLTAVWLPKRVAVMHCKGHQKDDAPTSTGNRRADEVAREVAIRPLSTQATISAGKRTADGSEFEKRTADGSEFESPKKKAKVE

SEQ ID NO: 6329 - protein, 2102 aa, synthetic construct
MPAAKRVKLDGGDKKYSIGLDIGTNSVGWAVITDEYKVPSKKFKVLGNTDRHSIKKNLIGALLFDSGETAEATRLKRTARRRYTRRKNRICYLQEIFSNEMAKVDDSFFHRLEESFLVEEDKKHERHPIFGNIVDEVAYHEKYPTIYHLRKKLVDSTDKADLRLIYLALAHMIKFRGHFLIEGDLNPDNSDVDKLFIQLVQTYNQLFEENPINASGVDAKAILSARLSKSRRLENLIAQLPGEKKNGLFGNLIALSLGLTPNFKSNFDLAEDAKLQLSKDTYDDDLDNLLAQIGDQYADLFLAAKNLSDAILLSDILRVNTEITKAPLSASMIKRYDEHHQDLTLLKALVRQQLPEKYKEIFFDQSKNGYAGYIDGGASQEEFYKFIKPILEKMDGTEELLVKLNREDLLRKQRTFDNGSIPHQIHLGELHAILRRQEDFYPFLKDNREKIEKILTFRIPYYVGPLARGNSRFAWMTRKSEETITPWNFEEVVDKGASAQSFIERMTNFDKNLPNEKVLPKHSLLYEYFTVYNELTKVKYVTEGMRKPAFLSGEQKKAIVDLLFKTNRKVTVKQLKEDYFKKIECFDSVEISGVEDRFNASLGTYHDLLKIIKDKDFLDNEENEDILEDIVLTLTLFEDREMIEERLKTYAHLFDDKVMKQLKRRRYTGWGRLSRKLINGIRDKQSGKTILDFLKSDGFANRNFMQLIHDDSLTFKEDIQKAQVSGQGDSLHEHIANLAGSPAIKKGILQTVKVVDELVKVMGRHKPENIVIEMARENQTTQKGQKNSRERMKRIEEGIKELGSQILKEHPVENTQLQNEKLYLYYLQNGRDMYVDQELDINRLSDYDVDHIVPQSFLKDDSIDNKVLTRSDKARGKSDNVPSEEVVKKMKNYWRQLLNAKLITQRKFDNLTKAERGGLSELDKAGFIKRQLVETRQITKHVAQILDSRMNTKYDENDKLIREVKVITLKSKLVSDFRKDFQFYKVREINNYHHAHDAYLNAVVGTALIKKYPKLESEFVYGDYKVYDVRKMIAKSEQEIGKATAKYFFYSNIMNFFKTEITLANGEIRKRPLIETNGETGEIVWDKGRDFATVRKVLSMPQVNIVKKTEVQTGGFSKESILPKRNSDKLIARKKDWDPKKYGGFDSPTVAYSVLVVAKVEKGKSKKLKSVKELLGITIMERSSFEKNPIDFLEAKGYKEVKKDLIIKLPKYSLFELENGRKRMLASAGELQKGNELALPSKYVNFLYLASHYEKLKGSPEDNEQKQLFVEQHKHYLDEIIEQISEFSKRVILADANLDKVLSAYNKHRDKPIREQAENIIHLFTLTNLGAPAAFKYFDTTIDRKRYTSTKEVLDATLIHQSITGLYETRIDLSQLGGDGGGSSGSSGSSGSSGSSGGTAPLEEEYRLFLEAPIQNVTLLEQWKREIPKVWAEINPPGLASTQAPIHVQLLSTALPVRVRQYPITLEAKRSLRETIRKFRAAGILRPVHSPWNTPLLPVRKSGTSEYRMVQDLREVNKRVETIHPTVPNPYTLLSLLPPDRIWYSVLDLKDAFFCIPLAPESQLIFAFEWADAEEGESGQLTWTRLPQGFKNSPTLFNEALNRDLQGFRLDHPSVSLLQYVDDLLIAADTQAACLSATRDLLMTLAELGYRVSGKKAQLCQEEVTYLGFKIHKGSRSLSNSRTQAILQIPVPKTKRQVREFLGKIGYCRLFIPGFAELAQPLYAATRPGNDPLVWGEKEEEAFQSLKLALTQPPALALPSLDKPFQLFVEETSGAAKGVLTQALGPWKRPVAYLSKRLDPVAAGWPRCLRAIAAAALLTREASKLTFGQDIEITSSHNLESLLRSPPDKWLTNARITQYQVLLLDPPRVRFKQTAALNPATLLPETDDTLPIHHCLDTLDSLTSTRPDLTDQPLAQAEATLFTDGSSYIRDGKRYAGAAVVTLDSVIWAEPLPIGTSAQKAELIALTKALEWSKDKSVNIYTDSRYAFATLHVHGMIYRERGWLTAGGKAIKNAPEILALLTAVWLPKRVAVMHCKGHQKDDAPTSTGNRRADEVAREVAIRPLSTQATISAGKRTADGSEFEKRTADGSEFESPKKKAKVE

SEQ ID NO: 6330 - protein, 2131 aa, synthetic construct
MPAAKRVKLDGGDKKYSIGLDIGTNSVGWAVITDEYKVPSKKFKVLGNTDRHSIKKNLIGALLFDSGETAEATRLKRTARRRYTRRKNRICYLQEIFSNEMAKVDDSFFHRLEESFLVEEDKKHERHPIFGNIVDEVAYHEKYPTIYHLRKKLVDSTDKADLRLIYLALAHMIKFRGHFLIEGDLNPDNSDVDKLFIQLVQTYNQLFEENPINASGVDAKAILSARLSKSRRLENLIAQLPGEKKNGLFGNLIALSLGLTPNFKSNFDLAEDAKLQLSKDTYDDDLDNLLAQIGDQYADLFLAAKNLSDAILLSDILRVNTEITKAPLSASMIKRYDEHHQDLTLLKALVRQQLPEKYKEIFFDQSKNGYAGYIDGGASQEEFYKFIKPILEKMDGTEELLVKLNREDLLRKQRTFDNGSIPHQIHLGELHAILRRQEDFYPFLKDNREKIEKILTFRIPYYVGPLARGNSRFAWMTRKSEETITPWNFEEVVDKGASAQSFIERMTNFDKNLPNEKVLPKHSLLYEYFTVYNELTKVKYVTEGMRKPAFLSGEQKKAIVDLLFKTNRKVTVKQLKEDYFKKIECFDSVEISGVEDRFNASLGTYHDLLKIIKDKDFLDNEENEDILEDIVLTLTLFEDREMIEERLKTYAHLFDDKVMKQLKRRRYTGWGRLSRKLINGIRDKQSGKTILDFLKSDGFANRNFMQLIHDDSLTFKEDIQKAQVSGQGDSLHEHIANLAGSPAIKKGILQTVKVVDELVKVMGRHKPENIVIEMARENQTTQKGQKNSRERMKRIEEGIKELGSQILKEHPVENTQLQNEKLYLYYLQNGRDMYVDQELDINRLSDYDVDHIVPQSFLKDDSIDNKVLTRSDKARGKSDNVPSEEVVKKMKNYWRQLLNAKLITQRKFDNLTKAERGGLSELDKAGFIKRQLVETRQITKHVAQILDSRMNTKYDENDKLIREVKVITLKSKLVSDFRKDFQFYKVREINNYHHAHDAYLNAVVGTALIKKYPKLESEFVYGDYKVYDVRKMIAKSEQEIGKATAKYFFYSNIMNFFKTEITLANGEIRKRPLIETNGETGEIVWDKGRDFATVRKVLSMPQVNIVKKTEVQTGGFSKESILPKRNSDKLIARKKDWDPKKYGGFDSPTVAYSVLVVAKVEKGKSKKLKSVKELLGITIMERSSFEKNPIDFLEAKGYKEVKKDLIIKLPKYSLFELENGRKRMLASAGELQKGNELALPSKYVNFLYLASHYEKLKGSPEDNEQKQLFVEQHKHYLDEIIEQISEFSKRVILADANLDKVLSAYNKHRDKPIREQAENIIHLFTLTNLGAPAAFKYFDTTIDRKRYTSTKEVLDATLIHQSITGLYETRIDLSQLGGDGGGSSGSSGSSGSSGSSGGLLGRDLLTKLKAQIQFSTEGPQVTWEDRPAMCLVLNLEEEYRLHEKPVPPSIDPSWLQLFPMVWAEKAGMGLANQVPPVVVELKSDASPVAVRQYPMSKEAREGIRPHIQRFLDLGILVPCQSPWNTPLLPVKKPGTNDYRPVQDLREVNKRVQDIHPTVPNPYNLLSSLPPSHTWYSVLDLKDAFFCLKLHPNSQPLFAFEWRDPEKGNTGQLTWTRLPQGFKNSPTLFDEALHRDLASFRALNPQVVMLQYVDDLLVAAPTYRDCKEGTRRLLQELSKLGYRVSAKKAQLCREEVTYLGYLLKGGKRWLTPARKATVMKIPTPTTPRQVREFLGTAGFCRLWIPGFASLAAPLYPLTREKVPFTWTEAHQEAFGRIKEALLSAPALALPDLTKPFALYVDEKEGVARGVLTQTLGPWRRPVAYLSKKLDPVASGWPTCLKAIAAVALLLKDADKLTLGQNVLVIAPHNLESIVRQPPDRWMTNARMTHYQSLLLNERVSFAPPAILNPATLLPVESDDTPIHICSEILAEETGTRPDLRDQPLPGVPAWYTDGSSFIMDGRRQAGAAIVDNKRTVWASNLPEGTSAQKAELIALTQALRLAEGKSINIYTDSRYAFATAHVHGAIYKQRGLLTSAGKDIKNKEEILALLEAIHLPKRVAIIHCPGHQRGTDPVATGNRKADEAAKQAAQSTRILTETTKNAGKRTADGSEFEKRTADGSEFESPKKKAKVE

SEQ ID NO: 6331 - protein, 2222 aa, synthetic construct
MPAAKRVKLDGGDKKYSIGLDIGTNSVGWAVITDEYKVPSKKFKVLGNTDRHSIKKNLIGALLFDSGETAEATRLKRTARRRYTRRKNRICYLQEIFSNEMAKVDDSFFHRLEESFLVEEDKKHERHPIFGNIVDEVAYHEKYPTIYHLRKKLVDSTDKADLRLIYLALAHMIKFRGHFLIEGDLNPDNSDVDKLFIQLVQTYNQLFEENPINASGVDAKAILSARLSKSRRLENLIAQLPGEKKNGLFGNLIALSLGLTPNFKSNFDLAEDAKLQLSKDTYDDDLDNLLAQIGDQYADLFLAAKNLSDAILLSDILRVNTEITKAPLSASMIKRYDEHHQDLTLLKALVRQQLPEKYKEIFFDQSKNGYAGYIDGGASQEEFYKFIKPILEKMDGTEELLVKLNREDLLRKQRTFDNGSIPHQIHLGELHAILRRQEDFYPFLKDNREKIEKILTFRIPYYVGPLARGNSRFAWMTRKSEETITPWNFEEVVDKGASAQSFIERMTNFDKNLPNEKVLPKHSLLYEYFTVYNELTKVKYVTEGMRKPAFLSGEQKKAIVDLLFKTNRKVTVKQLKEDYFKKIECFDSVEISGVEDRFNASLGTYHDLLKIIKDKDFLDNEENEDILEDIVLTLTLFEDREMIEERLKTYAHLFDDKVMKQLKRRRYTGWGRLSRKLINGIRDKQSGKTILDFLKSDGFANRNFMQLIHDDSLTFKEDIQKAQVSGQGDSLHEHIANLAGSPAIKKGILQTVKVVDELVKVMGRHKPENIVIEMARENQTTQKGQKNSRERMKRIEEGIKELGSQILKEHPVENTQLQNEKLYLYYLQNGRDMYVDQELDINRLSDYDVDHIVPQSFLKDDSIDNKVLTRSDKARGKSDNVPSEEVVKKMKNYWRQLLNAKLITQRKFDNLTKAERGGLSELDKAGFIKRQLVETRQITKHVAQILDSRMNTKYDENDKLIREVKVITLKSKLVSDFRKDFQFYKVREINNYHHAHDAYLNAVVGTALIKKYPKLESEFVYGDYKVYDVRKMIAKSEQEIGKATAKYFFYSNIMNFFKTEITLANGEIRKRPLIETNGETGEIVWDKGRDFATVRKVLSMPQVNIVKKTEVQTGGFSKESILPKRNSDKLIARKKDWDPKKYGGFDSPTVAYSVLVVAKVEKGKSKKLKSVKELLGITIMERSSFEKNPIDFLEAKGYKEVKKDLIIKLPKYSLFELENGRKRMLASAGELQKGNELALPSKYVNFLYLASHYEKLKGSPEDNEQKQLFVEQHKHYLDEIIEQISEFSKRVILADANLDKVLSAYNKHRDKPIREQAENIIHLFTLTNLGAPAAFKYFDTTIDRKRYTSTKEVLDATLIHQSITGLYETRIDLSQLGGDGGGSSGSSGSSGSSGSSGGTLGDQGSRGSDPLPEPRVTLTVEGIPTEFLVNTGAEHSVLTKPMGKMGSKRTVVAGATGSKVYPWTTKRLLKIGQKQVTHSFLVIPECPAPLLGRDLLTKLKAQIQFSTEGPQVTWEDRPAMCLVLNLEEEYRLHEKPVPPSIDPSWLQLFPMVWAEKAGMGLANQVPPVVVELKSDASPVAVRQYPMSKEAREGIRPHIQRFLDLGILVPCQSPWNTPLLPVKKPGTNDYRPVQDLREVNKRVQDIHPTVPNPYNLLSSLPPSHTWYSVLDLKDAFFCLKLHPNSQPLFAFEWRDPEKGNTGQLTWTRLPQGFKNSPTLFNEALHRDLASFRALNPQVVMLQYVDDLLVAAPTYRDCKEGTRRLLQELSKLGYRVSAKKAQLCREEVTYLGYLLKGGKRWLTPARKATVMKIPTPTTPRQVREFLGTAGFCRLWIPGFASLAAPLYPLTRPKVPFTWTEAHQEAFGRIKEALLSAPALALPDLTKPFALYVDEKEGVARGVLTQTLGPWRRPVAYLSKKLDPVASGWPTCLKAIAAVALLLKDADKLTLGQNVLVIAPHNLESIVRQPPDRWMTNARMTHYQSLLLNERVSFAPPAILNPATLLPVESDDTPIHICSEILAEETGTRPDLRDQPLPGVPAWYTDGSSFIMDGRRQAGAAIVDNKRTVWASNLPEGTSAQKAELIALTQALRLAEGKSINIYTDSRYAFATAHVHGAIYKQRGWLTSAGKDIKNKEEILALLEAIHLPKRVAIIHCPGHQRGTDPVATGNRKADEAAKQAAQSTRILTETTKNAGKRTADGSEFEKRTADGSEFESPKKKAKVE

SEQ ID NO: 6332 - protein, 2100 aa, synthetic construct
MPAAKRVKLDGGDKKYSIGLDIGTNSVGWAVITDEYKVPSKKFKVLGNTDRHSIKKNLIGALLFDSGETAEATRLKRTARRRYTRRKNRICYLQEIFSNEMAKVDDSFFHRLEESFLVEEDKKHERHPIFGNIVDEVAYHEKYPTIYHLRKKLVDSTDKADLRLIYLALAHMIKFRGHFLIEGDLNPDNSDVDKLFIQLVQTYNQLFEENPINASGVDAKAILSARLSKSRRLENLIAQLPGEKKNGLFGNLIALSLGLTPNFKSNFDLAEDAKLQLSKDTYDDDLDNLLAQIGDQYADLFLAAKNLSDAILLSDILRVNTEITKAPLSASMIKRYDEHHQDLTLLKALVRQQLPEKYKEIFFDQSKNGYAGYIDGGASQEEFYKFIKPILEKMDGTEELLVKLNREDLLRKQRTFDNGSIPHQIHLGELHAILRRQEDFYPFLKDNREKIEKILTFRIPYYVGPLARGNSRFAWMTRKSEETITPWNFEEVVDKGASAQSFIERMTNFDKNLPNEKVLPKHSLLYEYFTVYNELTKVKYVTEGMRKPAFLSGEQKKAIVDLLFKTNRKVTVKQLKEDYFKKIECFDSVEISGVEDRFNASLGTYHDLLKIIKDKDFLDNEENEDILEDIVLTLTLFEDREMIEERLKTYAHLFDDKVMKQLKRRRYTGWGRLSRKLINGIRDKQSGKTILDFLKSDGFANRNFMQLIHDDSLTFKEDIQKAQVSGQGDSLHEHIANLAGSPAIKKGILQTVKVVDELVKVMGRHKPENIVIEMARENQTTQKGQKNSRERMKRIEEGIKELGSQILKEHPVENTQLQNEKLYLYYLQNGRDMYVDQELDINRLSDYDVDHIVPQSFLKDDSIDNKVLTRSDKARGKSDNVPSEEVVKKMKNYWRQLLNAKLITQRKFDNLTKAERGGLSELDKAGFIKRQLVETRQITKHVAQILDSRMNTKYDENDKLIREVKVITLKSKLVSDFRKDFQFYKVREINNYHHAHDAYLNAVVGTALIKKYPKLESEFVYGDYKVYDVRKMIAKSEQEIGKATAKYFFYSNIMNFFKTEITLANGEIRKRPLIETNGETGEIVWDKGRDFATVRKVLSMPQVNIVKKTEVQTGGFSKESILPKRNSDKLIARKKDWDPKKYGGFDSPTVAYSVLVVAKVEKGKSKKLKSVKELLGITIMERSSFEKNPIDFLEAKGYKEVKKDLIIKLPKYSLFELENGRKRMLASAGELQKGNELALPSKYVNFLYLASHYEKLKGSPEDNEQKQLFVEQHKHYLDEIIEQISEFSKRVILADANLDKVLSAYNKHRDKPIREQAENIIHLFTLTNLGAPAAFKYFDTTIDRKRYTSTKEVLDATLIHQSITGLYETRIDLSQLGGDGGGSSGSSGSSGSSGSSGGTLNLEDEYRLYETSAEPEVSPGSTWLSDFPQAWAETGGMGLAVRQAPLIIPLKATSTPVSIKQYPMSQEAKLGIKPHIQRLLDQGILVPCQSPWNTPLLPVKKPGTNDYRPVQDLREVNKRVEDIHPTVPNPYNLLSGLPPSHRWYTVLDLKDAFFCLRLHPTSQPLFAFEWRDPGMGISGQLTWTRLPQGFKNSPTLFNEALHRDLADFRIQHPDLILLQYVDDILLAATSELDCQQGTRALLLTLGNLGYRASAKKAQLCQKQVKYLGYLLKEGQRWLTEARKETVMGQPTPKTPRQLREFLGTAGFCRLWIPGFAEMAAPLYPLTKPGTLFNWGPDQQKAYQEIKQALLTAPALGLPDLTKPFELFVDEKQGYAKGVLTQKLGPWRRPVAYLSKKLDPVAAGWPPCLRMVAAIAVLRKDAGKLTMGQPLVILAPHAVEALVKQPPDRWLSNARMTHYQAMLLDTDRVQFGPVVALNPATLLPLPEEGAPHDCLEILAETHGTRPDLTDQPIPDADHTWYTDGSSFLQEGQRKAGAAVTTETEVIWARALPAGTSAQRAELIALTQALKMAEGKRLNVYTDSRYAFATAHIHGEIYRRRGWLTSEGREIKNKSEILALLKALFLPKRLSIIHCLGHQKGDSAEARGNRLADQAAREAAIKTPPDTSTLLAGKRTADGSEFEKRTADGSEFESPKKKAKVE

SEQ ID NO: 6333 - protein, 2100 aa, synthetic construct
MPAAKRVKLDGGDKKYSIGLDIGTNSVGWAVITDEYKVPSKKFKVLGNTDRHSIKKNLIGALLFDSGETAEATRLKRTARRRYTRRKNRICYLQEIFSNEMAKVDDSFFHRLEESFLVEEDKKHERHPIFGNIVDEVAYHEKYPTIYHLRKKLVDSTDKADLRLIYLALAHMIKFRGHFLIEGDLNPDNSDVDKLFIQLVQTYNQLFEENPINASGVDAKAILSARLSKSRRLENLIAQLPGEKKNGLFGNLIALSLGLTPNFKSNFDLAEDAKLQLSKDTYDDDLDNLLAQIGDQYADLFLAAKNLSDAILLSDILRVNTEITKAPLSASMIKRYDEHHQDLTLLKALVRQQLPEKYKEIFFDQSKNGYAGYIDGGASQEEFYKFIKPILEKMDGTEELLVKLNREDLLRKQRTFDNGSIPHQIHLGELHAILRRQEDFYPFLKDNREKIEKILTFRIPYYVGPLARGNSRFAWMTRKSEETITPWNFEEVVDKGASAQSFIERMTNFDKNLPNEKVLPKHSLLYEYFTVYNELTKVKYVTEGMRKPAFLSGEQKKAIVDLLFKTNRKVTVKQLKEDYFKKIECFDSVEISGVEDRFNASLGTYHDLLKIIKDKDFLDNEENEDILEDIVLTLTLFEDREMIEERLKTYAHLFDDKVMKQLKRRRYTGWGRLSRKLINGIRDKQSGKTILDFLKSDGFANRNFMQLIHDDSLTFKEDIQKAQVSGQGDSLHEHIANLAGSPAIKKGILQTVKVVDELVKVMGRHKPENIVIEMARENQTTQKGQKNSRERMKRIEEGIKELGSQILKEHPVENTQLQNEKLYLYYLQNGRDMYVDQELDINRLSDYDVDHIVPQSFLKDDSIDNKVLTRSDKARGKSDNVPSEEVVKKMKNYWRQLLNAKLITQRKFDNLTKAERGGLSELDKAGFIKRQLVETRQITKHVAQILDSRMNTKYDENDKLIREVKVITLKSKLVSDFRKDFQFYKVREINNYHHAHDAYLNAVVGTALIKKYPKLESEFVYGDYKVYDVRKMIAKSEQEIGKATAKYFFYSNIMNFFKTEITLANGEIRKRPLIETNGETGEIVWDKGRDFATVRKVLSMPQVNIVKKTEVQTGGFSKESILPKRNSDKLIARKKDWDPKKYGGFDSPTVAYSVLVVAKVEKGKSKKLKSVKELLGITIMERSSFEKNPIDFLEAKGYKEVKKDLIIKLPKYSLFELENGRKRMLASAGELQKGNELALPSKYVNFLYLASHYEKLKGSPEDNEQKQLFVEQHKHYLDEIIEQISEFSKRVILADANLDKVLSAYNKHRDKPIREQAENIIHLFTLTNLGAPAAFKYFDTTIDRKRYTSTKEVLDATLIHQSITGLYETRIDLSQLGGDGGGSSGSSGSSGSSGSSGGTLGIEDEYRLHETSTEPDVSLGSTWLSDFPQAWAETGGMGLAVRQAPLIIPLKATSTPVSIQQYPMSHEARLGIKPHIQRLLDQGILVPCQSPWNTPLLPVKKPGTNDYRPVQDLREVNKRVEDIHPTVPNPYNLLSGLPPSHQWYTVLDLKDAFFCLRLHPTSQPLFAFEWRDPGMGISGQLTWTRLPQGFKNSPTLFNEALHRDLADFRIQHPDLILLQYVDDILLAATSELDCQQGTRALLQTLGDLGYRASAKKAQICQKQVKYLGYLLREGQRWLTEARKETVMGQPVPKTPRQLREFLGTAGFCRLWIPGFAEMAAPLYPLTKPGTLFSWGPDQQKAYQEIKQALLTAPALGLPDLTKPFELFVDEKQGYAKGVLTQKLGPWRRPVAYLSKKLDPVAAGWPPCLRMVAAIAVLTKDAGKLTMGQPLVILAPHAVEALVKQPPDRWLSNARMTHYQAMLLDTDRVQFGPVVALNPATLLPLPEEGAPHDCLEILAETHGTRPDLTDQPIPDADHTWYTDGSSFLQEGQRKAGAAVTTETEVIWAGALPAGTSAQRAELIALTQALKMAEGKRLNVYTDSRYAFATAHIHGEIYRRRGWLTSEGREIKNKSEILALLKALFLPKRLSIIHCLGHQKGDSAEARGNRLADQAAREAAIKTPPDTSTLLAGKRTADGSEFEKRTADGSEFESPKKKAKVE

SEQ ID NO: 6334 - protein, 2100 aa, synthetic construct
MPAAKRVKLDGGDKKYSIGLDIGTNSVGWAVITDEYKVPSKKFKVLGNTDRHSIKKNLIGALLFDSGETAEATRLKRTARRRYTRRKNRICYLQEIFSNEMAKVDDSFFHRLEESFLVEEDKKHERHPIFGNIVDEVAYHEKYPTIYHLRKKLVDSTDKADLRLIYLALAHMIKFRGHFLIEGDLNPDNSDVDKLFIQLVQTYNQLFEENPINASGVDAKAILSARLSKSRRLENLIAQLPGEKKNGLFGNLIALSLGLTPNFKSNFDLAEDAKLQLSKDTYDDDLDNLLAQIGDQYADLFLAAKNLSDAILLSDILRVNTEITKAPLSASMIKRYDEHHQDLTLLKALVRQQLPEKYKEIFFDQSKNGYAGYIDGGASQEEFYKFIKPILEKMDGTEELLVKLNREDLLRKQRTFDNGSIPHQIHLGELHAILRRQEDFYPFLKDNREKIEKILTFRIPYYVGPLARGNSRFAWMTRKSEETITPWNFEEVVDKGASAQSFIERMTNFDKNLPNEKVLPKHSLLYEYFTVYNELTKVKYVTEGMRKPAFLSGEQKKAIVDLLFKTNRKVTVKQLKEDYFKKIECFDSVEISGVEDRFNASLGTYHDLLKIIKDKDFLDNEENEDILEDIVLTLTLFEDREMIEERLKTYAHLFDDKVMKQLKRRRYTGWGRLSRKLINGIRDKQSGKTILDFLKSDGFANRNFMQLIHDDSLTFKEDIQKAQVSGQGDSLHEHIANLAGSPAIKKGILQTVKVVDELVKVMGRHKPENIVIEMARENQTTQKGQKNSRERMKRIEEGIKELGSQILKEHPVENTQLQNEKLYLYYLQNGRDMYVDQELDINRLSDYDVDHIVPQSFLKDDSIDNKVLTRSDKARGKSDNVPSEEVVKKMKNYWRQLLNAKLITQRKFDNLTKAERGGLSELDKAGFIKRQLVETRQITKHVAQILDSRMNTKYDENDKLIREVKVITLKSKLVSDFRKDFQFYKVREINNYHHAHDAYLNAVVGTALIKKYPKLESEFVYGDYKVYDVRKMIAKSEQEIGKATAKYFFYSNIMNFFKTEITLANGEIRKRPLIETNGETGEIVWDKGRDFATVRKVLSMPQVNIVKKTEVQTGGFSKESILPKRNSDKLIARKKDWDPKKYGGFDSPTVAYSVLVVAKVEKGKSKKLKSVKELLGITIMERSSFEKNPIDFLEAKGYKEVKKDLIIKLPKYSLFELENGRKRMLASAGELQKGNELALPSKYVNFLYLASHYEKLKGSPEDNEQKQLFVEQHKHYLDEIIEQISEFSKRVILADANLDKVLSAYNKHRDKPIREQAENIIHLFTLTNLGAPAAFKYFDTTIDRKRYTSTKEVLDATLIHQSITGLYETRIDLSQLGGDGGGSSGSSGSSGSSGSSGGTLNIEDEYRLHEISTEPDVSPGSTWLSDFPQAWAETGGMGLAVRQAPLIIPLKATSTPVSIKQYPMSQEAKLGIKPHIQRLLDQGILVPCQSPWNTPLLPVKKPGTNDYRPVQGLREVNKRVEDIHPTVPNPYNLLSGLPTSHRWYTVLDLKDAFFCLRLHPTSQPLFASEWRDPGMGISGQLTWTRLPQGFKNSPTLFDEALHRGLADFRIQHPDLILLQYVDDLLLAATSELDCQQGTRALLKTLGNLGYRASAKKAQICQKQVKYLGYLLREGQRWLTEARKETVMGQPTPKTPRQLREFLGTAGFCRLWIPRFAEMAAPLYPLTKTGTLFNWGPDQQKAYHEIKQALLTAPALGLPDLTKPFELFVDEKQGYAKGVLTQKLGPWRRPVAYLSKKLDPVAAGWPPCLRMVAAIAVLTKDAGKLTMGQPLVILAPHAVEALVKQPPDRWLSNARMTHYQAMLLDTDRVQFGPVVALNPATLLPLPEEGAPHDCLEILAETHGTEPDLTDQPIPDADHTWYTDGSSFLQEGQRKAGAAVTTETEVIWARALPAGTSAQRAELIALTQALKMAEGKRLNVYTDSRYAFATAHIHGEIYKRRGLLTSEGREIKNKSEILALLKALFLPKRLSIIHCLGHQKGDSAEARGNRLADQAAREAAIKTPPDTSTLLAGKRTADGSEFEKRTADGSEFESPKKKAKVE

SEQ ID NO: 6335 - protein, 2100 aa, synthetic construct
MPAAKRVKLDGGDKKYSIGLDIGTNSVGWAVITDEYKVPSKKFKVLGNTDRHSIKKNLIGALLFDSGETAEATRLKRTARRRYTRRKNRICYLQEIFSNEMAKVDDSFFHRLEESFLVEEDKKHERHPIFGNIVDEVAYHEKYPTIYHLRKKLVDSTDKADLRLIYLALAHMIKFRGHFLIEGDLNPDNSDVDKLFIQLVQTYNQLFEENPINASGVDAKAILSARLSKSRRLENLIAQLPGEKKNGLFGNLIALSLGLTPNFKSNFDLAEDAKLQLSKDTYDDDLDNLLAQIGDQYADLFLAAKNLSDAILLSDILRVNTEITKAPLSASMIKRYDEHHQDLTLLKALVRQQLPEKYKEIFFDQSKNGYAGYIDGGASQEEFYKFIKPILEKMDGTEELLVKLNREDLLRKQRTFDNGSIPHQIHLGELHAILRRQEDFYPFLKDNREKIEKILTFRIPYYVGPLARGNSRFAWMTRKSEETITPWNFEEVVDKGASAQSFIERMTNFDKNLPNEKVLPKHSLLYEYFTVYNELTKVKYVTEGMRKPAFLSGEQKKAIVDLLFKTNRKVTVKQLKEDYFKKIECFDSVEISGVEDRFNASLGTYHDLLKIIKDKDFLDNEENEDILEDIVLTLTLFEDREMIEERLKTYAHLFDDKVMKQLKRRRYTGWGRLSRKLINGIRDKQSGKTILDFLKSDGFANRNFMQLIHDDSLTFKEDIQKAQVSGQGDSLHEHIANLAGSPAIKKGILQTVKVVDELVKVMGRHKPENIVIEMARENQTTQKGQKNSRERMKRIEEGIKELGSQILKEHPVENTQLQNEKLYLYYLQNGRDMYVDQELDINRLSDYDVDHIVPQSFLKDDSIDNKVLTRSDKARGKSDNVPSEEVVKKMKNYWRQLLNAKLITQRKFDNLTKAERGGLSELDKAGFIKRQLVETRQITKHVAQILDSRMNTKYDENDKLIREVKVITLKSKLVSDFRKDFQFYKVREINNYHHAHDAYLNAVVGTALIKKYPKLESEFVYGDYKVYDVRKMIAKSEQEIGKATAKYFFYSNIMNFFKTEITLANGEIRKRPLIETNGETGEIVWDKGRDFATVRKVLSMPQVNIVKKTEVQTGGFSKESILPKRNSDKLIARKKDWDPKKYGGFDSPTVAYSVLVVAKVEKGKSKKLKSVKELLGITIMERSSFEKNPIDFLEAKGYKEVKKDLIIKLPKYSLFELENGRKRMLASAGELQKGNELALPSKYVNFLYLASHYEKLKGSPEDNEQKQLFVEQHKHYLDEIIEQISEFSKRVILADANLDKVLSAYNKHRDKPIREQAENIIHLFTLTNLGAPAAFKYFDTTIDRKRYTSTKEVLDATLIHQSITGLYETRIDLSQLGGDGGGSSGSSGSSGSSGSSGGTLNIEDEYRLHEISTEPDVSPGSTWLSDFPQAWAETGGMGLAVRQAPLIIPLKATSTPVSIKQYPMSQEAKLGIKPHIQRLLDQGILVPCQSPWNTPLLPVKKPGTNDYRPVQGLREVNKRVEDIHPTVPNPYNLLSGLPTSHRWYTVLDLKDAFFCLRLHPTSQPLFASEWRDPGMGISGQLTWTRLPQGFKNSPTLFNEALHRGLADFRIQHPDLILLQYVDDLLLAATSELDCQQGTRALLKTLGNLGYRASAKKAQICQKQVKYLGYLLREGQRWLTEARKETVMGQPTPKTPRQLREFLGTAGFCRLWIPRFAEMAAPLYPLTKPGTLFNWGPDQQKAYHEIKQALLTAPALGLPDLTKPFELFVDEKQGYAKGVLTQKLGPWRRPVAYLSKKLDPVAAGWPPCLRMVAAIAVLTKDAGKLTMGQPLVILAPHAVEALVKQPPDRWLSNARMTHYQAMLLDTDRVQFGPVVALNPATLLPLPEEGAPHDCLEILAETHGTEPDLTDQPIPDADHTWYTDGSSFLQEGQRKAGAAVTTETEVIWARALPAGTSAQRAELIALTQALKMAEGKRLNVYTDSRYAFATAHIHGEIYKRRGWLTSEGREIKNKSEILALLKALFLPKRLSIIHCLGHQKGDSAEARGNRLADQAAREAAIKTPPDTSTLLAGKRTADGSEFEKRTADGSEFESPKKKAKVE

SEQ ID NO: 6336 - protein, 2091 aa, synthetic construct
MPAAKRVKLDGGDKKYSIGLDIGTNSVGWAVITDEYKVPSKKFKVLGNTDRHSIKKNLIGALLFDSGETAEATRLKRTARRRYTRRKNRICYLQEIFSNEMAKVDDSFFHRLEESFLVEEDKKHERHPIFGNIVDEVAYHEKYPTIYHLRKKLVDSTDKADLRLIYLALAHMIKFRGHFLIEGDLNPDNSDVDKLFIQLVQTYNQLFEENPINASGVDAKAILSARLSKSRRLENLIAQLPGEKKNGLFGNLIALSLGLTPNFKSNFDLAEDAKLQLSKDTYDDDLDNLLAQIGDQYADLFLAAKNLSDAILLSDILRVNTEITKAPLSASMIKRYDEHHQDLTLLKALVRQQLPEKYKEIFFDQSKNGYAGYIDGGASQEEFYKFIKPILEKMDGTEELLVKLNREDLLRKQRTFDNGSIPHQIHLGELHAILRRQEDFYPFLKDNREKIEKILTFRIPYYVGPLARGNSRFAWMTRKSEETITPWNFEEVVDKGASAQSFIERMTNFDKNLPNEKVLPKHSLLYEYFTVYNELTKVKYVTEGMRKPAFLSGEQKKAIVDLLFKTNRKVTVKQLKEDYFKKIECFDSVEISGVEDRFNASLGTYHDLLKIIKDKDFLDNEENEDILEDIVLTLTLFEDREMIEERLKTYAHLFDDKVMKQLKRRRYTGWGRLSRKLINGIRDKQSGKTILDFLKSDGFANRNFMQLIHDDSLTFKEDIQKAQVSGQGDSLHEHIANLAGSPAIKKGILQTVKVVDELVKVMGRHKPENIVIEMARENQTTQKGQKNSRERMKRIEEGIKELGSQILKEHPVENTQLQNEKLYLYYLQNGRDMYVDQELDINRLSDYDVDHIVPQSFLKDDSIDNKVLTRSDKARGKSDNVPSEEVVKKMKNYWRQLLNAKLITQRKFDNLTKAERGGLSELDKAGFIKRQLVETRQITKHVAQILDSRMNTKYDENDKLIREVKVITLKSKLVSDFRKDFQFYKVREINNYHHAHDAYLNAVVGTALIKKYPKLESEFVYGDYKVYDVRKMIAKSEQEIGKATAKYFFYSNIMNFFKTEITLANGEIRKRPLIETNGETGEIVWDKGRDFATVRKVLSMPQVNIVKKTEVQTGGFSKESILPKRNSDKLIARKKDWDPKKYGGFDSPTVAYSVLVVAKVEKGKSKKLKSVKELLGITIMERSSFEKNPIDFLEAKGYKEVKKDLIIKLPKYSLFELENGRKRMLASAGELQKGNELALPSKYVNFLYLASHYEKLKGSPEDNEQKQLFVEQHKHYLDEIIEQISEFSKRVILADANLDKVLSAYNKHRDKPIREQAENIIHLFTLTNLGAPAAFKYFDTTIDRKRYTSTKEVLDATLIHQSITGLYETRIDLSQLGGDGGGSSGSSGSSGSSGSSGGIPWLMKKPLQLTTLVPLQEYEERLLKQTMLTGSYKEKLQSLFLKYDALWQHWENQVGHRRIKPHHIATGTVNPRPQKQYPINPKAKASIQTVINDLLKQGVLIQQNSIMNTPVYPVPKPDGKWRMVLDYREVNKTIPLIAAQNQHSAGILSSIFRGKYKTTLDLSNGFWAHSITPESYWLTAFTWLGQQYCWTRLPQGFLNSPALFNADVVDLLKEVPNVQVYVDDIYISHDDPREHLEQLEKVFSLLLNAGYVVSLKKSEIAQHEVEFLGFNITKEGRGLTETFKQKLLNITPPRDLKQLQSILGKLNFARNFIPNFSELVKPLYNIIATAPGKYITWTTDNSQQLQNIISMLNSAENLEERNPEVRLIMKVNTSPSAGYIRFYNEFAKRPIMYLNYVYTKAEVKFTNTEKLLTTIHKGLIKALDLGMGQEILVYSPIVSMTKIQKTPLPERKALPIRWITWMSYLEDPRIQFHYDKTLPELQQVPTVTDDIIAKIKHPSEFSMVFYTDGSAIKHPNVNKSHNAGMGIAQVQFKPEFTVINTWSIPLGDHTAQLAEVAAVEFACKKALKIDGPVLIVTDSFYVAESVNKELPYWQSNGFFNNKKKPLKHVSKWKSIADCIQLKPDIIIIHEKGHQPTASTFHTEGNNLADKLATQGSYVVNAGKRTADGSEFEKRTADGSEFESPKKKAKVE

SEQ ID NO: 6337 - protein, 2105 aa, synthetic construct
MPAAKRVKLDGGDKKYSIGLDIGTNSVGWAVITDEYKVPSKKFKVLGNTDRHSIKKNLIGALLFDSGETAEATRLKRTARRRYTRRKNRICYLQEIFSNEMAKVDDSFFHRLEESFLVEEDKKHERHPIFGNIVDEVAYHEKYPTIYHLRKKLVDSTDKADLRLIYLALAHMIKFRGHFLIEGDLNPDNSDVDKLFIQLVQTYNQLFEENPINASGVDAKAILSARLSKSRRLENLIAQLPGEKKNGLFGNLIALSLGLTPNFKSNFDLAEDAKLQLSKDTYDDDLDNLLAQIGDQYADLFLAAKNLSDAILLSDILRVNTEITKAPLSASMIKRYDEHHQDLTLLKALVRQQLPEKYKEIFFDQSKNGYAGYIDGGASQEEFYKFIKPILEKMDGTEELLVKLNREDLLRKQRTFDNGSIPHQIHLGELHAILRRQEDFYPFLKDNREKIEKILTFRIPYYVGPLARGNSRFAWMTRKSEETITPWNFEEVVDKGASAQSFIERMTNFDKNLPNEKVLPKHSLLYEYFTVYNELTKVKYVTEGMRKPAFLSGEQKKAIVDLLFKTNRKVTVKQLKEDYFKKIECFDSVEISGVEDRFNASLGTYHDLLKIIKDKDFLDNEENEDILEDIVLTLTLFEDREMIEERLKTYAHLFDDKVMKQLKRRRYTGWGRLSRKLINGIRDKQSGKTILDFLKSDGFANRNFMQLIHDDSLTFKEDIQKAQVSGQGDSLHEHIANLAGSPAIKKGILQTVKVVDELVKVMGRHKPENIVIEMARENQTTQKGQKNSRERMKRIEEGIKELGSQILKEHPVENTQLQNEKLYLYYLQNGRDMYVDQELDINRLSDYDVDHIVPQSFLKDDSIDNKVLTRSDKARGKSDNVPSEEVVKKMKNYWRQLLNAKLITQRKFDNLTKAERGGLSELDKAGFIKRQLVETRQITKHVAQILDSRMNTKYDENDKLIREVKVITLKSKLVSDFRKDFQFYKVREINNYHHAHDAYLNAVVGTALIKKYPKLESEFVYGDYKVYDVRKMIAKSEQEIGKATAKYFFYSNIMNFFKTEITLANGEIRKRPLIETNGETGEIVWDKGRDFATVRKVLSMPQVNIVKKTEVQTGGFSKESILPKRNSDKLIARKKDWDPKKYGGFDSPTVAYSVLVVAKVEKGKSKKLKSVKELLGITIMERSSFEKNPIDFLEAKGYKEVKKDLIIKLPKYSLFELENGRKRMLASAGELQKGNELALPSKYVNFLYLASHYEKLKGSPEDNEQKQLFVEQHKHYLDEIIEQISEFSKRVILADANLDKVLSAYNKHRDKPIREQAENIIHLFTLTNLGAPAAFKYFDTTIDRKRYTSTKEVLDATLIHQSITGLYETRIDLSQLGGDGGGSSGSSGSSGSSGSSGSSGGTAPLEEEYRLFLEAPIQNVTLLEQWKREIPKVWAEINPPGLASTQAPIHVQLLSTALPVRVRQYPITLEAKRSLRETIRKFRAAGILRPVHSPWNTPLLPVRKSGTSEYRMVQDLREVNKRVETIHPTVPNPYTLLSLLPPDRIWYSVLDLKDAFFCIPLAPESQLIFAFEWADAEEGESGQLTWTRLPQGFKNSPTLFDEALNRDLQGFRLDHPSVSLLQYVDDLLIAADTQAACLSATRDLLMTLAELGYRVSGKKAQLCQEEVTYLGFKIHKGSRSLSNSRTQAILQIPVPKTKRQVREFLGTIGYCRLWIPGFAELAQPLYAATRGGNDPLVWGEKEEEAFQSLKLALTQPPALALPSLDKPFQLFVEETSGAAKGVLTQALGPWKRPVAYLSKRLDPVAAGWPRCLRAIAAAALLTREASKLTFGQDIEITSSHNLESLLRSPPDKWLTNARITQYQVLLLDPPRVRFKQTAALNPATLLPETDDTLPIHHCLDTLDSLTSTRPDLTDQPLAQAEATLFTDGSSYIRDGKRYAGAAVVTLDSVIWAEPLPIGTSAQKAELIALTKALEWSKDKSVNIYTDSRYAFATLHVHGMIYRERGLLTAGGKAIKNAPEILALLTAVWLPKRVAVMHCKGHQKDDAPTSTGNRRADEVAREVAIRPLSTQATISAGKRTADGSEFEKRTADGSEFESPKKKAKVE

SEQ ID NO: 6338 - protein, 2180 aa, synthetic construct
MPAAKRVKLDGGDKKYSIGLDIGTNSVGWAVITDEYKVPSKKFKVLGNTDRHSIKKNLIGALLFDSGETAEATRLKRTARRRYTRRKNRICYLQEIFSNEMAKVDDSFFHRLEESFLVEEDKKHERHPIFGNIVDEVAYHEKYPTIYHLRKKLVDSTDKADLRLIYLALAHMIKFRGHFLIEGDLNPDNSDVDKLFIQLVQTYNQLFEENPINASGVDAKAILSARLSKSRRLENLIAQLPGEKKNGLFGNLIALSLGLTPNFKSNFDLAEDAKLQLSKDTYDDDLDNLLAQIGDQYADLFLAAKNLSDAILLSDILRVNTEITKAPLSASMIKRYDEHHQDLTLLKALVRQQLPEKYKEIFFDQSKNGYAGYIDGGASQEEFYKFIKPILEKMDGTEELLVKLNREDLLRKQRTFDNGSIPHQIHLGELHAILRRQEDFYPFLKDNREKIEKILTFRIPYYVGPLARGNSRFAWMTRKSEETITPWNFEEVVDKGASAQSFIERMTNFDKNLPNEKVLPKHSLLYEYFTVYNELTKVKYVTEGMRKPAFLSGEQKKAIVDLLFKTNRKVTVKQLKEDYFKKIECFDSVEISGVEDRFNASLGTYHDLLKIIKDKDFLDNEENEDILEDIVLTLTLFEDREMIEERLKTYAHLFDDKVMKQLKRRRYTGWGRLSRKLINGIRDKQSGKTILDFLKSDGFANRNFMQLIHDDSLTFKEDIQKAQVSGQGDSLHEHIANLAGSPAIKKGILQTVKVVDELVKVMGRHKPENIVIEMARENQTTQKGQKNSRERMKRIEEGIKELGSQILKEHPVENTQLQNEKLYLYYLQNGRDMYVDQELDINRLSDYDVDHIVPQSFLKDDSIDNKVLTRSDKARGKSDNVPSEEVVKKMKNYWRQLLNAKLITQRKFDNLTKAERGGLSELDKAGFIKRQLVETRQITKHVAQILDSRMNTKYDENDKLIREVKVITLKSKLVSDFRKDFQFYKVREINNYHHAHDAYLNAVVGTALIKKYPKLESEFVYGDYKVYDVRKMIAKSEQEIGKATAKYFFYSNIMNFFKTEITLANGEIRKRPLIETNGETGEIVWDKGRDFATVRKVLSMPQVNIVKKTEVQTGGFSKESILPKRNSDKLIARKKDWDPKKYGGFDSPTVAYSVLVVAKVEKGKSKKLKSVKELLGITIMERSSFEKNPIDFLEAKGYKEVKKDLIIKLPKYSLFELENGRKRMLASAGELQKGNELALPSKYVNFLYLASHYEKLKGSPEDNEQKQLFVEQHKHYLDEIIEQISEFSKRVILADANLDKVLSAYNKHRDKPIREQAENIIHLFTLTNLGAPAAFKYFDTTIDRKRYTSTKEVLDATLIHQSITGLYETRIDLSQLGGDGGGSSGSSGSSGSSGSSGSSGGMDLLKPLTVERKGVKIKGYWNSQADITCVPKDLLQGEEPVRQQNVTTIHGTQEGDVYYVNLKIDGRRINTEVIGTTLDYAIITPGDVPWILKKPLELTIKLDLEEQQGTLLNNSILSKKGKEELKQLFEKYSALWQSWENQVGHRRIRPHKIATGTVKPTPQKQYHINPKAKPDIQIVINDLLKQGVLIQKESTMNTPVYPVPKPNGRWRMVLDYRAVNKVTPLIAVQNQHSYGILGSLFKGRYKTTIDLSNGFWAHPIVPEDYWITAFTWQGKQYCWTVLPQGFLNSPGLFNGDVVDLLQGIPNVEVYVDDVYISHDSEKEHLEYLDILFNRLKEAGYIISLKKSNIANSIVDFLGFQITNEGRGLTDTFKEKLENITAPTTLKQLQSILGLLNFARNFIPDFTELIAPLYALIPKSPKNYVPWQIEHSTTLETLITKLNGAEYLQGRKGDKTLIMKVNASYTTGYIRYYNEGEKKPISYVSIVFSKTELKFTELEKLLTTVHKGLLKALDLSMGQNIHVYSPIVSMQNIQKTPQTAKKALASRWLSWLSYLEDPRIRFFYDPQMPALKDLPAVDTGKDNKKHPSNFQHIFYTDGSAITSPTKEGHLNAGMGIVYFINKDGNLQKQQEWSISLGNHTAQFAEIAAFEFALKKCLPLGGNILVVTDSNYVAKAYNEELDVWASNGFVNNRKKPLKHISKWKSVADLKRLRPDVVVTHEPGHQKLDSSPHAYGNNLADQLATQASFKVHAGKRTADGSEFEKRTADGSEFESPKKKAKVE

SEQ ID NO: 6339 - protein, 2102 aa, synthetic construct
MPAAKRVKLDGGDKKYSIGLDIGTNSVGWAVITDEYKVPSKKFKVLGNTDRHSIKKNLIGALLFDSGETAEATRLKRTARRRYTRRKNRICYLQEIFSNEMAKVDDSFFHRLEESFLVEEDKKHERHPIFGNIVDEVAYHEKYPTIYHLRKKLVDSTDKADLRLIYLALAHMIKFRGHFLIEGDLNPDNSDVDKLFIQLVQTYNQLFEENPINASGVDAKAILSARLSKSRRLENLIAQLPGEKKNGLFGNLIALSLGLTPNFKSNFDLAEDAKLQLSKDTYDDDLDNLLAQIGDQYADLFLAAKNLSDAILLSDILRVNTEITKAPLSASMIKRYDEHHQDLTLLKALVRQQLPEKYKEIFFDQSKNGYAGYIDGGASQEEFYKFIKPILEKMDGTEELLVKLNREDLLRKQRTFDNGSIPHQIHLGELHAILRRQEDFYPFLKDNREKIEKILTFRIPYYVGPLARGNSRFAWMTRKSEETITPWNFEEVVDKGASAQSFIERMTNFDKNLPNEKVLPKHSLLYEYFTVYNELTKVKYVTEGMRKPAFLSGEQKKAIVDLLFKTNRKVTVKQLKEDYFKKIECFDSVEISGVEDRFNASLGTYHDLLKIIKDKDFLDNEENEDILEDIVLTLTLFEDREMIEERLKTYAHLFDDKVMKQLKRRRYTGWGRLSRKLINGIRDKQSGKTILDFLKSDGFANRNFMQLIHDDSLTFKEDIQKAQVSGQGDSLHEHIANLAGSPAIKKGILQTVKVVDELVKVMGRHKPENIVIEMARENQTTQKGQKNSRERMKRIEEGIKELGSQILKEHPVENTQLQNEKLYLYYLQNGRDMYVDQELDINRLSDYDVDHIVPQSFLKDDSIDNKVLTRSDKARGKSDNVPSEEVVKKMKNYWRQLLNAKLITQRKFDNLTKAERGGLSELDKAGFIKRQLVETRQITKHVAQILDSRMNTKYDENDKLIREVKVITLKSKLVSDFRKDFQFYKVREINNYHHAHDAYLNAVVGTALIKKYPKLESEFVYGDYKVYDVRKMIAKSEQEIGKATAKYFFYSNIMNFFKTEITLANGEIRKRPLIETNGETGEIVWDKGRDFATVRKVLSMPQVNIVKKTEVQTGGFSKESILPKRNSDKLIARKKDWDPKKYGGFDSPTVAYSVLVVAKVEKGKSKKLKSVKELLGITIMERSSFEKNPIDFLEAKGYKEVKKDLIIKLPKYSLFELENGRKRMLASAGELQKGNELALPSKYVNFLYLASHYEKLKGSPEDNEQKQLFVEQHKHYLDEIIEQISEFSKRVILADANLDKVLSAYNKHRDKPIREQAENIIHLFTLTNLGAPAAFKYFDTTIDRKRYTSTKEVLDATLIHQSITGLYETRIDLSQLGGDGGGSSGSSGSSGSSGSSGSSGGTLQLEEEYRLFEPESTQKQEMDIWLKNFPQAWAETGGMGTAHCQAPVLIQLKATATPISIRQYPMPHEAYQGIKPHIRRMLDQGILKPCQSPWNTPLLPVKKPGTEDYRPVQDLREVNKRVEDIHPTVPNPYNLLSTLPPSHPWYTVLDLKDAFFCLRLHSESQLLFAFEWRDPEIGLSGQLTWTRLPQGFKNSPTLFNEALHSDLADFRVRYPALVLLQYVDDLLLAAATRTECLEGTKALLETLGNKGYRASAKKAQICLQEVTYLGYSLKDGQRWLTKARKEAILSIPVPKNSRQVREFLGTAGYCRLWIPGFAELAAPLYPLTRPGTLFQWGTEQQLAFEDIKKALLSSPALGLPDITKPFELFIDENSGFAKGVLVQKLGPWKRPVAYLSKKLDTVASGWPPCLRMVAAIAILVKDAGKLTLGQPLTILTSHPVEALVRQPPNKWLSNARMTHYQAMLLDAERVHFGPTVSLNPATLLPLPSGGNHHDCLQILAETHGTRPDLTDQPLPDADLTWYTDGSSFIRNGEREAGAAVTTESEVIWAAPLPPGTSAQRAELIALTQALKMAEGKKLTVYTDSRYAFATTHVHGEIYRRRGWLTSEGKEIKNKNEILALLEALFLPKRLSIIHCPGHQKGDSPQAKGNRLADDTAKKAATETHSSLTVLPAGKRTADGSEFEKRTADGSEFESPKKKAKVE

SEQ ID NO: 6340 - protein, 2094 aa, synthetic construct
MPAAKRVKLDGGDKKYSIGLDIGTNSVGWAVITDEYKVPSKKFKVLGNTDRHSIKKNLIGALLFDSGETAEATRLKRTARRRYTRRKNRICYLQEIFSNEMAKVDDSFFHRLEESFLVEEDKKHERHPIFGNIVDEVAYHEKYPTIYHLRKKLVDSTDKADLRLIYLALAHMIKFRGHFLIEGDLNPDNSDVDKLFIQLVQTYNQLFEENPINASGVDAKAILSARLSKSRRLENLIAQLPGEKKNGLFGNLIALSLGLTPNFKSNFDLAEDAKLQLSKDTYDDDLDNLLAQIGDQYADLFLAAKNLSDAILLSDILRVNTEITKAPLSASMIKRYDEHHQDLTLLKALVRQQLPEKYKEIFFDQSKNGYAGYIDGGASQEEFYKFIKPILEKMDGTEELLVKLNREDLLRKQRTFDNGSIPHQIHLGELHAILRRQEDFYPFLKDNREKIEKILTFRIPYYVGPLARGNSRFAWMTRKSEETITPWNFEEVVDKGASAQSFIERMTNFDKNLPNEKVLPKHSLLYEYFTVYNELTKVKYVTEGMRKPAFLSGEQKKAIVDLLFKTNRKVTVKQLKEDYFKKIECFDSVEISGVEDRFNASLGTYHDLLKIIKDKDFLDNEENEDILEDIVLTLTLFEDREMIEERLKTYAHLFDDKVMKQLKRRRYTGWGRLSRKLINGIRDKQSGKTILDFLKSDGFANRNFMQLIHDDSLTFKEDIQKAQVSGQGDSLHEHIANLAGSPAIKKGILQTVKVVDELVKVMGRHKPENIVIEMARENQTTQKGQKNSRERMKRIEEGIKELGSQILKEHPVENTQLQNEKLYLYYLQNGRDMYVDQELDINRLSDYDVDHIVPQSFLKDDSIDNKVLTRSDKARGKSDNVPSEEVVKKMKNYWRQLLNAKLITQRKFDNLTKAERGGLSELDKAGFIKRQLVETRQITKHVAQILDSRMNTKYDENDKLIREVKVITLKSKLVSDFRKDFQFYKVREINNYHHAHDAYLNAVVGTALIKKYPKLESEFVYGDYKVYDVRKMIAKSEQEIGKATAKYFFYSNIMNFFKTEITLANGEIRKRPLIETNGETGEIVWDKGRDFATVRKVLSMPQVNIVKKTEVQTGGFSKESILPKRNSDKLIARKKDWDPKKYGGFDSPTVAYSVLVVAKVEKGKSKKLKSVKELLGITIMERSSFEKNPIDFLEAKGYKEVKKDLIIKLPKYSLFELENGRKRMLASAGELQKGNELALPSKYVNFLYLASHYEKLKGSPEDNEQKQLFVEQHKHYLDEIIEQISEFSKRVILADANLDKVLSAYNKHRDKPIREQAENIIHLFTLTNLGAPAAFKYFDTTIDRKRYTSTKEVLDATLIHQSITGLYETRIDLSQLGGDGGGSSGSSGSSGSSGSSGSSGGVPWLTQQPLQLTILVPLQEYQEKILSKTALPEDQKQQLKTLFVKYDNLWQHWENQVGHRKIRPHNIATGDYPPRPQKQYPINPKAKPSIQIVIDDLLKQGVLTPQNSTMNTPVYPVPKPDGRWRMVLDYREVNKTIPLTAAQNQHSAGILATIVRQKYKTTLDLANGFWAHPITPESYWLTAFTWQGKQYCWTRLPQGFLNSPALFNADVVDLLKEIPNVQVYVDDIYLSHDDPKEHVQQLEKVFQILLQAGYVVSLKKSEIGQKTVEFLGFNITKEGRGLTDTFKTKLLNITPPKDLKQLQSILGLLNFARNFIPNFAELVQPLYNLIAPAKGKYIEWSEENTKQLNMVIEALNTASNLEERLPEQRLVIKVNTSPSAGYVRYYNETGKKPIMYLNYVFSKAELKFSMLEKLLTTMHKALIKAMDLAMGQEILVYSPIVSMTKIQKTPLPERKALPIRWITWMTYLEDPRIQFHYDKTLPELKHIPDVYTSSQSPVKHPSQYEGVFYTDGSAIKSPDPTKSNNAGMGIVHATYKPEYQVLNQWSIPLGNHTAQMAEIAAVEFACKKALKIPGPVLVITDSFYVAESANKELPYWKSNGFVNNKKKPLKHISKWKSIAECLSMKPDITIQHEKGISLQIPVFILKGNALADKLATQGSYVVNAGKRTADGSEFEKRTADGSEFESPKKKAKVE

SEQ ID NO: 6341 - protein, 2094 aa, synthetic construct
MPAAKRVKLDGGDKKYSIGLDIGTNSVGWAVITDEYKVPSKKFKVLGNTDRHSIKKNLIGALLFDSGETAEATRLKRTARRRYTRRKNRICYLQEIFSNEMAKVDDSFFHRLEESFLVEEDKKHERHPIFGNIVDEVAYHEKYPTIYHLRKKLVDSTDKADLRLIYLALAHMIKFRGHFLIEGDLNPDNSDVDKLFIQLVQTYNQLFEENPINASGVDAKAILSARLSKSRRLENLIAQLPGEKKNGLFGNLIALSLGLTPNFKSNFDLAEDAKLQLSKDTYDDDLDNLLAQIGDQYADLFLAAKNLSDAILLSDILRVNTEITKAPLSASMIKRYDEHHQDLTLLKALVRQQLPEKYKEIFFDQSKNGYAGYIDGGASQEEFYKFIKPILEKMDGTEELLVKLNREDLLRKQRTFDNGSIPHQIHLGELHAILRRQEDFYPFLKDNREKIEKILTFRIPYYVGPLARGNSRFAWMTRKSEETITPWNFEEVVDKGASAQSFIERMTNFDKNLPNEKVLPKHSLLYEYFTVYNELTKVKYVTEGMRKPAFLSGEQKKAIVDLLFKTNRKVTVKQLKEDYFKKIECFDSVEISGVEDRFNASLGTYHDLLKIIKDKDFLDNEENEDILEDIVLTLTLFEDREMIEERLKTYAHLFDDKVMKQLKRRRYTGWGRLSRKLINGIRDKQSGKTILDFLKSDGFANRNFMQLIHDDSLTFKEDIQKAQVSGQGDSLHEHIANLAGSPAIKKGILQTVKVVDELVKVMGRHKPENIVIEMARENQTTQKGQKNSRERMKRIEEGIKELGSQILKEHPVENTQLQNEKLYLYYLQNGRDMYVDQELDINRLSDYDVDHIVPQSFLKDDSIDNKVLTRSDKARGKSDNVPSEEVVKKMKNYWRQLLNAKLITQRKFDNLTKAERGGLSELDKAGFIKRQLVETRQITKHVAQILDSRMNTKYDENDKLIREVKVITLKSKLVSDFRKDFQFYKVREINNYHHAHDAYLNAVVGTALIKKYPKLESEFVYGDYKVYDVRKMIAKSEQEIGKATAKYFFYSNIMNFFKTEITLANGEIRKRPLIETNGETGEIVWDKGRDFATVRKVLSMPQVNIVKKTEVQTGGFSKESILPKRNSDKLIARKKDWDPKKYGGFDSPTVAYSVLVVAKVEKGKSKKLKSVKELLGITIMERSSFEKNPIDFLEAKGYKEVKKDLIIKLPKYSLFELENGRKRMLASAGELQKGNELALPSKYVNFLYLASHYEKLKGSPEDNEQKQLFVEQHKHYLDEIIEQISEFSKRVILADANLDKVLSAYNKHRDKPIREQAENIIHLFTLTNLGAPAAFKYFDTTIDRKRYTSTKEVLDATLIHQSITGLYETRIDLSQLGGDGGGSSGSSGSSGSSGSSGSSGGVPWLTQQPLQLTILVPLQEYQEKILSKTALPEDQKQQLKTLFVKYDNLWQHWENQVGHRKIRPHNIATGDYPPRPQKQYPINPKAKPSIQIVIDDLLKQGVLTPQNSTMNTPVYPVPKPDGRWRMVLDYREVNKTIPLTAAQNQHSAGILATIVRQKYKTTLDLANGFWAHPITPESYWLTAFTWQGKQYCWTRLPQGFLNSPALFNADVVDLLKEIPNVQVYVDDIYLSHDDPKEHVQQLEKVFQILLQAGYVVSLKKSEIGQKTVEFLGFNITKEGRGLTDTFKTKLLNITPPKDLKQLQSILGKLNFARNFIPNFAELVQPLYNLIAPAKGKYIEWSEENTKQLNMVIEALNTASNLEERLPEQRLVIKVNTSPSAGYVRYYNETGKKPIMYLNYVFSKAELKFSMLEKLLTTMHKALIKAMDLAMGQEILVYSPIVSMTKIQKTPLPERKALPIRWITWMTYLEDPRIQFHYDKTLPELKHIPDVYTSSQSPVKHPSQYEGVFYTDGSAIKSPDPTKSNNAGMGIVHATYKPEYQVLNQWSIPLGNHTAQMAEIAAVEFACKKALKIPGPVLVITDSFYVAESANKELPYWKSNGFVNNKKKPLKHISKWKSIAECLSMKPDITIQHEKGISLQIPVFILKGNALADKLATQGSYVVNAGKRTADGSEFEKRTADGSEFESPKKKAKVE

SEQ ID NO: 6342 - protein, 2183 aa, synthetic construct
MPAAKRVKLDGGDKKYSIGLDIGTNSVGWAVITDEYKVPSKKFKVLGNTDRHSIKKNLIGALLFDSGETAEATRLKRTARRRYTRRKNRICYLQEIFSNEMAKVDDSFFHRLEESFLVEEDKKHERHPIFGNIVDEVAYHEKYPTIYHLRKKLVDSTDKADLRLIYLALAHMIKFRGHFLIEGDLNPDNSDVDKLFIQLVQTYNQLFEENPINASGVDAKAILSARLSKSRRLENLIAQLPGEKKNGLFGNLIALSLGLTPNFKSNFDLAEDAKLQLSKDTYDDDLDNLLAQIGDQYADLFLAAKNLSDAILLSDILRVNTEITKAPLSASMIKRYDEHHQDLTLLKALVRQQLPEKYKEIFFDQSKNGYAGYIDGGASQEEFYKFIKPILEKMDGTEELLVKLNREDLLRKQRTFDNGSIPHQIHLGELHAILRRQEDFYPFLKDNREKIEKILTFRIPYYVGPLARGNSRFAWMTRKSEETITPWNFEEVVDKGASAQSFIERMTNFDKNLPNEKVLPKHSLLYEYFTVYNELTKVKYVTEGMRKPAFLSGEQKKAIVDLLFKTNRKVTVKQLKEDYFKKIECFDSVEISGVEDRFNASLGTYHDLLKIIKDKDFLDNEENEDILEDIVLTLTLFEDREMIEERLKTYAHLFDDKVMKQLKRRRYTGWGRLSRKLINGIRDKQSGKTILDFLKSDGFANRNFMQLIHDDSLTFKEDIQKAQVSGQGDSLHEHIANLAGSPAIKKGILQTVKVVDELVKVMGRHKPENIVIEMARENQTTQKGQKNSRERMKRIEEGIKELGSQILKEHPVENTQLQNEKLYLYYLQNGRDMYVDQELDINRLSDYDVDHIVPQSFLKDDSIDNKVLTRSDKARGKSDNVPSEEVVKKMKNYWRQLLNAKLITQRKFDNLTKAERGGLSELDKAGFIKRQLVETRQITKHVAQILDSRMNTKYDENDKLIREVKVITLKSKLVSDFRKDFQFYKVREINNYHHAHDAYLNAVVGTALIKKYPKLESEFVYGDYKVYDVRKMIAKSEQEIGKATAKYFFYSNIMNFFKTEITLANGEIRKRPLIETNGETGEIVWDKGRDFATVRKVLSMPQVNIVKKTEVQTGGFSKESILPKRNSDKLIARKKDWDPKKYGGFDSPTVAYSVLVVAKVEKGKSKKLKSVKELLGITIMERSSFEKNPIDFLEAKGYKEVKKDLIIKLPKYSLFELENGRKRMLASAGELQKGNELALPSKYVNFLYLASHYEKLKGSPEDNEQKQLFVEQHKHYLDEIIEQISEFSKRVILADANLDKVLSAYNKHRDKPIREQAENIIHLFTLTNLGAPAAFKYFDTTIDRKRYTSTKEVLDATLIHQSITGLYETRIDLSQLGGDGGGSSGSSGSSGSSGSSGSSGGMNPLQLLQPLPAEIKGTKLLAHWNSGATITCIPESFLEDEQPIKKTLIKTIHGEKQQNVYYVTFKVKGRKVEAEVIASPYEYILLSPTDVPWLTQQPLQLTILVPLQEYQEKILSKTALPEDQKQQLKTLFVKYDNLWQHWENQVGHRKIRPHNIATGDYPPRPQKQYPINPKAKPSIQIVIDDLLKQGVLTPQNSTMNTPVYPVPKPDGRWRMVLDYREVNKTIPLTAAQNQHSAGILATIVRQKYKTTLDLANGFWAHPITPESYWLTAFTWQGKQYCWTRLPQGFLNSPALFNADVVDLLKEIPNVQVYVDDIYLSHDDPKEHVQQLEKVFQILLQAGYVVSLKKSEIGQKTVEFLGFNITKEGRGLTDTFKTKLLNITPPKDLKQLQSILGLLNFARNFIPNFAELVQPLYNLIAPAKGKYIEWSEENTKQLNMVIEALNTASNLEERLPEQRLVIKVNTSPSAGYVRYYNETGKKPIMYLNYVFSKAELKFSMLEKLLTTMHKALIKAMDLAMGQEILVYSPIVSMTKIQKTPLPERKALPIRWITWMTYLEDPRIQFHYDKTLPELKHIPDVYTSSQSPVKHPSQYEGVFYTDGSAIKSPDPTKSNNAGMGIVHATYKPEYQVLNQWSIPLGNHTAQMAEIAAVEFACKKALKIPGPVLVITDSFYVAESANKELPYWKSNGFVNNKKKPLKHISKWKSIAECLSMKPDITIQHEKGISLQIPVFILKGNALADKLATQGSYVVNAGKRTADGSEFEKRTADGSEFESPKKKAKVE

SEQ ID NO: 6343 - protein, 2101 aa, synthetic construct
MPAAKRVKLDGGDKKYSIGLDIGTNSVGWAVITDEYKVPSKKFKVLGNTDRHSIKKNLIGALLFDSGETAEATRLKRTARRRYTRRKNRICYLQEIFSNEMAKVDDSFFHRLEESFLVEEDKKHERHPIFGNIVDEVAYHEKYPTIYHLRKKLVDSTDKADLRLIYLALAHMIKFRGHFLIEGDLNPDNSDVDKLFIQLVQTYNQLFEENPINASGVDAKAILSARLSKSRRLENLIAQLPGEKKNGLFGNLIALSLGLTPNFKSNFDLAEDAKLQLSKDTYDDDLDNLLAQIGDQYADLFLAAKNLSDAILLSDILRVNTEITKAPLSASMIKRYDEHHQDLTLLKALVRQQLPEKYKEIFFDQSKNGYAGYIDGGASQEEFYKFIKPILEKMDGTEELLVKLNREDLLRKQRTFDNGSIPHQIHLGELHAILRRQEDFYPFLKDNREKIEKILTFRIPYYVGPLARGNSRFAWMTRKSEETITPWNFEEVVDKGASAQSFIERMTNFDKNLPNEKVLPKHSLLYEYFTVYNELTKVKYVTEGMRKPAFLSGEQKKAIVDLLFKTNRKVTVKQLKEDYFKKIECFDSVEISGVEDRFNASLGTYHDLLKIIKDKDFLDNEENEDILEDIVLTLTLFEDREMIEERLKTYAHLFDDKVMKQLKRRRYTGWGRLSRKLINGIRDKQSGKTILDFLKSDGFANRNFMQLIHDDSLTFKEDIQKAQVSGQGDSLHEHIANLAGSPAIKKGILQTVKVVDELVKVMGRHKPENIVIEMARENQTTQKGQKNSRERMKRIEEGIKELGSQILKEHPVENTQLQNEKLYLYYLQNGRDMYVDQELDINRLSDYDVDHIVPQSFLKDDSIDNKVLTRSDKARGKSDNVPSEEVVKKMKNYWRQLLNAKLITQRKFDNLTKAERGGLSELDKAGFIKRQLVETRQITKHVAQILDSRMNTKYDENDKLIREVKVITLKSKLVSDFRKDFQFYKVREINNYHHAHDAYLNAVVGTALIKKYPKLESEFVYGDYKVYDVRKMIAKSEQEIGKATAKYFFYSNIMNFFKTEITLANGEIRKRPLIETNGETGEIVWDKGRDFATVRKVLSMPQVNIVKKTEVQTGGFSKESILPKRNSDKLIARKKDWDPKKYGGFDSPTVAYSVLVVAKVEKGKSKKLKSVKELLGITIMERSSFEKNPIDFLEAKGYKEVKKDLIIKLPKYSLFELENGRKRMLASAGELQKGNELALPSKYVNFLYLASHYEKLKGSPEDNEQKQLFVEQHKHYLDEIIEQISEFSKRVILADANLDKVLSAYNKHRDKPIREQAENIIHLFTLTNLGAPAAFKYFDTTIDRKRYTSTKEVLDATLIHQSITGLYETRIDLSQLGGDGGGSSGSSGSSGSSGSSGSSGGVLNLEEEYRLHEKPVPSSIDPSWLQLFPTVWAERAGMGLANQVPPVVVELRSGASPVAVRQYPMSKEAREGIRPHIQKFLDLGVLVPCRSPWNTPLLPVKKPGTNDYRPVQDLREINKRVQDIHPTVPNPYNLLSSLPPSYTWYSVLDLKDAFFCLRLHPNSQPLFAFEWKDPEKGNTGQLTWTRLPQGFKNSPTLFNEALHRDLAPFRALNPQVVLLQYVDDLLVAAPTYEDCKKGTQKLLQELSKLGYRVSAKKAQLCQREVTYLGYLLKEGKRWLTPARKATVMKIPVPTTPRQVREFLGKAGFCRLFIPGFASLAAPLYPLTKPSIPFIWTEEHQQAFDHIKKALLSAPALALPDLTKPFTLYIDERAGVARGVLTQTLGPWRRPVAYLSKKLDPVASGWPTCLKAVAAVALLLKDADKLTLGQNVTVIASHSLESIVRQPPDRWMTNARMTHYQSLLLNERVSFAPPAVLNPATLLPVESEATPVHRCSEILAEETGTRRDLEDQPLPGVPTWYTDGSSFITEGKRRAGAPIVDGKRTVWASSLPEGTSAQKAELVALTQALRLAEGKNINIYTDSRYAFATAHIHGAIYKQRGWLTSAGKDIKNKEEILALLEAIHLPRRVAIIHCPGHQRGSNPVATGNRRADEAAKQAALSTRVLAGTTKPAGKRTADGSEFEKRTADGSEFESPKKKAKVE

SEQ ID NO: 6344 - protein, 2134 aa, synthetic construct
MPAAKRVKLDGGDKKYSIGLDIGTNSVGWAVITDEYKVPSKKFKVLGNTDRHSIKKNLIGALLFDSGETAEATRLKRTARRRYTRRKNRICYLQEIFSNEMAKVDDSFFHRLEESFLVEEDKKHERHPIFGNIVDEVAYHEKYPTIYHLRKKLVDSTDKADLRLIYLALAHMIKFRGHFLIEGDLNPDNSDVDKLFIQLVQTYNQLFEENPINASGVDAKAILSARLSKSRRLENLIAQLPGEKKNGLFGNLIALSLGLTPNFKSNFDLAEDAKLQLSKDTYDDDLDNLLAQIGDQYADLFLAAKNLSDAILLSDILRVNTEITKAPLSASMIKRYDEHHQDLTLLKALVRQQLPEKYKEIFFDQSKNGYAGYIDGGASQEEFYKFIKPILEKMDGTEELLVKLNREDLLRKQRTFDNGSIPHQIHLGELHAILRRQEDFYPFLKDNREKIEKILTFRIPYYVGPLARGNSRFAWMTRKSEETITPWNFEEVVDKGASAQSFIERMTNFDKNLPNEKVLPKHSLLYEYFTVYNELTKVKYVTEGMRKPAFLSGEQKKAIVDLLFKTNRKVTVKQLKEDYFKKIECFDSVEISGVEDRFNASLGTYHDLLKIIKDKDFLDNEENEDILEDIVLTLTLFEDREMIEERLKTYAHLFDDKVMKQLKRRRYTGWGRLSRKLINGIRDKQSGKTILDFLKSDGFANRNFMQLIHDDSLTFKEDIQKAQVSGQGDSLHEHIANLAGSPAIKKGILQTVKVVDELVKVMGRHKPENIVIEMARENQTTQKGQKNSRERMKRIEEGIKELGSQILKEHPVENTQLQNEKLYLYYLQNGRDMYVDQELDINRLSDYDVDHIVPQSFLKDDSIDNKVLTRSDKARGKSDNVPSEEVVKKMKNYWRQLLNAKLITQRKFDNLTKAERGGLSELDKAGFIKRQLVETRQITKHVAQILDSRMNTKYDENDKLIREVKVITLKSKLVSDFRKDFQFYKVREINNYHHAHDAYLNAVVGTALIKKYPKLESEFVYGDYKVYDVRKMIAKSEQEIGKATAKYFFYSNIMNFFKTEITLANGEIRKRPLIETNGETGEIVWDKGRDFATVRKVLSMPQVNIVKKTEVQTGGFSKESILPKRNSDKLIARKKDWDPKKYGGFDSPTVAYSVLVVAKVEKGKSKKLKSVKELLGITIMERSSFEKNPIDFLEAKGYKEVKKDLIIKLPKYSLFELENGRKRMLASAGELQKGNELALPSKYVNFLYLASHYEKLKGSPEDNEQKQLFVEQHKHYLDEIIEQISEFSKRVILADANLDKVLSAYNKHRDKPIREQAENIIHLFTLTNLGAPAAFKYFDTTIDRKRYTSTKEVLDATLIHQSITGLYETRIDLSQLGGDGGGSSGSSGSSGSSGSSGSSGGLLGRDLLTKLKAQIQFSTEGPQVTWEDRPAMCLVLNLEEEYRLHEKPVPPSIDPSWLQLFPMVWAEKAGMGLANQVPPVVVELKSDASPVAVRQYPMSKEAREGIRPHIQRFLDLGILVPCQSPWNTPLLPVKKPGTNDYRPVQDLREVNKRVQDIHPTVPNPYNLLSSLPPSHTWYSVLDLKDAFFCLKLHPNSQPLFAFEWRDPEKGNTGQLTWTRLPQGFKNSPTLFNEALHRDLASFRALNPQVVMLQYVDDLLVAAPTYRDCKEGTRRLLQELSKLGYRVSAKKAQLCREEVTYLGYLLKGGKRWLTPARKATVMKIPTPTTPRQVREFLGTAGFCRLWIPGFASLAAPLYPLTRPKVPFTWTEAHQEAFGRIKEALLSAPALALPDLTKPFALYVDEKEGVARGVLTQTLGPWRRPVAYLSKKLDPVASGWPTCLKAIAAVALLLKDADKLTLGQNVLVIAPHNLESIVRQPPDRWMTNARMTHYQSLLLNERVSFAPPAILNPATLLPVESDDTPIHICSEILAEETGTRPDLRDQPLPGVPAWYTDGSSFIMDGRRQAGAAIVDNKRTVWASNLPEGTSAQKAELIALTQALRLAEGKSINIYTDSRYAFATAHVHGAIYKQRGWLTSAGKDIKNKEEILALLEAIHLPKRVAIIHCPGHQRGTDPVATGNRKADEAAKQAAQSTRILTETTKNAGKRTADGSEFEKRTADGSEFESPKKKAKVE

SEQ ID NO: 6345 - protein, 2225 aa, synthetic construct
MPAAKRVKLDGGDKKYSIGLDIGTNSVGWAVITDEYKVPSKKFKVLGNTDRHSIKKNLIGALLFDSGETAEATRLKRTARRRYTRRKNRICYLQEIFSNEMAKVDDSFFHRLEESFLVEEDKKHERHPIFGNIVDEVAYHEKYPTIYHLRKKLVDSTDKADLRLIYLALAHMIKFRGHFLIEGDLNPDNSDVDKLFIQLVQTYNQLFEENPINASGVDAKAILSARLSKSRRLENLIAQLPGEKKNGLFGNLIALSLGLTPNFKSNFDLAEDAKLQLSKDTYDDDLDNLLAQIGDQYADLFLAAKNLSDAILLSDILRVNTEITKAPLSASMIKRYDEHHQDLTLLKALVRQQLPEKYKEIFFDQSKNGYAGYIDGGASQEEFYKFIKPILEKMDGTEELLVKLNREDLLRKQRTFDNGSIPHQIHLGELHAILRRQEDFYPFLKDNREKIEKILTFRIPYYVGPLARGNSRFAWMTRKSEETITPWNFEEVVDKGASAQSFIERMTNFDKNLPNEKVLPKHSLLYEYFTVYNELTKVKYVTEGMRKPAFLSGEQKKAIVDLLFKTNRKVTVKQLKEDYFKKIECFDSVEISGVEDRFNASLGTYHDLLKIIKDKDFLDNEENEDILEDIVLTLTLFEDREMIEERLKTYAHLFDDKVMKQLKRRRYTGWGRLSRKLINGIRDKQSGKTILDFLKSDGFANRNFMQLIHDDSLTFKEDIQKAQVSGQGDSLHEHIANLAGSPAIKKGILQTVKVVDELVKVMGRHKPENIVIEMARENQTTQKGQKNSRERMKRIEEGIKELGSQILKEHPVENTQLQNEKLYLYYLQNGRDMYVDQELDINRLSDYDVDHIVPQSFLKDDSIDNKVLTRSDKARGKSDNVPSEEVVKKMKNYWRQLLNAKLITQRKFDNLTKAERGGLSELDKAGFIKRQLVETRQITKHVAQILDSRMNTKYDENDKLIREVKVITLKSKLVSDFRKDFQFYKVREINNYHHAHDAYLNAVVGTALIKKYPKLESEFVYGDYKVYDVRKMIAKSEQEIGKATAKYFFYSNIMNFFKTEITLANGEIRKRPLIETNGETGEIVWDKGRDFATVRKVLSMPQVNIVKKTEVQTGGFSKESILPKRNSDKLIARKKDWDPKKYGGFDSPTVAYSVLVVAKVEKGKSKKLKSVKELLGITIMERSSFEKNPIDFLEAKGYKEVKKDLIIKLPKYSLFELENGRKRMLASAGELQKGNELALPSKYVNFLYLASHYEKLKGSPEDNEQKQLFVEQHKHYLDEIIEQISEFSKRVILADANLDKVLSAYNKHRDKPIREQAENIIHLFTLTNLGAPAAFKYFDTTIDRKRYTSTKEVLDATLIHQSITGLYETRIDLSQLGGDGGGSSGSSGSSGSSGSSGSSGGTLGDQGSRGSDPLPEPRVTLTVEGIPTEFLVNTGAEHSVLTKPMGKMGSKRTVVAGATGSKVYPWTTKRLLKIGQKQVTHSFLVIPECPAPLLGRDLLTKLKAQIQFSTEGPQVTWEDRPAMCLVLNLEEEYRLHEKPVPPSIDPSWLQLFPMVWAEKAGMGLANQVPPVVVELKSDASPVAVRQYPMSKEAREGIRPHIQRFLDLGILVPCQSPWNTPLLPVKKPGTNDYRPVQDLREVNKRVQDIHPTVPNPYNLLSSLPPSHTWYSVLDLKDAFFCLKLHPNSQPLFAFEWRDPEKGNTGQLTWTRLPQGFKNSPTLFNEALHRDLASFRALNPQVVMLQYVDDLLVAAPTYRDCKEGTRRLLQELSKLGYRVSAKKAQLCREEVTYLGYLLKGGKRWLTPARKATVMKIPTPTTPRQVREFLGTAGFCRLWIPGFASLAAPLYPLTRPKVPFTWTEAHQEAFGRIKEALLSAPALALPDLTKPFALYVDEKEGVARGVLTQTLGPWRRPVAYLSKKLDPVASGWPTCLKAIAAVALLLKDADKLTLGQNVLVIAPHNLESIVRQPPDRWMTNARMTHYQSLLLNERVSFAPPAILNPATLLPVESDDTPIHICSEILAEETGTRPDLRDQPLPGVPAWYTDGSSFIMDGRRQAGAAIVDNKRTVWASNLPEGTSAQKAELIALTQALRLAEGKSINIYTDSRYAFATAHVHGAIYKQRGWLTSAGKDIKNKEEILALLEAIHLPKRVAIIHCPGHQRGTDPVATGNRKADEAAKQAAQSTRILTETTKNAGKRTADGSEFEKRTADGSEFESPKKKAKVE

SEQ ID NO: 6346 - protein, 2225 aa, synthetic construct
MPAAKRVKLDGGDKKYSIGLDIGTNSVGWAVITDEYKVPSKKFKVLGNTDRHSIKKNLIGALLFDSGETAEATRLKRTARRRYTRRKNRICYLQEIFSNEMAKVDDSFFHRLEESFLVEEDKKHERHPIFGNIVDEVAYHEKYPTIYHLRKKLVDSTDKADLRLIYLALAHMIKFRGHFLIEGDLNPDNSDVDKLFIQLVQTYNQLFEENPINASGVDAKAILSARLSKSRRLENLIAQLPGEKKNGLFGNLIALSLGLTPNFKSNFDLAEDAKLQLSKDTYDDDLDNLLAQIGDQYADLFLAAKNLSDAILLSDILRVNTEITKAPLSASMIKRYDEHHQDLTLLKALVRQQLPEKYKEIFFDQSKNGYAGYIDGGASQEEFYKFIKPILEKMDGTEELLVKLNREDLLRKQRTFDNGSIPHQIHLGELHAILRRQEDFYPFLKDNREKIEKILTFRIPYYVGPLARGNSRFAWMTRKSEETITPWNFEEVVDKGASAQSFIERMTNFDKNLPNEKVLPKHSLLYEYFTVYNELTKVKYVTEGMRKPAFLSGEQKKAIVDLLFKTNRKVTVKQLKEDYFKKIECFDSVEISGVEDRFNASLGTYHDLLKIIKDKDFLDNEENEDILEDIVLTLTLFEDREMIEERLKTYAHLFDDKVMKQLKRRRYTGWGRLSRKLINGIRDKQSGKTILDFLKSDGFANRNFMQLIHDDSLTFKEDIQKAQVSGQGDSLHEHIANLAGSPAIKKGILQTVKVVDELVKVMGRHKPENIVIEMARENQTTQKGQKNSRERMKRIEEGIKELGSQILKEHPVENTQLQNEKLYLYYLQNGRDMYVDQELDINRLSDYDVDHIVPQSFLKDDSIDNKVLTRSDKARGKSDNVPSEEVVKKMKNYWRQLLNAKLITQRKFDNLTKAERGGLSELDKAGFIKRQLVETRQITKHVAQILDSRMNTKYDENDKLIREVKVITLKSKLVSDFRKDFQFYKVREINNYHHAHDAYLNAVVGTALIKKYPKLESEFVYGDYKVYDVRKMIAKSEQEIGKATAKYFFYSNIMNFFKTEITLANGEIRKRPLIETNGETGEIVWDKGRDFATVRKVLSMPQVNIVKKTEVQTGGFSKESILPKRNSDKLIARKKDWDPKKYGGFDSPTVAYSVLVVAKVEKGKSKKLKSVKELLGITIMERSSFEKNPIDFLEAKGYKEVKKDLIIKLPKYSLFELENGRKRMLASAGELQKGNELALPSKYVNFLYLASHYEKLKGSPEDNEQKQLFVEQHKHYLDEIIEQISEFSKRVILADANLDKVLSAYNKHRDKPIREQAENIIHLFTLTNLGAPAAFKYFDTTIDRKRYTSTKEVLDATLIHQSITGLYETRIDLSQLGGDGGGSSGSSGSSGSSGSSGSSGGTLGDQGSRGSDPLPEPRVTLTVEGIPTEFLVNTGAEHSVLTKPMGKMGSKRTVVAGATGSKVYPWTTKRLLKIGQKQVTHSFLVIPECPAPLLGRDLLTKLKAQIQFSTEGPQVTWEDRPAMCLVLNLEEEYRLHEKPVPPSIDPSWLQLFPMVWAEKAGMGLANQVPPVVVELKSDASPVAVRQYPMSKEAREGIRPHIQRFLDLGILVPCQSPWNTPLLPVKKPGTNDYRPVQDLREVNKRVQDIHPTVPNPYNLLSSLPPSHTWYSVLDLKDAFFCLKLHPNSQPLFAFEWRDPEKGNTGQLTWTRLPQGFKNSPTLFNEALHRDLASFRALNPQVVMLQYVDDLLVAAPTYRDCKEGTRRLLQELSKLGYRVSAKKAQLCREEVTYLGYLLKGGKRWLTPARKATVMKIPTPTTPRQVREFLGKAGFCRLFIPGFASLAAPLYPLTRPKVPFTWTEAHQEAFGRIKEALLSAPALALPDLTKPFALYVDEKEGVARGVLTQTLGPWRRPVAYLSKKLDPVASGWPTCLKAIAAVALLLKDADKLTLGQNVLVIAPHNLESIVRQPPDRWMTNARMTHYQSLLLNERVSFAPPAILNPATLLPVESDDTPIHICSEILAEETGTRPDLRDQPLPGVPAWYTDGSSFIMDGRRQAGAAIVDNKRTVWASNLPEGTSAQKAELIALTQALRLAEGKSINIYTDSRYAFATAHVHGAIYKQRGWLTSAGKDIKNKEEILALLEAIHLPKRVAIIHCPGHQRGTDPVATGNRKADEAAKQAAQSTRILTETTKNAGKRTADGSEFEKRTADGSEFESPKKKAKVE

SEQ ID NO: 6347 - protein, 2103 aa, synthetic construct
MPAAKRVKLDGGDKKYSIGLDIGTNSVGWAVITDEYKVPSKKFKVLGNTDRHSIKKNLIGALLFDSGETAEATRLKRTARRRYTRRKNRICYLQEIFSNEMAKVDDSFFHRLEESFLVEEDKKHERHPIFGNIVDEVAYHEKYPTIYHLRKKLVDSTDKADLRLIYLALAHMIKFRGHFLIEGDLNPDNSDVDKLFIQLVQTYNQLFEENPINASGVDAKAILSARLSKSRRLENLIAQLPGEKKNGLFGNLIALSLGLTPNFKSNFDLAEDAKLQLSKDTYDDDLDNLLAQIGDQYADLFLAAKNLSDAILLSDILRVNTEITKAPLSASMIKRYDEHHQDLTLLKALVRQQLPEKYKEIFFDQSKNGYAGYIDGGASQEEFYKFIKPILEKMDGTEELLVKLNREDLLRKQRTFDNGSIPHQIHLGELHAILRRQEDFYPFLKDNREKIEKILTFRIPYYVGPLARGNSRFAWMTRKSEETITPWNFEEVVDKGASAQSFIERMTNFDKNLPNEKVLPKHSLLYEYFTVYNELTKVKYVTEGMRKPAFLSGEQKKAIVDLLFKTNRKVTVKQLKEDYFKKIECFDSVEISGVEDRFNASLGTYHDLLKIIKDKDFLDNEENEDILEDIVLTLTLFEDREMIEERLKTYAHLFDDKVMKQLKRRRYTGWGRLSRKLINGIRDKQSGKTILDFLKSDGFANRNFMQLIHDDSLTFKEDIQKAQVSGQGDSLHEHIANLAGSPAIKKGILQTVKVVDELVKVMGRHKPENIVIEMARENQTTQKGQKNSRERMKRIEEGIKELGSQILKEHPVENTQLQNEKLYLYYLQNGRDMYVDQELDINRLSDYDVDHIVPQSFLKDDSIDNKVLTRSDKARGKSDNVPSEEVVKKMKNYWRQLLNAKLITQRKFDNLTKAERGGLSELDKAGFIKRQLVETRQITKHVAQILDSRMNTKYDENDKLIREVKVITLKSKLVSDFRKDFQFYKVREINNYHHAHDAYLNAVVGTALIKKYPKLESEFVYGDYKVYDVRKMIAKSEQEIGKATAKYFFYSNIMNFFKTEITLANGEIRKRPLIETNGETGEIVWDKGRDFATVRKVLSMPQVNIVKKTEVQTGGFSKESILPKRNSDKLIARKKDWDPKKYGGFDSPTVAYSVLVVAKVEKGKSKKLKSVKELLGITIMERSSFEKNPIDFLEAKGYKEVKKDLIIKLPKYSLFELENGRKRMLASAGELQKGNELALPSKYVNFLYLASHYEKLKGSPEDNEQKQLFVEQHKHYLDEIIEQISEFSKRVILADANLDKVLSAYNKHRDKPIREQAENIIHLFTLTNLGAPAAFKYFDTTIDRKRYTSTKEVLDATLIHQSITGLYETRIDLSQLGGDGGGSSGSSGSSGSSGSSGSSGGTLNLEDEYRLYETSAEPEVSPGSTWLSDFPQAWAETGGMGLAVRQAPLIIPLKATSTPVSIKQYPMSQEAKLGIKPHIQRLLDQGILVPCQSPWNTPLLPVKKPGTNDYRPVQDLREVNKRVEDIHPTVPNPYNLLSGLPPSHRWYTVLDLKDAFFCLRLHPTSQPLFAFEWRDPGMGISGQLTWTRLPQGFKNSPTLFNEALHRDLADFRIQHPDLILLQYVDDILLAATSELDCQQGTRALLLTLGNLGYRASAKKAQLCQKQVKYLGYLLKEGQRWLTEARKETVMGQPTPKTPRQLREFLGTAGFCRLWIPGFAEMAAPLYPLTKPGTLFNWGPDQQKAYQEIKQALLTAPALGLPDLTKPFELFVDEKQGYAKGVLTQKLGPWRRPVAYLSKKLDPVAAGWPPCLRMVAAIAVLRKDAGKLTMGQPLVILAPHAVEALVKQPPDRWLSNARMTHYQAMLLDTDRVQFGPVVALNPATLLPLPEEGAPHDCLEILAETHGTRPDLTDQPIPDADHTWYTDGSSFLQEGQRKAGAAVTTETEVIWARALPAGTSAQRAELIALTQALKMAEGKRLNVYTDSRYAFATAHIHGEIYRRRGWLTSEGREIKNKSEILALLKALFLPKRLSIIHCLGHQKGDSAEARGNRLADQAAREAAIKTPPDTSTLLAGKRTADGSEFEKRTADGSEFESPKKKAKVE

SEQ ID NO: 6348 - protein, 2103 aa, synthetic construct
MPAAKRVKLDGGDKKYSIGLDIGTNSVGWAVITDEYKVPSKKFKVLGNTDRHSIKKNLIGALLFDSGETAEATRLKRTARRRYTRRKNRICYLQEIFSNEMAKVDDSFFHRLEESFLVEEDKKHERHPIFGNIVDEVAYHEKYPTIYHLRKKLVDSTDKADLRLIYLALAHMIKFRGHFLIEGDLNPDNSDVDKLFIQLVQTYNQLFEENPINASGVDAKAILSARLSKSRRLENLIAQLPGEKKNGLFGNLIALSLGLTPNFKSNFDLAEDAKLQLSKDTYDDDLDNLLAQIGDQYADLFLAAKNLSDAILLSDILRVNTEITKAPLSASMIKRYDEHHQDLTLLKALVRQQLPEKYKEIFFDQSKNGYAGYIDGGASQEEFYKFIKPILEKMDGTEELLVKLNREDLLRKQRTFDNGSIPHQIHLGELHAILRRQEDFYPFLKDNREKIEKILTFRIPYYVGPLARGNSRFAWMTRKSEETITPWNFEEVVDKGASAQSFIERMTNFDKNLPNEKVLPKHSLLYEYFTVYNELTKVKYVTEGMRKPAFLSGEQKKAIVDLLFKTNRKVTVKQLKEDYFKKIECFDSVEISGVEDRFNASLGTYHDLLKIIKDKDFLDNEENEDILEDIVLTLTLFEDREMIEERLKTYAHLFDDKVMKQLKRRRYTGWGRLSRKLINGIRDKQSGKTILDFLKSDGFANRNFMQLIHDDSLTFKEDIQKAQVSGQGDSLHEHIANLAGSPAIKKGILQTVKVVDELVKVMGRHKPENIVIEMARENQTTQKGQKNSRERMKRIEEGIKELGSQILKEHPVENTQLQNEKLYLYYLQNGRDMYVDQELDINRLSDYDVDHIVPQSFLKDDSIDNKVLTRSDKARGKSDNVPSEEVVKKMKNYWRQLLNAKLITQRKFDNLTKAERGGLSELDKAGFIKRQLVETRQITKHVAQILDSRMNTKYDENDKLIREVKVITLKSKLVSDFRKDFQFYKVREINNYHHAHDAYLNAVVGTALIKKYPKLESEFVYGDYKVYDVRKMIAKSEQEIGKATAKYFFYSNIMNFFKTEITLANGEIRKRPLIETNGETGEIVWDKGRDFATVRKVLSMPQVNIVKKTEVQTGGFSKESILPKRNSDKLIARKKDWDPKKYGGFDSPTVAYSVLVVAKVEKGKSKKLKSVKELLGITIMERSSFEKNPIDFLEAKGYKEVKKDLIIKLPKYSLFELENGRKRMLASAGELQKGNELALPSKYVNFLYLASHYEKLKGSPEDNEQKQLFVEQHKHYLDEIIEQISEFSKRVILADANLDKVLSAYNKHRDKPIREQAENIIHLFTLTNLGAPAAFKYFDTTIDRKRYTSTKEVLDATLIHQSITGLYETRIDLSQLGGDGGGSSGSSGSSGSSGSSGSSGGTLNLEDEYRLYETSAEPEVSPGSTWLSDFPQAWAETGGMGLAVRQAPLIIPLKATSTPVSIKQYPMSQEAKLGIKPHIQRLLDQGILVPCQSPWNTPLLPVKKPGTNDYRPVQDLREVNKRVEDIHPTVPNPYNLLSGLPPSHRWYTVLDLKDAFFCLRLHPTSQPLFAFEWRDPGMGISGQLTWTRLPQGFKNSPTLFNEALHRDLADFRIQHPDLILLQYVDDILLAATSELDCQQGTRALLLTLGNLGYRASAKKAQLCQKQVKYLGYLLKEGQRWLTEARKETVMGQPTPKTPRQLREFLGKAGFCRLFIPGFAEMAAPLYPLTKPGTLFNWGPDQQKAYQEIKQALLTAPALGLPDLTKPFELFVDEKQGYAKGVLTQKLGPWRRPVAYLSKKLDPVAAGWPPCLRMVAAIAVLRKDAGKLTMGQPLVILAPHAVEALVKQPPDRWLSNARMTHYQAMLLDTDRVQFGPVVALNPATLLPLPEEGAPHDCLEILAETHGTRPDLTDQPIPDADHTWYTDGSSFLQEGQRKAGAAVTTETEVIWARALPAGTSAQRAELIALTQALKMAEGKRLNVYTDSRYAFATAHIHGEIYRRRGWLTSEGREIKNKSEILALLKALFLPKRLSIIHCLGHQKGDSAEARGNRLADQAAREAAIKTPPDTSTLLAGKRTADGSEFEKRTADGSEFESPKKKAKVE

SEQ ID NO: 6349 - protein, 2103 aa, synthetic construct
MPAAKRVKLDGGDKKYSIGLDIGTNSVGWAVITDEYKVPSKKFKVLGNTDRHSIKKNLIGALLFDSGETAEATRLKRTARRRYTRRKNRICYLQEIFSNEMAKVDDSFFHRLEESFLVEEDKKHERHPIFGNIVDEVAYHEKYPTIYHLRKKLVDSTDKADLRLIYLALAHMIKFRGHFLIEGDLNPDNSDVDKLFIQLVQTYNQLFEENPINASGVDAKAILSARLSKSRRLENLIAQLPGEKKNGLFGNLIALSLGLTPNFKSNFDLAEDAKLQLSKDTYDDDLDNLLAQIGDQYADLFLAAKNLSDAILLSDILRVNTEITKAPLSASMIKRYDEHHQDLTLLKALVRQQLPEKYKEIFFDQSKNGYAGYIDGGASQEEFYKFIKPILEKMDGTEELLVKLNREDLLRKQRTFDNGSIPHQIHLGELHAILRRQEDFYPFLKDNREKIEKILTFRIPYYVGPLARGNSRFAWMTRKSEETITPWNFEEVVDKGASAQSFIERMTNFDKNLPNEKVLPKHSLLYEYFTVYNELTKVKYVTEGMRKPAFLSGEQKKAIVDLLFKTNRKVTVKQLKEDYFKKIECFDSVEISGVEDRFNASLGTYHDLLKIIKDKDFLDNEENEDILEDIVLTLTLFEDREMIEERLKTYAHLFDDKVMKQLKRRRYTGWGRLSRKLINGIRDKQSGKTILDFLKSDGFANRNFMQLIHDDSLTFKEDIQKAQVSGQGDSLHEHIANLAGSPAIKKGILQTVKVVDELVKVMGRHKPENIVIEMARENQTTQKGQKNSRERMKRIEEGIKELGSQILKEHPVENTQLQNEKLYLYYLQNGRDMYVDQELDINRLSDYDVDHIVPQSFLKDDSIDNKVLTRSDKARGKSDNVPSEEVVKKMKNYWRQLLNAKLITQRKFDNLTKAERGGLSELDKAGFIKRQLVETRQITKHVAQILDSRMNTKYDENDKLIREVKVITLKSKLVSDFRKDFQFYKVREINNYHHAHDAYLNAVVGTALIKKYPKLESEFVYGDYKVYDVRKMIAKSEQEIGKATAKYFFYSNIMNFFKTEITLANGEIRKRPLIETNGETGEIVWDKGRDFATVRKVLSMPQVNIVKKTEVQTGGFSKESILPKRNSDKLIARKKDWDPKKYGGFDSPTVAYSVLVVAKVEKGKSKKLKSVKELLGITIMERSSFEKNPIDFLEAKGYKEVKKDLIIKLPKYSLFELENGRKRMLASAGELQKGNELALPSKYVNFLYLASHYEKLKGSPEDNEQKQLFVEQHKHYLDEIIEQISEFSKRVILADANLDKVLSAYNKHRDKPIREQAENIIHLFTLTNLGAPAAFKYFDTTIDRKRYTSTKEVLDATLIHQSITGLYETRIDLSQLGGDGGGSSGSSGSSGSSGSSGSSGGTLNIEDEYRLHETSKEPDVSLGSTWLSDFPQAWAETGGMGLAVRQAPLIIPLKATSTPVSIKQYPMSQEARLGIKPHIQRLLDQGILVPCQSPWNTPLLPVKKPGTNDYRPVQDLREVNKRVEDIHPTVPNPYNLLSGLPPSHQWYTVLDLKDAFFCLRLHPTSQPLFAFEWRDPEMGISGQLTWTRLPQGFKNSPTLFNEALHRDLAGFRIQHPDLILLQYVDDLLLAATSELDCQQGTRALLQTLGDLGYRASAKKAQICQKQVKYLGYLLKEGQRWLTEARKETVMGQPIPKTPRQLREFLGTAGFCRLWIPGFAEMAAPLYPLTKPGTLFNWGPDQQKAFQEIKQALLTAPALGLPDLTKPFELFVDEKQGYAKGVLTQKLGPWRRPVAYLSKKLDPVAAGWPPCLRMVAAIAVLTKDAGKLTMGQPLVILAPHAVEALVKQPPDRWLSNARMTHYQALLLDTDRVQFGPVVALNPATLLPLPEEGLQHDCLDILAEAHGTRSDLMDQPLPDADHTWYTDGSSFLQEGQRKAGAAVTTETEVIWARALPAGTSAQRAELIALTQALKMAEGKKLNVYTDSRYAFATAHIHGEIYRRRGWLTSEGKEIKNKDEILALLKALFLPKRLSIIHCPGHQKGNSAEARGNRMADQAAREVATRETPETSTLLAGKRTADGSEFEKRTADGSEFESPKKKAKVE

SEQ ID NO: 6350 - protein, 2103 aa, synthetic construct
MPAAKRVKLDGGDKKYSIGLDIGTNSVGWAVITDEYKVPSKKFKVLGNTDRHSIKKNLIGALLFDSGETAEATRLKRTARRRYTRRKNRICYLQEIFSNEMAKVDDSFFHRLEESFLVEEDKKHERHPIFGNIVDEVAYHEKYPTIYHLRKKLVDSTDKADLRLIYLALAHMIKFRGHFLIEGDLNPDNSDVDKLFIQLVQTYNQLFEENPINASGVDAKAILSARLSKSRRLENLIAQLPGEKKNGLFGNLIALSLGLTPNFKSNFDLAEDAKLQLSKDTYDDDLDNLLAQIGDQYADLFLAAKNLSDAILLSDILRVNTEITKAPLSASMIKRYDEHHQDLTLLKALVRQQLPEKYKEIFFDQSKNGYAGYIDGGASQEEFYKFIKPILEKMDGTEELLVKLNREDLLRKQRTFDNGSIPHQIHLGELHAILRRQEDFYPFLKDNREKIEKILTFRIPYYVGPLARGNSRFAWMTRKSEETITPWNFEEVVDKGASAQSFIERMTNFDKNLPNEKVLPKHSLLYEYFTVYNELTKVKYVTEGMRKPAFLSGEQKKAIVDLLFKTNRKVTVKQLKEDYFKKIECFDSVEISGVEDRFNASLGTYHDLLKIIKDKDFLDNEENEDILEDIVLTLTLFEDREMIEERLKTYAHLFDDKVMKQLKRRRYTGWGRLSRKLINGIRDKQSGKTILDFLKSDGFANRNFMQLIHDDSLTFKEDIQKAQVSGQGDSLHEHIANLAGSPAIKKGILQTVKVVDELVKVMGRHKPENIVIEMARENQTTQKGQKNSRERMKRIEEGIKELGSQILKEHPVENTQLQNEKLYLYYLQNGRDMYVDQELDINRLSDYDVDHIVPQSFLKDDSIDNKVLTRSDKARGKSDNVPSEEVVKKMKNYWRQLLNAKLITQRKFDNLTKAERGGLSELDKAGFIKRQLVETRQITKHVAQILDSRMNTKYDENDKLIREVKVITLKSKLVSDFRKDFQFYKVREINNYHHAHDAYLNAVVGTALIKKYPKLESEFVYGDYKVYDVRKMIAKSEQEIGKATAKYFFYSNIMNFFKTEITLANGEIRKRPLIETNGETGEIVWDKGRDFATVRKVLSMPQVNIVKKTEVQTGGFSKESILPKRNSDKLIARKKDWDPKKYGGFDSPTVAYSVLVVAKVEKGKSKKLKSVKELLGITIMERSSFEKNPIDFLEAKGYKEVKKDLIIKLPKYSLFELENGRKRMLASAGELQKGNELALPSKYVNFLYLASHYEKLKGSPEDNEQKQLFVEQHKHYLDEIIEQISEFSKRVILADANLDKVLSAYNKHRDKPIREQAENIIHLFTLTNLGAPAAFKYFDTTIDRKRYTSTKEVLDATLIHQSITGLYETRIDLSQLGGDGGGSSGSSGSSGSSGSSGSSGGTLNIEDEYRLHETSKGPDVPLGSTWLSDFPQAWAETGGMGLAFRQAPLIISLKATSTPVSIKQYPMSQEARLGIKPHIQRLLDQGILVPCQSPWNTPLLPVKKPGTNDYRPVQDLREVNKRVEDIHPTVPNPYNLLSGLPPSHQWYTVLDLKDAFFCLRLHPTSQSLFAFEWKDPEMGISGQLTWTRLPQGFKNSPTLFDEALHRDLADFRIQHPDLILLQYVDDLLLAATSELDCQQGTRALLQTLGDLGYRASAKKAQICQKQVKYLGYLLKEGQRWLTEARKETVMGQPTPKTPRQLREFLGTAGLCRLWIPGFAEMAAPLYPLTKTGTLFKWGPDQQKAYQEIKQALLTAPALGLPDLTKPFELFVDEKQGYAKGVLTQKLGPWRRPVAYLSKKLDPVAAGWPPCLRMVAAIAVLTKDVGKLTMGQPLVILAPHAVEALVKQPPDRWLSNARMTHYQALLLDTDRVQFGPIVALNPATLLPLPEEGLQHDCLDILAEAHGTRPDLTDQPLPDADHTWYTDGSSFLQEGQRRAGAAVTTETEVIWAKALPAGTSAQRAELIALTQALKMAAGKKLNVYTDSRYAFATAHIHGEIYRRRGLLTSEGKEIKNKDEILALLKALFLPKRLSIIHCPGHQKGNHAEARGNRMADQAAREVATRETPETSTLLAGKRTADGSEFEKRTADGSEFESPKKKAKVE

SEQ ID NO: 6351 - protein, 2103 aa, synthetic construct
MPAAKRVKLDGGDKKYSIGLDIGTNSVGWAVITDEYKVPSKKFKVLGNTDRHSIKKNLIGALLFDSGETAEATRLKRTARRRYTRRKNRICYLQEIFSNEMAKVDDSFFHRLEESFLVEEDKKHERHPIFGNIVDEVAYHEKYPTIYHLRKKLVDSTDKADLRLIYLALAHMIKFRGHFLIEGDLNPDNSDVDKLFIQLVQTYNQLFEENPINASGVDAKAILSARLSKSRRLENLIAQLPGEKKNGLFGNLIALSLGLTPNFKSNFDLAEDAKLQLSKDTYDDDLDNLLAQIGDQYADLFLAAKNLSDAILLSDILRVNTEITKAPLSASMIKRYDEHHQDLTLLKALVRQQLPEKYKEIFFDQSKNGYAGYIDGGASQEEFYKFIKPILEKMDGTEELLVKLNREDLLRKQRTFDNGSIPHQIHLGELHAILRRQEDFYPFLKDNREKIEKILTFRIPYYVGPLARGNSRFAWMTRKSEETITPWNFEEVVDKGASAQSFIERMTNFDKNLPNEKVLPKHSLLYEYFTVYNELTKVKYVTEGMRKPAFLSGEQKKAIVDLLFKTNRKVTVKQLKEDYFKKIECFDSVEISGVEDRFNASLGTYHDLLKIIKDKDFLDNEENEDILEDIVLTLTLFEDREMIEERLKTYAHLFDDKVMKQLKRRRYTGWGRLSRKLINGIRDKQSGKTILDFLKSDGFANRNFMQLIHDDSLTFKEDIQKAQVSGQGDSLHEHIANLAGSPAIKKGILQTVKVVDELVKVMGRHKPENIVIEMARENQTTQKGQKNSRERMKRIEEGIKELGSQILKEHPVENTQLQNEKLYLYYLQNGRDMYVDQELDINRLSDYDVDHIVPQSFLKDDSIDNKVLTRSDKARGKSDNVPSEEVVKKMKNYWRQLLNAKLITQRKFDNLTKAERGGLSELDKAGFIKRQLVETRQITKHVAQILDSRMNTKYDENDKLIREVKVITLKSKLVSDFRKDFQFYKVREINNYHHAHDAYLNAVVGTALIKKYPKLESEFVYGDYKVYDVRKMIAKSEQEIGKATAKYFFYSNIMNFFKTEITLANGEIRKRPLIETNGETGEIVWDKGRDFATVRKVLSMPQVNIVKKTEVQTGGFSKESILPKRNSDKLIARKKDWDPKKYGGFDSPTVAYSVLVVAKVEKGKSKKLKSVKELLGITIMERSSFEKNPIDFLEAKGYKEVKKDLIIKLPKYSLFELENGRKRMLASAGELQKGNELALPSKYVNFLYLASHYEKLKGSPEDNEQKQLFVEQHKHYLDEIIEQISEFSKRVILADANLDKVLSAYNKHRDKPIREQAENIIHLFTLTNLGAPAAFKYFDTTIDRKRYTSTKEVLDATLIHQSITGLYETRIDLSQLGGDGGGSSGSSGSSGSSGSSGSSGGTLNIEDEYRLHETSKGPDVPLGSTWLSDFPQAWAETGGMGLAVRQAPLIIPLKATSTPVSIKQYPMSQEARLGIKPHIQRLLDQGILVPCQSPWNTPLLPVKKPGTNDYRPVQDLREVNKRVEDIHPTVPNPYNLLSGLPPSHQWYTVLDLKDAFFCLRLHPTSQSLFAFEWRDPEMGISGQLTWTRLPQGFKNSPTLFNEALHRDLADFRIQHPDLILLQYVDDLLLAATSELDCQQGTRALLQTLGDLGYRASAKKAQICQKQVKYLGYLLKEGQRWLTEARKETVMGQPTPKTPRQLREFLGTAGFCRLWIPGFAEMAAPLYPLTKPGTLFEWGPDQQKAYQEIKQALLTAPALGLPDLTKPFELFVDEKQGYAKGVLTQKLGPWRRPVAYLSKKLDPVAAGWPPCLRMVAAIAVLTKDAGKLTMGQPLVILAPHAVEALVKQPPDRWLSNARMTHYQALLLDTDRVQFGPIVALNPATLLPLPEEGLQHDCLDILAEAHGTRPDLTDQPLPDADHTWYTDGSSFLQEGQRKAGAAVTTETEVVWAKALPAGTSAQRAELIALTQALKMAEGKKLNVYTDSRYAFATAHIHGEIYRRRGWLTSEGKEIKNKDEILALLKALFLPKRLSIIHCPGHQKGNRAEARGNRMADQAAREVATRETPETSTLLAGKRTADGSEFEKRTADGSEFESPKKKAKVE

SEQ ID NO: 6352 - protein, 2103 aa, synthetic construct
MPAAKRVKLDGGDKKYSIGLDIGTNSVGWAVITDEYKVPSKKFKVLGNTDRHSIKKNLIGALLFDSGETAEATRLKRTARRRYTRRKNRICYLQEIFSNEMAKVDDSFFHRLEESFLVEEDKKHERHPIFGNIVDEVAYHEKYPTIYHLRKKLVDSTDKADLRLIYLALAHMIKFRGHFLIEGDLNPDNSDVDKLFIQLVQTYNQLFEENPINASGVDAKAILSARLSKSRRLENLIAQLPGEKKNGLFGNLIALSLGLTPNFKSNFDLAEDAKLQLSKDTYDDDLDNLLAQIGDQYADLFLAAKNLSDAILLSDILRVNTEITKAPLSASMIKRYDEHHQDLTLLKALVRQQLPEKYKEIFFDQSKNGYAGYIDGGASQEEFYKFIKPILEKMDGTEELLVKLNREDLLRKQRTFDNGSIPHQIHLGELHAILRRQEDFYPFLKDNREKIEKILTFRIPYYVGPLARGNSRFAWMTRKSEETITPWNFEEVVDKGASAQSFIERMTNFDKNLPNEKVLPKHSLLYEYFTVYNELTKVKYVTEGMRKPAFLSGEQKKAIVDLLFKTNRKVTVKQLKEDYFKKIECFDSVEISGVEDRFNASLGTYHDLLKIIKDKDFLDNEENEDILEDIVLTLTLFEDREMIEERLKTYAHLFDDKVMKQLKRRRYTGWGRLSRKLINGIRDKQSGKTILDFLKSDGFANRNFMQLIHDDSLTFKEDIQKAQVSGQGDSLHEHIANLAGSPAIKKGILQTVKVVDELVKVMGRHKPENIVIEMARENQTTQKGQKNSRERMKRIEEGIKELGSQILKEHPVENTQLQNEKLYLYYLQNGRDMYVDQELDINRLSDYDVDHIVPQSFLKDDSIDNKVLTRSDKARGKSDNVPSEEVVKKMKNYWRQLLNAKLITQRKFDNLTKAERGGLSELDKAGFIKRQLVETRQITKHVAQILDSRMNTKYDENDKLIREVKVITLKSKLVSDFRKDFQFYKVREINNYHHAHDAYLNAVVGTALIKKYPKLESEFVYGDYKVYDVRKMIAKSEQEIGKATAKYFFYSNIMNFFKTEITLANGEIRKRPLIETNGETGEIVWDKGRDFATVRKVLSMPQVNIVKKTEVQTGGFSKESILPKRNSDKLIARKKDWDPKKYGGFDSPTVAYSVLVVAKVEKGKSKKLKSVKELLGITIMERSSFEKNPIDFLEAKGYKEVKKDLIIKLPKYSLFELENGRKRMLASAGELQKGNELALPSKYVNFLYLASHYEKLKGSPEDNEQKQLFVEQHKHYLDEIIEQISEFSKRVILADANLDKVLSAYNKHRDKPIREQAENIIHLFTLTNLGAPAAFKYFDTTIDRKRYTSTKEVLDATLIHQSITGLYETRIDLSQLGGDGGGSSGSSGSSGSSGSSGSSGGTLNIEDEHRLHETSKEPDVSLGSTWLSDFPQAWAETGGMGLAVRQAPLIIPLKATSTPVSIKQYPMSQEARLGIKPHIQRLLDQGILVPCQSPWNTPLLPVKKPGTNDYRPVQDLREVNKRVEDIHPTVPNPYNLLSGLPPSHQWYTVLDLKDAFFCLRLHPTSQPLFAFEWRDPEMGISGQLTWTRLPQGFKNSPTLFDEALHRDLADFRIQHPDLILLQYVDDLLLAATSELDCQQGTRALLQTLGNLGYRASAKKAQICQKQVKYLGYLLKEGQRWLTEARKETVMGQPTPKTPRQLREFLGTAGFCRLWIPGFAEMAAPLYPLTKTGTLFNWGPDQQKAYQEIKQALLTAPALGLPDLTKPFELFVDEKQGYAKGVLTQKLGPWRRPVAYLSKKLDPVAAGWPPCLRMVAAIAVLTKDAGKLTMGQPLVILAPHAVEALVKQPPDRWLSNARMTHYQALLLDTDRVQFGPVVALNPATLLPLPEEGLQHNCLDILAEAHGTRPDLTDQPLPDADHTWYTDGSSLLQEGQRKAGAAVTTETEVIWAKALPAGTSAQRAELIALTQALKMAEGKKLNVYTDSRYAFATAHIHGEIYRRRGLLTSEGKEIKNKDEILALLKALFLPKRLSIIHCPGHQKGHSAEARGNRMADQAARKAAITETPDTSTLLAGKRTADGSEFEKRTADGSEFESPKKKAKVE

SEQ ID NO: 6353 - protein, 2103 aa, synthetic construct
MPAAKRVKLDGGDKKYSIGLDIGTNSVGWAVITDEYKVPSKKFKVLGNTDRHSIKKNLIGALLFDSGETAEATRLKRTARRRYTRRKNRICYLQEIFSNEMAKVDDSFFHRLEESFLVEEDKKHERHPIFGNIVDEVAYHEKYPTIYHLRKKLVDSTDKADLRLIYLALAHMIKFRGHFLIEGDLNPDNSDVDKLFIQLVQTYNQLFEENPINASGVDAKAILSARLSKSRRLENLIAQLPGEKKNGLFGNLIALSLGLTPNFKSNFDLAEDAKLQLSKDTYDDDLDNLLAQIGDQYADLFLAAKNLSDAILLSDILRVNTEITKAPLSASMIKRYDEHHQDLTLLKALVRQQLPEKYKEIFFDQSKNGYAGYIDGGASQEEFYKFIKPILEKMDGTEELLVKLNREDLLRKQRTFDNGSIPHQIHLGELHAILRRQEDFYPFLKDNREKIEKILTFRIPYYVGPLARGNSRFAWMTRKSEETITPWNFEEVVDKGASAQSFIERMTNFDKNLPNEKVLPKHSLLYEYFTVYNELTKVKYVTEGMRKPAFLSGEQKKAIVDLLFKTNRKVTVKQLKEDYFKKIECFDSVEISGVEDRFNASLGTYHDLLKIIKDKDFLDNEENEDILEDIVLTLTLFEDREMIEERLKTYAHLFDDKVMKQLKRRRYTGWGRLSRKLINGIRDKQSGKTILDFLKSDGFANRNFMQLIHDDSLTFKEDIQKAQVSGQGDSLHEHIANLAGSPAIKKGILQTVKVVDELVKVMGRHKPENIVIEMARENQTTQKGQKNSRERMKRIEEGIKELGSQILKEHPVENTQLQNEKLYLYYLQNGRDMYVDQELDINRLSDYDVDHIVPQSFLKDDSIDNKVLTRSDKARGKSDNVPSEEVVKKMKNYWRQLLNAKLITQRKFDNLTKAERGGLSELDKAGFIKRQLVETRQITKHVAQILDSRMNTKYDENDKLIREVKVITLKSKLVSDFRKDFQFYKVREINNYHHAHDAYLNAVVGTALIKKYPKLESEFVYGDYKVYDVRKMIAKSEQEIGKATAKYFFYSNIMNFFKTEITLANGEIRKRPLIETNGETGEIVWDKGRDFATVRKVLSMPQVNIVKKTEVQTGGFSKESILPKRNSDKLIARKKDWDPKKYGGFDSPTVAYSVLVVAKVEKGKSKKLKSVKELLGITIMERSSFEKNPIDFLEAKGYKEVKKDLIIKLPKYSLFELENGRKRMLASAGELQKGNELALPSKYVNFLYLASHYEKLKGSPEDNEQKQLFVEQHKHYLDEIIEQISEFSKRVILADANLDKVLSAYNKHRDKPIREQAENIIHLFTLTNLGAPAAFKYFDTTIDRKRYTSTKEVLDATLIHQSITGLYETRIDLSQLGGDGGGSSGSSGSSGSSGSSGSSGGTLNIEDEYRLHEISTEPDVSPGSTWLSDFPQAWAETGGMGLAVRQAPLIIPLKATSTPVSIKQYPMSQEAKLGIKPHIQRLLDQGILVPCQSPWNTPLLPVKKPGTNDYRPVQGLREVNKRVEDIHPTVPNPYNLLSGLPTSHRWYTVLDLKDAFFCLRLHPTSQPLFASEWRDPGMGISGQLTWTRLPQGFKNSPTLFDEALHRGLADFRIQHPDLILLQYVDDLLLAATSELDCQQGTRALLKTLGNLGYRASAKKAQICQKQVKYLGYLLREGQRWLTEARKETVMGQPTPKTPRQLREFLGTAGFCRLWIPRFAEMAAPLYPLTKTGTLFNWGPDQQKAYHEIKQALLTAPALGLPDLTKPFELFVDEKQGYAKGVLTQKLGPWRRPVAYLSKKLDPVAAGWPPCLRMVAAIAVLTKDAGKLTMGQPLVILAPHAVEALVKQPPDRWLSNARMTHYQAMLLDTDRVQFGPVVALNPATLLPLPEEGAPHDCLEILAETHGTEPDLTDQPIPDADHTWYTDGSSFLQEGQRKAGAAVTTETEVIWARALPAGTSAQRAELIALTQALKMAEGKRLNVYTDSRYAFATAHIHGEIYKRRGLLTSEGREIKNKSEILALLKALFLPKRLSIIHCLGHQKGDSAEARGNRLADQAAREAAIKTPPDTSTLLAGKRTADGSEFEKRTADGSEFESPKKKAKVE

SEQ ID NO: 6354 - protein, 2097 aa, synthetic construct
MPAAKRVKLDGGDKKYSIGLDIGTNSVGWAVITDEYKVPSKKFKVLGNTDRHSIKKNLIGALLFDSGETAEATRLKRTARRRYTRRKNRICYLQEIFSNEMAKVDDSFFHRLEESFLVEEDKKHERHPIFGNIVDEVAYHEKYPTIYHLRKKLVDSTDKADLRLIYLALAHMIKFRGHFLIEGDLNPDNSDVDKLFIQLVQTYNQLFEENPINASGVDAKAILSARLSKSRRLENLIAQLPGEKKNGLFGNLIALSLGLTPNFKSNFDLAEDAKLQLSKDTYDDDLDNLLAQIGDQYADLFLAAKNLSDAILLSDILRVNTEITKAPLSASMIKRYDEHHQDLTLLKALVRQQLPEKYKEIFFDQSKNGYAGYIDGGASQEEFYKFIKPILEKMDGTEELLVKLNREDLLRKQRTFDNGSIPHQIHLGELHAILRRQEDFYPFLKDNREKIEKILTFRIPYYVGPLARGNSRFAWMTRKSEETITPWNFEEVVDKGASAQSFIERMTNFDKNLPNEKVLPKHSLLYEYFTVYNELTKVKYVTEGMRKPAFLSGEQKKAIVDLLFKTNRKVTVKQLKEDYFKKIECFDSVEISGVEDRFNASLGTYHDLLKIIKDKDFLDNEENEDILEDIVLTLTLFEDREMIEERLKTYAHLFDDKVMKQLKRRRYTGWGRLSRKLINGIRDKQSGKTILDFLKSDGFANRNFMQLIHDDSLTFKEDIQKAQVSGQGDSLHEHIANLAGSPAIKKGILQTVKVVDELVKVMGRHKPENIVIEMARENQTTQKGQKNSRERMKRIEEGIKELGSQILKEHPVENTQLQNEKLYLYYLQNGRDMYVDQELDINRLSDYDVDHIVPQSFLKDDSIDNKVLTRSDKARGKSDNVPSEEVVKKMKNYWRQLLNAKLITQRKFDNLTKAERGGLSELDKAGFIKRQLVETRQITKHVAQILDSRMNTKYDENDKLIREVKVITLKSKLVSDFRKDFQFYKVREINNYHHAHDAYLNAVVGTALIKKYPKLESEFVYGDYKVYDVRKMIAKSEQEIGKATAKYFFYSNIMNFFKTEITLANGEIRKRPLIETNGETGEIVWDKGRDFATVRKVLSMPQVNIVKKTEVQTGGFSKESILPKRNSDKLIARKKDWDPKKYGGFDSPTVAYSVLVVAKVEKGKSKKLKSVKELLGITIMERSSFEKNPIDFLEAKGYKEVKKDLIIKLPKYSLFELENGRKRMLASAGELQKGNELALPSKYVNFLYLASHYEKLKGSPEDNEQKQLFVEQHKHYLDEIIEQISEFSKRVILADANLDKVLSAYNKHRDKPIREQAENIIHLFTLTNLGAPAAFKYFDTTIDRKRYTSTKEVLDATLIHQSITGLYETRIDLSQLGGDGGGSSGSSGSSGSSGSSGSSGGTLQLDDEYRLYSPLVKPDQNIQFWLEQFPQAWAETAGMGLAKQVPPQVIQLKASATPVSVRQYPLSKEAQEGIRPHVQRLIQQGILVPVQSPWNTPLLPVRKPGTNDYRPVQDLREVNKRVQDIHPTVPNPYNLLCALPPQRSWYTVLDLKDAFFCLRLHPTSQPLFAFEWRDPGTGRTGQLTWTRLPQGFKNSPTIFDEALHRDLANFRIQHPQVTLLQYVDDLLLAGATKQDCLEGTKALLLELSDLGYRASAKKAQICRREVTYLGYSLRDGQRWLTEARKKTVVQIPAPTTAKQVREFLGTAGFCRLWIPGFATLAAPLYPLTKEKGEFSWAPEHQKAFDAIKKALLSAPALALPDVTKPFTLYVDERKGVARGVLTQTLGPWRRPVAYLSKKLDPVASGWPVCLKAIAAVAILVKDADKLTLGQNITVIAPHALENIVRQPPDRWMTNARMTHYQSLLLTERVTFAPPAALNPATLLPEETDEPVTHDCHQLLIEETGVRKDLTDIPLTGEVLTWFTDGSSYVVEGKRMAGAAVVDGTRTIWASSLPEGTSAQKAELMALTQALRLAEGKSINIYTDSRYAFATAHVHGAIYKQRGLLTSAGREIKNKEEILSLLEALHLPKRLAIIHCPGHQKAKDPISRGNQMADRVAKQAAQGVNLLAGKRTADGSEFEKRTADGSEFESPKKKAKVE

SEQ ID NO: 6355 - protein, 2183 aa, synthetic construct
MPAAKRVKLDGGDKKYSIGLDIGTNSVGWAVITDEYKVPSKKFKVLGNTDRHSIKKNLIGALLFDSGETAEATRLKRTARRRYTRRKNRICYLQEIFSNEMAKVDDSFFHRLEESFLVEEDKKHERHPIFGNIVDEVAYHEKYPTIYHLRKKLVDSTDKADLRLIYLALAHMIKFRGHFLIEGDLNPDNSDVDKLFIQLVQTYNQLFEENPINASGVDAKAILSARLSKSRRLENLIAQLPGEKKNGLFGNLIALSLGLTPNFKSNFDLAEDAKLQLSKDTYDDDLDNLLAQIGDQYADLFLAAKNLSDAILLSDILRVNTEITKAPLSASMIKRYDEHHQDLTLLKALVRQQLPEKYKEIFFDQSKNGYAGYIDGGASQEEFYKFIKPILEKMDGTEELLVKLNREDLLRKQRTFDNGSIPHQIHLGELHAILRRQEDFYPFLKDNREKIEKILTFRIPYYVGPLARGNSRFAWMTRKSEETITPWNFEEVVDKGASAQSFIERMTNFDKNLPNEKVLPKHSLLYEYFTVYNELTKVKYVTEGMRKPAFLSGEQKKAIVDLLFKTNRKVTVKQLKEDYFKKIECFDSVEISGVEDRFNASLGTYHDLLKIIKDKDFLDNEENEDILEDIVLTLTLFEDREMIEERLKTYAHLFDDKVMKQLKRRRYTGWGRLSRKLINGIRDKQSGKTILDFLKSDGFANRNFMQLIHDDSLTFKEDIQKAQVSGQGDSLHEHIANLAGSPAIKKGILQTVKVVDELVKVMGRHKPENIVIEMARENQTTQKGQKNSRERMKRIEEGIKELGSQILKEHPVENTQLQNEKLYLYYLQNGRDMYVDQELDINRLSDYDVDHIVPQSFLKDDSIDNKVLTRSDKARGKSDNVPSEEVVKKMKNYWRQLLNAKLITQRKFDNLTKAERGGLSELDKAGFIKRQLVETRQITKHVAQILDSRMNTKYDENDKLIREVKVITLKSKLVSDFRKDFQFYKVREINNYHHAHDAYLNAVVGTALIKKYPKLESEFVYGDYKVYDVRKMIAKSEQEIGKATAKYFFYSNIMNFFKTEITLANGEIRKRPLIETNGETGEIVWDKGRDFATVRKVLSMPQVNIVKKTEVQTGGFSKESILPKRNSDKLIARKKDWDPKKYGGFDSPTVAYSVLVVAKVEKGKSKKLKSVKELLGITIMERSSFEKNPIDFLEAKGYKEVKKDLIIKLPKYSLFELENGRKRMLASAGELQKGNELALPSKYVNFLYLASHYEKLKGSPEDNEQKQLFVEQHKHYLDEIIEQISEFSKRVILADANLDKVLSAYNKHRDKPIREQAENIIHLFTLTNLGAPAAFKYFDTTIDRKRYTSTKEVLDATLIHQSITGLYETRIDLSQLGGDGGGSSGSSGSSGSSGSSGSSGGMDPLQLLQPLEAEIKGTKLKAHWNSGATITCVPEAFLEDERPIQTMLIKTIHGEKQQDVYYLTFKVQGRKVEAEVLASPYDYILLNPSDVPWLMKKPLQLTVLVPLHEYQERLLQQTALPKEQKELLQKLFLKYDALWQHWENQVGHRRIKPHNIATGTLAPRPQKQYPINPKAKPSIQIVIDDLLKQGVLIQQNSTMNTPVYPVPKPDGKWRMVLDYREVNKTIPLIAAQNQHSAGILSSIYRGKYKTTLDLTNGFWAHPITPESYWLTAFTWQGKQYCWTRLPQGFLNSPALFNADVVDLLKEIPNVQAYVDDIYISHDDPQEHLEQLEKIFSILLNAGYVVSLKKSEIAQREVEFLGFNITKEGRGLTDTFKQKLLNITPPKDLKQLQSILGLLNFARNFIPNYSELVKPLYTIVAPANGKFISWTEDNSNQLQHIISVLNQADNLEERNPETRLIIKVNSSPSAGYIRYYNEGSKRPIMYVNYIFSKAEAKFTQTEKLLTTMHKGLIKAMDLAMGQEILVYSPIVSMTKIQRTPLPERKALPVRWITWMTYLEDPRIQFHYDKSLPELQQIPNVTEDVIAKTKHPSEFAMVFYTDGSAIKHPDVNKSHSAGMGIAQVQFIPEYKIVHQWSIPLGDHTAQLAEIAAVEFACKKALKISGPVLIVTDSFYVAESANKELPYWKSNGFLNNKKKPLRHVSKWKSIAECLQLKPDIIIMHEKGHQQPMTTLHTEGNNLADKLATQGSYVVHAGKRTADGSEFEKRTADGSEFESPKKKAKVE

SEQ ID NO: 6356 - protein, 2094 aa, synthetic construct
MPAAKRVKLDGGDKKYSIGLDIGTNSVGWAVITDEYKVPSKKFKVLGNTDRHSIKKNLIGALLFDSGETAEATRLKRTARRRYTRRKNRICYLQEIFSNEMAKVDDSFFHRLEESFLVEEDKKHERHPIFGNIVDEVAYHEKYPTIYHLRKKLVDSTDKADLRLIYLALAHMIKFRGHFLIEGDLNPDNSDVDKLFIQLVQTYNQLFEENPINASGVDAKAILSARLSKSRRLENLIAQLPGEKKNGLFGNLIALSLGLTPNFKSNFDLAEDAKLQLSKDTYDDDLDNLLAQIGDQYADLFLAAKNLSDAILLSDILRVNTEITKAPLSASMIKRYDEHHQDLTLLKALVRQQLPEKYKEIFFDQSKNGYAGYIDGGASQEEFYKFIKPILEKMDGTEELLVKLNREDLLRKQRTFDNGSIPHQIHLGELHAILRRQEDFYPFLKDNREKIEKILTFRIPYYVGPLARGNSRFAWMTRKSEETITPWNFEEVVDKGASAQSFIERMTNFDKNLPNEKVLPKHSLLYEYFTVYNELTKVKYVTEGMRKPAFLSGEQKKAIVDLLFKTNRKVTVKQLKEDYFKKIECFDSVEISGVEDRFNASLGTYHDLLKIIKDKDFLDNEENEDILEDIVLTLTLFEDREMIEERLKTYAHLFDDKVMKQLKRRRYTGWGRLSRKLINGIRDKQSGKTILDFLKSDGFANRNFMQLIHDDSLTFKEDIQKAQVSGQGDSLHEHIANLAGSPAIKKGILQTVKVVDELVKVMGRHKPENIVIEMARENQTTQKGQKNSRERMKRIEEGIKELGSQILKEHPVENTQLQNEKLYLYYLQNGRDMYVDQELDINRLSDYDVDHIVPQSFLKDDSIDNKVLTRSDKARGKSDNVPSEEVVKKMKNYWRQLLNAKLITQRKFDNLTKAERGGLSELDKAGFIKRQLVETRQITKHVAQILDSRMNTKYDENDKLIREVKVITLKSKLVSDFRKDFQFYKVREINNYHHAHDAYLNAVVGTALIKKYPKLESEFVYGDYKVYDVRKMIAKSEQEIGKATAKYFFYSNIMNFFKTEITLANGEIRKRPLIETNGETGEIVWDKGRDFATVRKVLSMPQVNIVKKTEVQTGGFSKESILPKRNSDKLIARKKDWDPKKYGGFDSPTVAYSVLVVAKVEKGKSKKLKSVKELLGITIMERSSFEKNPIDFLEAKGYKEVKKDLIIKLPKYSLFELENGRKRMLASAGELQKGNELALPSKYVNFLYLASHYEKLKGSPEDNEQKQLFVEQHKHYLDEIIEQISEFSKRVILADANLDKVLSAYNKHRDKPIREQAENIIHLFTLTNLGAPAAFKYFDTTIDRKRYTSTKEVLDATLIHQSITGLYETRIDLSQLGGDGGGSSGSSGSSGSSGSSGSSGGIPWLMKKPLQLTTLVPLQEYEERLLKQTMLTGSYKEKLQSLFLKYDALWQHWENQVGHRRIKPHHIATGTVNPRPQKQYPINPKAKASIQTVINDLLKQGVLIQQNSIMNTPVYPVPKPDGKWRMVLDYREVNKTIPLIAAQNQHSAGILSSIFRGKYKTTLDLSNGFWAHSITPESYWLTAFTWLGQQYCWTRLPQGFLNSPALFNADVVDLLKEVPNVQVYVDDIYISHDDPREHLEQLEKVFSLLLNAGYVVSLKKSEIAQHEVEFLGFNITKEGRGLTETFKQKLLNITPPRDLKQLQSILGKLNFARNFIPNFSELVKPLYNIIATAPGKYITWTTDNSQQLQNIISMLNSAENLEERNPEVRLIMKVNTSPSAGYIRFYNEFAKRPIMYLNYVYTKAEVKFTNTEKLLTTIHKGLIKALDLGMGQEILVYSPIVSMTKIQKTPLPERKALPIRWITWMSYLEDPRIQFHYDKTLPELQQVPTVTDDIIAKIKHPSEFSMVFYTDGSAIKHPNVNKSHNAGMGIAQVQFKPEFTVINTWSIPLGDHTAQLAEVAAVEFACKKALKIDGPVLIVTDSFYVAESVNKELPYWQSNGFFNNKKKPLKHVSKWKSIADCIQLKPDIIIIHEKGHQPTASTFHTEGNNLADKLATQGSYVVNAGKRTADGSEFEKRTADGSEFESPKKKAKVE

SEQ ID NO: 6357 - protein, 2183 aa, synthetic construct
MPAAKRVKLDGGDKKYSIGLDIGTNSVGWAVITDEYKVPSKKFKVLGNTDRHSIKKNLIGALLFDSGETAEATRLKRTARRRYTRRKNRICYLQEIFSNEMAKVDDSFFHRLEESFLVEEDKKHERHPIFGNIVDEVAYHEKYPTIYHLRKKLVDSTDKADLRLIYLALAHMIKFRGHFLIEGDLNPDNSDVDKLFIQLVQTYNQLFEENPINASGVDAKAILSARLSKSRRLENLIAQLPGEKKNGLFGNLIALSLGLTPNFKSNFDLAEDAKLQLSKDTYDDDLDNLLAQIGDQYADLFLAAKNLSDAILLSDILRVNTEITKAPLSASMIKRYDEHHQDLTLLKALVRQQLPEKYKEIFFDQSKNGYAGYIDGGASQEEFYKFIKPILEKMDGTEELLVKLNREDLLRKQRTFDNGSIPHQIHLGELHAILRRQEDFYPFLKDNREKIEKILTFRIPYYVGPLARGNSRFAWMTRKSEETITPWNFEEVVDKGASAQSFIERMTNFDKNLPNEKVLPKHSLLYEYFTVYNELTKVKYVTEGMRKPAFLSGEQKKAIVDLLFKTNRKVTVKQLKEDYFKKIECFDSVEISGVEDRFNASLGTYHDLLKIIKDKDFLDNEENEDILEDIVLTLTLFEDREMIEERLKTYAHLFDDKVMKQLKRRRYTGWGRLSRKLINGIRDKQSGKTILDFLKSDGFANRNFMQLIHDDSLTFKEDIQKAQVSGQGDSLHEHIANLAGSPAIKKGILQTVKVVDELVKVMGRHKPENIVIEMARENQTTQKGQKNSRERMKRIEEGIKELGSQILKEHPVENTQLQNEKLYLYYLQNGRDMYVDQELDINRLSDYDVDHIVPQSFLKDDSIDNKVLTRSDKARGKSDNVPSEEVVKKMKNYWRQLLNAKLITQRKFDNLTKAERGGLSELDKAGFIKRQLVETRQITKHVAQILDSRMNTKYDENDKLIREVKVITLKSKLVSDFRKDFQFYKVREINNYHHAHDAYLNAVVGTALIKKYPKLESEFVYGDYKVYDVRKMIAKSEQEIGKATAKYFFYSNIMNFFKTEITLANGEIRKRPLIETNGETGEIVWDKGRDFATVRKVLSMPQVNIVKKTEVQTGGFSKESILPKRNSDKLIARKKDWDPKKYGGFDSPTVAYSVLVVAKVEKGKSKKLKSVKELLGITIMERSSFEKNPIDFLEAKGYKEVKKDLIIKLPKYSLFELENGRKRMLASAGELQKGNELALPSKYVNFLYLASHYEKLKGSPEDNEQKQLFVEQHKHYLDEIIEQISEFSKRVILADANLDKVLSAYNKHRDKPIREQAENIIHLFTLTNLGAPAAFKYFDTTIDRKRYTSTKEVLDATLIHQSITGLYETRIDLSQLGGDGGGSSGSSGSSGSSGSSGSSGGMDPLQLLQPLEAEIKGTKLKAHWNSGATITCVPQAFLEEEVPIKNIWIKTIHGEKEQPVYYLTFKIQGRKVEAEVISSPYDYILVSPSDIPWLMKKPLQLTTLVPLQEYEERLLKQTMLTGSYKEKLQSLFLKYDALWQHWENQVGHRRIKPHHIATGTVNPRPQKQYPINPKAKASIQTVINDLLKQGVLIQQNSIMNTPVYPVPKPDGKWRMVLDYREVNKTIPLIAAQNQHSAGILSSIFRGKYKTTLDLSNGFWAHSITPESYWLTAFTWLGQQYCWTRLPQGFLNSPALFNADVVDLLKEVPNVQVYVDDIYISHDDPREHLEQLEKVFSLLLNAGYVVSLKKSEIAQHEVEFLGFNITKEGRGLTETFKQKLLNITPPRDLKQLQSILGLLNFARNFIPNFSELVKPLYNIIATAPGKYITWTTDNSQQLQNIISMLNSAENLEERNPEVRLIMKVNTSPSAGYIRFYNEFAKRPIMYLNYVYTKAEVKFTNTEKLLTTIHKGLIKALDLGMGQEILVYSPIVSMTKIQKTPLPERKALPIRWITWMSYLEDPRIQFHYDKTLPELQQVPTVTDDIIAKIKHPSEFSMVFYTDGSAIKHPNVNKSHNAGMGIAQVQFKPEFTVINTWSIPLGDHTAQLAEVAAVEFACKKALKIDGPVLIVTDSFYVAESVNKELPYWQSNGFFNNKKKPLKHVSKWKSIADCIQLKPDIIIIHEKGHQPTASTFHTEGNNLADKLATQGSYVVNAGKRTADGSEFEKRTADGSEFESPKKKAKVE

SEQ ID NO: 6358 - protein, 2101 aa, synthetic construct
MPAAKRVKLDGGDKKYSIGLDIGTNSVGWAVITDEYKVPSKKFKVLGNTDRHSIKKNLIGALLFDSGETAEATRLKRTARRRYTRRKNRICYLQEIFSNEMAKVDDSFFHRLEESFLVEEDKKHERHPIFGNIVDEVAYHEKYPTIYHLRKKLVDSTDKADLRLIYLALAHMIKFRGHFLIEGDLNPDNSDVDKLFIQLVQTYNQLFEENPINASGVDAKAILSARLSKSRRLENLIAQLPGEKKNGLFGNLIALSLGLTPNFKSNFDLAEDAKLQLSKDTYDDDLDNLLAQIGDQYADLFLAAKNLSDAILLSDILRVNTEITKAPLSASMIKRYDEHHQDLTLLKALVRQQLPEKYKEIFFDQSKNGYAGYIDGGASQEEFYKFIKPILEKMDGTEELLVKLNREDLLRKQRTFDNGSIPHQIHLGELHAILRRQEDFYPFLKDNREKIEKILTFRIPYYVGPLARGNSRFAWMTRKSEETITPWNFEEVVDKGASAQSFIERMTNFDKNLPNEKVLPKHSLLYEYFTVYNELTKVKYVTEGMRKPAFLSGEQKKAIVDLLFKTNRKVTVKQLKEDYFKKIECFDSVEISGVEDRFNASLGTYHDLLKIIKDKDFLDNEENEDILEDIVLTLTLFEDREMIEERLKTYAHLFDDKVMKQLKRRRYTGWGRLSRKLINGIRDKQSGKTILDFLKSDGFANRNFMQLIHDDSLTFKEDIQKAQVSGQGDSLHEHIANLAGSPAIKKGILQTVKVVDELVKVMGRHKPENIVIEMARENQTTQKGQKNSRERMKRIEEGIKELGSQILKEHPVENTQLQNEKLYLYYLQNGRDMYVDQELDINRLSDYDVDHIVPQSFLKDDSIDNKVLTRSDKARGKSDNVPSEEVVKKMKNYWRQLLNAKLITQRKFDNLTKAERGGLSELDKAGFIKRQLVETRQITKHVAQILDSRMNTKYDENDKLIREVKVITLKSKLVSDFRKDFQFYKVREINNYHHAHDAYLNAVVGTALIKKYPKLESEFVYGDYKVYDVRKMIAKSEQEIGKATAKYFFYSNIMNFFKTEITLANGEIRKRPLIETNGETGEIVWDKGRDFATVRKVLSMPQVNIVKKTEVQTGGFSKESILPKRNSDKLIARKKDWDPKKYGGFDSPTVAYSVLVVAKVEKGKSKKLKSVKELLGITIMERSSFEKNPIDFLEAKGYKEVKKDLIIKLPKYSLFELENGRKRMLASAGELQKGNELALPSKYVNFLYLASHYEKLKGSPEDNEQKQLFVEQHKHYLDEIIEQISEFSKRVILADANLDKVLSAYNKHRDKPIREQAENIIHLFTLTNLGAPAAFKYFDTTIDRKRYTSTKEVLDATLIHQSITGLYETRIDLSQLGGDGGGSSGSSGSSGSSGSSGSSGGVLNLEEEYRLHEKPVPSSIDPSWLQLFPTVWAERAGMGLANQVPPVVVELRSGASPVAVRQYPMSKEAREGIRPHIQRFLDLGVLVPCQSPWNTPLLPVKKPGTNDYRPVQDLREINKRVQDIHPTVPNPYNLLSSLPPSHTWYSVLDLKDAFFCLKLHPNSQPLFAFEWRDPEKGNTGQLTWTRLPQGFKNSPTLFDEALHRDLAPFRALNPQVVLLQYVDDLLVAAPTYRDCKEGTQKLLQELSKLGYRVSAKKAQLCQKEVTYLGYLLKEGKRWLTPARKATVMKIPPPTTPRQVREFLGTAGFCRLWIPGFASLAAPLYPLTKESIPFIWTEEHQKAFDRIKEALLSAPALALPDLTKPFTLYVDERAGVARGVLTQTLGPWRRPVAYLSKKLDPVASGWPTCLKAVAAVALLLKDADKLTLGQNVTVIASHSLESIVRQPPDRWMTNARMTHYQSLLLNERVSFAPPAVLNPATLLPVESEATPVHRCSEILAEETGTRRDLKDQPLPGVPAWYTDGSSFIAEGKRRAGAAIVDGKRTVWASSLPEGTSAQKAELVALTQALRLAEGKDINIYTDSRYAFATAHIHGAIYKQRGLLTSAGKDIKNKEEILALLEAIHLPKRVAIIHCPGHQKGNDPVATGNRRADEAAKQAALSTRVLAETTKPAGKRTADGSEFEKRTADGSEFESPKKKAKVE

SEQ ID NO: 6359 - protein, 2103 aa, synthetic construct
MPAAKRVKLDGGDKKYSIGLDIGTNSVGWAVITDEYKVPSKKFKVLGNTDRHSIKKNLIGALLFDSGETAEATRLKRTARRRYTRRKNRICYLQEIFSNEMAKVDDSFFHRLEESFLVEEDKKHERHPIFGNIVDEVAYHEKYPTIYHLRKKLVDSTDKADLRLIYLALAHMIKFRGHFLIEGDLNPDNSDVDKLFIQLVQTYNQLFEENPINASGVDAKAILSARLSKSRRLENLIAQLPGEKKNGLFGNLIALSLGLTPNFKSNFDLAEDAKLQLSKDTYDDDLDNLLAQIGDQYADLFLAAKNLSDAILLSDILRVNTEITKAPLSASMIKRYDEHHQDLTLLKALVRQQLPEKYKEIFFDQSKNGYAGYIDGGASQEEFYKFIKPILEKMDGTEELLVKLNREDLLRKQRTFDNGSIPHQIHLGELHAILRRQEDFYPFLKDNREKIEKILTFRIPYYVGPLARGNSRFAWMTRKSEETITPWNFEEVVDKGASAQSFIERMTNFDKNLPNEKVLPKHSLLYEYFTVYNELTKVKYVTEGMRKPAFLSGEQKKAIVDLLFKTNRKVTVKQLKEDYFKKIECFDSVEISGVEDRFNASLGTYHDLLKIIKDKDFLDNEENEDILEDIVLTLTLFEDREMIEERLKTYAHLFDDKVMKQLKRRRYTGWGRLSRKLINGIRDKQSGKTILDFLKSDGFANRNFMQLIHDDSLTFKEDIQKAQVSGQGDSLHEHIANLAGSPAIKKGILQTVKVVDELVKVMGRHKPENIVIEMARENQTTQKGQKNSRERMKRIEEGIKELGSQILKEHPVENTQLQNEKLYLYYLQNGRDMYVDQELDINRLSDYDVDHIVPQSFLKDDSIDNKVLTRSDKARGKSDNVPSEEVVKKMKNYWRQLLNAKLITQRKFDNLTKAERGGLSELDKAGFIKRQLVETRQITKHVAQILDSRMNTKYDENDKLIREVKVITLKSKLVSDFRKDFQFYKVREINNYHHAHDAYLNAVVGTALIKKYPKLESEFVYGDYKVYDVRKMIAKSEQEIGKATAKYFFYSNIMNFFKTEITLANGEIRKRPLIETNGETGEIVWDKGRDFATVRKVLSMPQVNIVKKTEVQTGGFSKESILPKRNSDKLIARKKDWDPKKYGGFDSPTVAYSVLVVAKVEKGKSKKLKSVKELLGITIMERSSFEKNPIDFLEAKGYKEVKKDLIIKLPKYSLFELENGRKRMLASAGELQKGNELALPSKYVNFLYLASHYEKLKGSPEDNEQKQLFVEQHKHYLDEIIEQISEFSKRVILADANLDKVLSAYNKHRDKPIREQAENIIHLFTLTNLGAPAAFKYFDTTIDRKRYTSTKEVLDATLIHQSITGLYETRIDLSQLGGDGGGSSGSSGSSGSSGSSGSSGGTLNIEDEYRLHETSKEPDVPLGSTWLSDFPQAWAETGGMGLAVRQAPLIIPLKATSTPVSIKQYPMSQEARLGIKPHIQRLLDQGILVPCQSPWNTPLLPVKKPGTNDYRPVQDLREVNKRVEDIHPTVPNPYNLLSGLPPSHQWYTVLDLKDAFFCLRLHPTSQPLFAFEWRDPEMGISGQLTWTRLPQGFKNSPTLFNEALHRDLADFRIQHPDLILLQYVDDLLLAATSEQDCQRGTRALLQTLGNLGYRASAKKAQICQKQVKYLGYLLKEGQRWLTEARKETVMGQPTPKTPRQLREFLGTAGFCRLWIPGFAEMAAPLYPLTKPGTLFNWGPDQQKAYQEIKQALLTAPALGLPDLTKPFELFVDEKQGYAKGVLTQKLGPWRRPVAYLSKKLDPVAAGWPPCLRMVAAIAVLTKDAGKLTMGQPLVILAPHAVEALVKQPPDRWLSNARMTHYQAMLLDTDRVQFGPVVALNPATLLPLPEKEAPHDCLEILAETHGTRPDLTDQPIPDADYTWYTDGSSFLQEGQRRAGAAVTTETEVIWARALPAGTSAQRAELIALTQALKMAEGKKLNVYTDSRYAFATAHVHGEIYRRRGWLTSEGREIKNKNEILALLKALFLPKRLSIIHCPGHQKGNSAEARGNRMADQAAREAAMKAVLETSTLLAGKRTADGSEFEKRTADGSEFESPKKKAKVE

SEQ ID NO: 6360 - protein, 2096 aa, synthetic construct
MPAAKRVKLDGGDKKYSIGLDIGTNSVGWAVITDEYKVPSKKFKVLGNTDRHSIKKNLIGALLFDSGETAEATRLKRTARRRYTRRKNRICYLQEIFSNEMAKVDDSFFHRLEESFLVEEDKKHERHPIFGNIVDEVAYHEKYPTIYHLRKKLVDSTDKADLRLIYLALAHMIKFRGHFLIEGDLNPDNSDVDKLFIQLVQTYNQLFEENPINASGVDAKAILSARLSKSRRLENLIAQLPGEKKNGLFGNLIALSLGLTPNFKSNFDLAEDAKLQLSKDTYDDDLDNLLAQIGDQYADLFLAAKNLSDAILLSDILRVNTEITKAPLSASMIKRYDEHHQDLTLLKALVRQQLPEKYKEIFFDQSKNGYAGYIDGGASQEEFYKFIKPILEKMDGTEELLVKLNREDLLRKQRTFDNGSIPHQIHLGELHAILRRQEDFYPFLKDNREKIEKILTFRIPYYVGPLARGNSRFAWMTRKSEETITPWNFEEVVDKGASAQSFIERMTNFDKNLPNEKVLPKHSLLYEYFTVYNELTKVKYVTEGMRKPAFLSGEQKKAIVDLLFKTNRKVTVKQLKEDYFKKIECFDSVEISGVEDRFNASLGTYHDLLKIIKDKDFLDNEENEDILEDIVLTLTLFEDREMIEERLKTYAHLFDDKVMKQLKRRRYTGWGRLSRKLINGIRDKQSGKTILDFLKSDGFANRNFMQLIHDDSLTFKEDIQKAQVSGQGDSLHEHIANLAGSPAIKKGILQTVKVVDELVKVMGRHKPENIVIEMARENQTTQKGQKNSRERMKRIEEGIKELGSQILKEHPVENTQLQNEKLYLYYLQNGRDMYVDQELDINRLSDYDVDHIVPQSFLKDDSIDNKVLTRSDKARGKSDNVPSEEVVKKMKNYWRQLLNAKLITQRKFDNLTKAERGGLSELDKAGFIKRQLVETRQITKHVAQILDSRMNTKYDENDKLIREVKVITLKSKLVSDFRKDFQFYKVREINNYHHAHDAYLNAVVGTALIKKYPKLESEFVYGDYKVYDVRKMIAKSEQEIGKATAKYFFYSNIMNFFKTEITLANGEIRKRPLIETNGETGEIVWDKGRDFATVRKVLSMPQVNIVKKTEVQTGGFSKESILPKRNSDKLIARKKDWDPKKYGGFDSPTVAYSVLVVAKVEKGKSKKLKSVKELLGITIMERSSFEKNPIDFLEAKGYKEVKKDLIIKLPKYSLFELENGRKRMLASAGELQKGNELALPSKYVNFLYLASHYEKLKGSPEDNEQKQLFVEQHKHYLDEIIEQISEFSKRVILADANLDKVLSAYNKHRDKPIREQAENIIHLFTLTNLGAPAAFKYFDTTIDRKRYTSTKEVLDATLIHQSITGLYETRIDLSQLGGDGGEAAAKGGTVSLQDEHRLFDIPVTTSLPDVWLQDFPQAWAETGGLGRAKCQAPIIIDLKPTAVPVSIKQYPMSLEAHMGIRQHIIKFLELGVLRPCRSPWNTPLLPVKKPGTQDYRPVQDLREINKRTVDIHPTVPNPYNLLSTLKPDYSWYTVLDLKDAFFCLPLAPQSQELFAFEWKDPERGISGQLTWTRLPQGFKNSPTLFNEALHRDLTDFRTQHPEVTLLQYVDDLLLAAPTKKACTQGTRHLLQELGEKGYRASAKKAQICQTKVTYLGYILSEGKRWLTPGRIETVARIPPPRNPREVREFLGTAGFCRLWIPGFAELAAPLYALTKPSTPFTWQTEHQLAFEALKKALLSAPALGLPDTSKPFTLFLDERQGIAKGVLTQKLGPWKRPVAYLSKKLDPVAAGWPPCLRIMAATAMLVKDSAKLTLGQPLTVITPHTLEAIVRQPPDRWITNARLTHYQALLLDTDRVQFGPPVTLNPATLLPVPENQPSPHDCRQVLAETHGTREDLKDQELPDADHTWYTDGSSYLDSGTRRAGAAVVDGHNTIWAQSLPPGTSAQKAELIALTKALELSKGKKANIYTDSRYAFATAHTHGSIYERRGWLTSEGKEIKNKAEIIALLKALFLPQEVAIIHCPGHQKGQDPVAVGNRQADRVARQAAMAEVLTLATEPDNTSHITAGKRTADGSEFEKRTADGSEFESPKKKAKVE

SEQ ID NO: 6361 - protein, 2167 aa, synthetic construct
MPAAKRVKLDGGDKKYSIGLDIGTNSVGWAVITDEYKVPSKKFKVLGNTDRHSIKKNLIGALLFDSGETAEATRLKRTARRRYTRRKNRICYLQEIFSNEMAKVDDSFFHRLEESFLVEEDKKHERHPIFGNIVDEVAYHEKYPTIYHLRKKLVDSTDKADLRLIYLALAHMIKFRGHFLIEGDLNPDNSDVDKLFIQLVQTYNQLFEENPINASGVDAKAILSARLSKSRRLENLIAQLPGEKKNGLFGNLIALSLGLTPNFKSNFDLAEDAKLQLSKDTYDDDLDNLLAQIGDQYADLFLAAKNLSDAILLSDILRVNTEITKAPLSASMIKRYDEHHQDLTLLKALVRQQLPEKYKEIFFDQSKNGYAGYIDGGASQEEFYKFIKPILEKMDGTEELLVKLNREDLLRKQRTFDNGSIPHQIHLGELHAILRRQEDFYPFLKDNREKIEKILTFRIPYYVGPLARGNSRFAWMTRKSEETITPWNFEEVVDKGASAQSFIERMTNFDKNLPNEKVLPKHSLLYEYFTVYNELTKVKYVTEGMRKPAFLSGEQKKAIVDLLFKTNRKVTVKQLKEDYFKKIECFDSVEISGVEDRFNASLGTYHDLLKIIKDKDFLDNEENEDILEDIVLTLTLFEDREMIEERLKTYAHLFDDKVMKQLKRRRYTGWGRLSRKLINGIRDKQSGKTILDFLKSDGFANRNFMQLIHDDSLTFKEDIQKAQVSGQGDSLHEHIANLAGSPAIKKGILQTVKVVDELVKVMGRHKPENIVIEMARENQTTQKGQKNSRERMKRIEEGIKELGSQILKEHPVENTQLQNEKLYLYYLQNGRDMYVDQELDINRLSDYDVDHIVPQSFLKDDSIDNKVLTRSDKARGKSDNVPSEEVVKKMKNYWRQLLNAKLITQRKFDNLTKAERGGLSELDKAGFIKRQLVETRQITKHVAQILDSRMNTKYDENDKLIREVKVITLKSKLVSDFRKDFQFYKVREINNYHHAHDAYLNAVVGTALIKKYPKLESEFVYGDYKVYDVRKMIAKSEQEIGKATAKYFFYSNIMNFFKTEITLANGEIRKRPLIETNGETGEIVWDKGRDFATVRKVLSMPQVNIVKKTEVQTGGFSKESILPKRNSDKLIARKKDWDPKKYGGFDSPTVAYSVLVVAKVEKGKSKKLKSVKELLGITIMERSSFEKNPIDFLEAKGYKEVKKDLIIKLPKYSLFELENGRKRMLASAGELQKGNELALPSKYVNFLYLASHYEKLKGSPEDNEQKQLFVEQHKHYLDEIIEQISEFSKRVILADANLDKVLSAYNKHRDKPIREQAENIIHLFTLTNLGAPAAFKYFDTTIDRKRYTSTKEVLDATLIHQSITGLYETRIDLSQLGGDGGEAAAKGGMDLLKPLTVERKGVKIKGYWNSQADITCVPKDLLQGEEPVRQQNVTTIHGTQEGDVYYVNLKIDGRRINTEVIGTTLDYAIITPGDVPWILKKPLELTIKLDLEEQQGTLLNNSILSKKGKEELKQLFEKYSALWQSWENQVGHRRIRPHKIATGTVKPTPQKQYHINPKAKPDIQIVINDLLKQGVLIQKESTMNTPVYPVPKPNGRWRMVLDYRAVNKVTPLIAVQNQHSYGILGSLFKGRYKTTIDLSNGFWAHPIVPEDYWITAFTWQGKQYCWTVLPQGFLNSPGLFNGDVVDLLQGIPNVEVYVDDVYISHDSEKEHLEYLDILFNRLKEAGYIISLKKSNIANSIVDFLGFQITNEGRGLTDTFKEKLENITAPTTLKQLQSILGLLNFARNFIPDFTELIAPLYALIPKSPKNYVPWQIEHSTTLETLITKLNGAEYLQGRKGDKTLIMKVNASYTTGYIRYYNEGEKKPISYVSIVFSKTELKFTELEKLLTTVHKGLLKALDLSMGQNIHVYSPIVSMQNIQKTPQTAKKALASRWLSWLSYLEDPRIRFFYDPQMPALKDLPAVDTGKDNKKHPSNFQHIFYTDGSAITSPTKEGHLNAGMGIVYFINKDGNLQKQQEWSISLGNHTAQFAEIAAFEFALKKCLPLGGNILVVTDSNYVAKAYNEELDVWASNGFVNNRKKPLKHISKWKSVADLKRLRPDVVVTHEPGHQKLDSSPHAYGNNLADQLATQASFKVHAGKRTADGSEFEKRTADGSEFESPKKKAKVE

SEQ ID NO: 6362 - protein, 2121 aa, synthetic construct
MPAAKRVKLDGGDKKYSIGLDIGTNSVGWAVITDEYKVPSKKFKVLGNTDRHSIKKNLIGALLFDSGETAEATRLKRTARRRYTRRKNRICYLQEIFSNEMAKVDDSFFHRLEESFLVEEDKKHERHPIFGNIVDEVAYHEKYPTIYHLRKKLVDSTDKADLRLIYLALAHMIKFRGHFLIEGDLNPDNSDVDKLFIQLVQTYNQLFEENPINASGVDAKAILSARLSKSRRLENLIAQLPGEKKNGLFGNLIALSLGLTPNFKSNFDLAEDAKLQLSKDTYDDDLDNLLAQIGDQYADLFLAAKNLSDAILLSDILRVNTEITKAPLSASMIKRYDEHHQDLTLLKALVRQQLPEKYKEIFFDQSKNGYAGYIDGGASQEEFYKFIKPILEKMDGTEELLVKLNREDLLRKQRTFDNGSIPHQIHLGELHAILRRQEDFYPFLKDNREKIEKILTFRIPYYVGPLARGNSRFAWMTRKSEETITPWNFEEVVDKGASAQSFIERMTNFDKNLPNEKVLPKHSLLYEYFTVYNELTKVKYVTEGMRKPAFLSGEQKKAIVDLLFKTNRKVTVKQLKEDYFKKIECFDSVEISGVEDRFNASLGTYHDLLKIIKDKDFLDNEENEDILEDIVLTLTLFEDREMIEERLKTYAHLFDDKVMKQLKRRRYTGWGRLSRKLINGIRDKQSGKTILDFLKSDGFANRNFMQLIHDDSLTFKEDIQKAQVSGQGDSLHEHIANLAGSPAIKKGILQTVKVVDELVKVMGRHKPENIVIEMARENQTTQKGQKNSRERMKRIEEGIKELGSQILKEHPVENTQLQNEKLYLYYLQNGRDMYVDQELDINRLSDYDVDHIVPQSFLKDDSIDNKVLTRSDKARGKSDNVPSEEVVKKMKNYWRQLLNAKLITQRKFDNLTKAERGGLSELDKAGFIKRQLVETRQITKHVAQILDSRMNTKYDENDKLIREVKVITLKSKLVSDFRKDFQFYKVREINNYHHAHDAYLNAVVGTALIKKYPKLESEFVYGDYKVYDVRKMIAKSEQEIGKATAKYFFYSNIMNFFKTEITLANGEIRKRPLIETNGETGEIVWDKGRDFATVRKVLSMPQVNIVKKTEVQTGGFSKESILPKRNSDKLIARKKDWDPKKYGGFDSPTVAYSVLVVAKVEKGKSKKLKSVKELLGITIMERSSFEKNPIDFLEAKGYKEVKKDLIIKLPKYSLFELENGRKRMLASAGELQKGNELALPSKYVNFLYLASHYEKLKGSPEDNEQKQLFVEQHKHYLDEIIEQISEFSKRVILADANLDKVLSAYNKHRDKPIREQAENIIHLFTLTNLGAPAAFKYFDTTIDRKRYTSTKEVLDATLIHQSITGLYETRIDLSQLGGDGGEAAAKGGLLGRDLLTKLKAQIQFSTEGPQVTWEDRPAMCLVLNLEEEYRLHEKPVPPSIDPSWLQLFPMVWAEKAGMGLANQVPPVVVELKSDASPVAVRQYPMSKEAREGIRPHIQRFLDLGILVPCQSPWNTPLLPVKKPGTNDYRPVQDLREVNKRVQDIHPTVPNPYNLLSSLPPSHTWYSVLDLKDAFFCLKLHPNSQPLFAFEWRDPEKGNTGQLTWTRLPQGFKNSPTLFNEALHRDLASFRALNPQVVMLQYVDDLLVAAPTYRDCKEGTRRLLQELSKLGYRVSAKKAQLCREEVTYLGYLLKGGKRWLTPARKATVMKIPTPTTPRQVREFLGTAGFCRLWIPGFASLAAPLYPLTRPKVPFTWTEAHQEAFGRIKEALLSAPALALPDLTKPFALYVDEKEGVARGVLTQTLGPWRRPVAYLSKKLDPVASGWPTCLKAIAAVALLLKDADKLTLGQNVLVIAPHNLESIVRQPPDRWMTNARMTHYQSLLLNERVSFAPPAILNPATLLPVESDDTPIHICSEILAEETGTRPDLRDQPLPGVPAWYTDGSSFIMDGRRQAGAAIVDNKRTVWASNLPEGTSAQKAELIALTQALRLAEGKSINIYTDSRYAFATAHVHGAIYKQRGWLTSAGKDIKNKEEILALLEAIHLPKRVAIIHCPGHQRGTDPVATGNRKADEAAKQAAQSTRILTETTKNAGKRTADGSEFEKRTADGSEFESPKKKAKVE

SEQ ID NO: 6363 - protein, 2212 aa, synthetic construct
MPAAKRVKLDGGDKKYSIGLDIGTNSVGWAVITDEYKVPSKKFKVLGNTDRHSIKKNLIGALLFDSGETAEATRLKRTARRRYTRRKNRICYLQEIFSNEMAKVDDSFFHRLEESFLVEEDKKHERHPIFGNIVDEVAYHEKYPTIYHLRKKLVDSTDKADLRLIYLALAHMIKFRGHFLIEGDLNPDNSDVDKLFIQLVQTYNQLFEENPINASGVDAKAILSARLSKSRRLENLIAQLPGEKKNGLFGNLIALSLGLTPNFKSNFDLAEDAKLQLSKDTYDDDLDNLLAQIGDQYADLFLAAKNLSDAILLSDILRVNTEITKAPLSASMIKRYDEHHQDLTLLKALVRQQLPEKYKEIFFDQSKNGYAGYIDGGASQEEFYKFIKPILEKMDGTEELLVKLNREDLLRKQRTFDNGSIPHQIHLGELHAILRRQEDFYPFLKDNREKIEKILTFRIPYYVGPLARGNSRFAWMTRKSEETITPWNFEEVVDKGASAQSFIERMTNFDKNLPNEKVLPKHSLLYEYFTVYNELTKVKYVTEGMRKPAFLSGEQKKAIVDLLFKTNRKVTVKQLKEDYFKKIECFDSVEISGVEDRFNASLGTYHDLLKIIKDKDFLDNEENEDILEDIVLTLTLFEDREMIEERLKTYAHLFDDKVMKQLKRRRYTGWGRLSRKLINGIRDKQSGKTILDFLKSDGFANRNFMQLIHDDSLTFKEDIQKAQVSGQGDSLHEHIANLAGSPAIKKGILQTVKVVDELVKVMGRHKPENIVIEMARENQTTQKGQKNSRERMKRIEEGIKELGSQILKEHPVENTQLQNEKLYLYYLQNGRDMYVDQELDINRLSDYDVDHIVPQSFLKDDSIDNKVLTRSDKARGKSDNVPSEEVVKKMKNYWRQLLNAKLITQRKFDNLTKAERGGLSELDKAGFIKRQLVETRQITKHVAQILDSRMNTKYDENDKLIREVKVITLKSKLVSDFRKDFQFYKVREINNYHHAHDAYLNAVVGTALIKKYPKLESEFVYGDYKVYDVRKMIAKSEQEIGKATAKYFFYSNIMNFFKTEITLANGEIRKRPLIETNGETGEIVWDKGRDFATVRKVLSMPQVNIVKKTEVQTGGFSKESILPKRNSDKLIARKKDWDPKKYGGFDSPTVAYSVLVVAKVEKGKSKKLKSVKELLGITIMERSSFEKNPIDFLEAKGYKEVKKDLIIKLPKYSLFELENGRKRMLASAGELQKGNELALPSKYVNFLYLASHYEKLKGSPEDNEQKQLFVEQHKHYLDEIIEQISEFSKRVILADANLDKVLSAYNKHRDKPIREQAENIIHLFTLTNLGAPAAFKYFDTTIDRKRYTSTKEVLDATLIHQSITGLYETRIDLSQLGGDGGEAAAKGGTLGDQGSRGSDPLPEPRVTLTVEGIPTEFLVNTGAEHSVLTKPMGKMGSKRTVVAGATGSKVYPWTTKRLLKIGQKQVTHSFLVIPECPAPLLGRDLLTKLKAQIQFSTEGPQVTWEDRPAMCLVLNLEEEYRLHEKPVPPSIDPSWLQLFPMVWAEKAGMGLANQVPPVVVELKSDASPVAVRQYPMSKEAREGIRPHIQRFLDLGILVPCQSPWNTPLLPVKKPGTNDYRPVQDLREVNKRVQDIHPTVPNPYNLLSSLPPSHTWYSVLDLKDAFFCLKLHPNSQPLFAFEWRDPEKGNTGQLTWTRLPQGFKNSPTLFNEALHRDLASFRALNPQVVMLQYVDDLLVAAPTYRDCKEGTRRLLQELSKLGYRVSAKKAQLCREEVTYLGYLLKGGKRWLTPARKATVMKIPTPTTPRQVREFLGTAGFCRLWIPGFASLAAPLYPLTRPKVPFTWTEAHQEAFGRIKEALLSAPALALPDLTKPFALYVDEKEGVARGVLTQTLGPWRRPVAYLSKKLDPVASGWPTCLKAIAAVALLLKDADKLTLGQNVLVIAPHNLESIVRQPPDRWMTNARMTHYQSLLLNERVSFAPPAILNPATLLPVESDDTPIHICSEILAEETGTRPDLRDQPLPGVPAWYTDGSSFIMDGRRQAGAAIVDNKRTVWASNLPEGTSAQKAELIALTQALRLAEGKSINIYTDSRYAFATAHVHGAIYKQRGWLTSAGKDIKNKEEILALLEAIHLPKRVAIIHCPGHQRGTDPVATGNRKADEAAKQAAQSTRILTETTKNAGKRTADGSEFEKRTADGSEFESPKKKAKVE

SEQ ID NO: 6364 - protein, 2212 aa, synthetic construct
MPAAKRVKLDGGDKKYSIGLDIGTNSVGWAVITDEYKVPSKKFKVLGNTDRHSIKKNLIGALLFDSGETAEATRLKRTARRRYTRRKNRICYLQEIFSNEMAKVDDSFFHRLEESFLVEEDKKHERHPIFGNIVDEVAYHEKYPTIYHLRKKLVDSTDKADLRLIYLALAHMIKFRGHFLIEGDLNPDNSDVDKLFIQLVQTYNQLFEENPINASGVDAKAILSARLSKSRRLENLIAQLPGEKKNGLFGNLIALSLGLTPNFKSNFDLAEDAKLQLSKDTYDDDLDNLLAQIGDQYADLFLAAKNLSDAILLSDILRVNTEITKAPLSASMIKRYDEHHQDLTLLKALVRQQLPEKYKEIFFDQSKNGYAGYIDGGASQEEFYKFIKPILEKMDGTEELLVKLNREDLLRKQRTFDNGSIPHQIHLGELHAILRRQEDFYPFLKDNREKIEKILTFRIPYYVGPLARGNSRFAWMTRKSEETITPWNFEEVVDKGASAQSFIERMTNFDKNLPNEKVLPKHSLLYEYFTVYNELTKVKYVTEGMRKPAFLSGEQKKAIVDLLFKTNRKVTVKQLKEDYFKKIECFDSVEISGVEDRFNASLGTYHDLLKIIKDKDFLDNEENEDILEDIVLTLTLFEDREMIEERLKTYAHLFDDKVMKQLKRRRYTGWGRLSRKLINGIRDKQSGKTILDFLKSDGFANRNFMQLIHDDSLTFKEDIQKAQVSGQGDSLHEHIANLAGSPAIKKGILQTVKVVDELVKVMGRHKPENIVIEMARENQTTQKGQKNSRERMKRIEEGIKELGSQILKEHPVENTQLQNEKLYLYYLQNGRDMYVDQELDINRLSDYDVDHIVPQSFLKDDSIDNKVLTRSDKARGKSDNVPSEEVVKKMKNYWRQLLNAKLITQRKFDNLTKAERGGLSELDKAGFIKRQLVETRQITKHVAQILDSRMNTKYDENDKLIREVKVITLKSKLVSDFRKDFQFYKVREINNYHHAHDAYLNAVVGTALIKKYPKLESEFVYGDYKVYDVRKMIAKSEQEIGKATAKYFFYSNIMNFFKTEITLANGEIRKRPLIETNGETGEIVWDKGRDFATVRKVLSMPQVNIVKKTEVQTGGFSKESILPKRNSDKLIARKKDWDPKKYGGFDSPTVAYSVLVVAKVEKGKSKKLKSVKELLGITIMERSSFEKNPIDFLEAKGYKEVKKDLIIKLPKYSLFELENGRKRMLASAGELQKGNELALPSKYVNFLYLASHYEKLKGSPEDNEQKQLFVEQHKHYLDEIIEQISEFSKRVILADANLDKVLSAYNKHRDKPIREQAENIIHLFTLTNLGAPAAFKYFDTTIDRKRYTSTKEVLDATLIHQSITGLYETRIDLSQLGGDGGEAAAKGGTLGDQGSRGSDPLPEPRVTLTVEGIPTEFLVNTGAEHSVLTKPMGKMGSKRTVVAGATGSKVYPWTTKRLLKIGQKQVTHSFLVIPECPAPLLGRDLLTKLKAQIQFSTEGPQVTWEDRPAMCLVLNLEEEYRLHEKPVPPSIDPSWLQLFPMVWAEKAGMGLANQVPPVVVELKSDASPVAVRQYPMSKEAREGIRPHIQRFLDLGILVPCQSPWNTPLLPVKKPGTNDYRPVQDLREVNKRVQDIHPTVPNPYNLLSSLPPSHTWYSVLDLKDAFFCLKLHPNSQPLFAFEWRDPEKGNTGQLTWTRLPQGFKNSPTLFNEALHRDLASFRALNPQVVMLQYVDDLLVAAPTYRDCKEGTRRLLQELSKLGYRVSAKKAQLCREEVTYLGYLLKGGKRWLTPARKATVMKIPTPTTPRQVREFLGKAGFCRLFIPGFASLAAPLYPLTRPKVPFTWTEAHQEAFGRIKEALLSAPALALPDLTKPFALYVDEKEGVARGVLTQTLGPWRRPVAYLSKKLDPVASGWPTCLKAIAAVALLLKDADKLTLGQNVLVIAPHNLESIVRQPPDRWMTNARMTHYQSLLLNERVSFAPPAILNPATLLPVESDDTPIHICSEILAEETGTRPDLRDQPLPGVPAWYTDGSSFIMDGRRQAGAAIVDNKRTVWASNLPEGTSAQKAELIALTQALRLAEGKSINIYTDSRYAFATAHVHGAIYKQRGWLTSAGKDIKNKEEILALLEAIHLPKRVAIIHCPGHQRGTDPVATGNRKADEAAKQAAQSTRILTETTKNAGKRTADGSEFEKRTADGSEFESPKKKAKVE

SEQ ID NO: 6365 - protein, 2090 aa, synthetic construct
MPAAKRVKLDGGDKKYSIGLDIGTNSVGWAVITDEYKVPSKKFKVLGNTDRHSIKKNLIGALLFDSGETAEATRLKRTARRRYTRRKNRICYLQEIFSNEMAKVDDSFFHRLEESFLVEEDKKHERHPIFGNIVDEVAYHEKYPTIYHLRKKLVDSTDKADLRLIYLALAHMIKFRGHFLIEGDLNPDNSDVDKLFIQLVQTYNQLFEENPINASGVDAKAILSARLSKSRRLENLIAQLPGEKKNGLFGNLIALSLGLTPNFKSNFDLAEDAKLQLSKDTYDDDLDNLLAQIGDQYADLFLAAKNLSDAILLSDILRVNTEITKAPLSASMIKRYDEHHQDLTLLKALVRQQLPEKYKEIFFDQSKNGYAGYIDGGASQEEFYKFIKPILEKMDGTEELLVKLNREDLLRKQRTFDNGSIPHQIHLGELHAILRRQEDFYPFLKDNREKIEKILTFRIPYYVGPLARGNSRFAWMTRKSEETITPWNFEEVVDKGASAQSFIERMTNFDKNLPNEKVLPKHSLLYEYFTVYNELTKVKYVTEGMRKPAFLSGEQKKAIVDLLFKTNRKVTVKQLKEDYFKKIECFDSVEISGVEDRFNASLGTYHDLLKIIKDKDFLDNEENEDILEDIVLTLTLFEDREMIEERLKTYAHLFDDKVMKQLKRRRYTGWGRLSRKLINGIRDKQSGKTILDFLKSDGFANRNFMQLIHDDSLTFKEDIQKAQVSGQGDSLHEHIANLAGSPAIKKGILQTVKVVDELVKVMGRHKPENIVIEMARENQTTQKGQKNSRERMKRIEEGIKELGSQILKEHPVENTQLQNEKLYLYYLQNGRDMYVDQELDINRLSDYDVDHIVPQSFLKDDSIDNKVLTRSDKARGKSDNVPSEEVVKKMKNYWRQLLNAKLITQRKFDNLTKAERGGLSELDKAGFIKRQLVETRQITKHVAQILDSRMNTKYDENDKLIREVKVITLKSKLVSDFRKDFQFYKVREINNYHHAHDAYLNAVVGTALIKKYPKLESEFVYGDYKVYDVRKMIAKSEQEIGKATAKYFFYSNIMNFFKTEITLANGEIRKRPLIETNGETGEIVWDKGRDFATVRKVLSMPQVNIVKKTEVQTGGFSKESILPKRNSDKLIARKKDWDPKKYGGFDSPTVAYSVLVVAKVEKGKSKKLKSVKELLGITIMERSSFEKNPIDFLEAKGYKEVKKDLIIKLPKYSLFELENGRKRMLASAGELQKGNELALPSKYVNFLYLASHYEKLKGSPEDNEQKQLFVEQHKHYLDEIIEQISEFSKRVILADANLDKVLSAYNKHRDKPIREQAENIIHLFTLTNLGAPAAFKYFDTTIDRKRYTSTKEVLDATLIHQSITGLYETRIDLSQLGGDGGEAAAKGGTLNIEDEHRLHETSKEPDVSLGSTWLSDFPQAWAETGGMGLAVRQAPLIIPLKATSTPVSIKQYPMSQEARLGIKPHIQRLLDQGILVPCQSPWNTPLLPVKKPGTNDYRPVQDLREVNKRVEDIHPTVPNPYNLLSGLPPSHQWYTVLDLKDAFFCLRLHPTSQPLFAFEWRDPEMGISGQLTWTRLPQGFKNSPTLFDEALHRDLADFRIQHPDLILLQYVDDLLLAATSELDCQQGTRALLQTLGNLGYRASAKKAQICQKQVKYLGYLLKEGQRWLTEARKETVMGQPTPKTPRQLREFLGTAGFCRLWIPGFAEMAAPLYPLTKTGTLFNWGPDQQKAYQEIKQALLTAPALGLPDLTKPFELFVDEKQGYAKGVLTQKLGPWRRPVAYLSKKLDPVAAGWPPCLRMVAAIAVLTKDAGKLTMGQPLVILAPHAVEALVKQPPDRWLSNARMTHYQALLLDTDRVQFGPVVALNPATLLPLPEEGLQHNCLDILAEAHGTRPDLTDQPLPDADHTWYTDGSSLLQEGQRKAGAAVTTETEVIWAKALPAGTSAQRAELIALTQALKMAEGKKLNVYTDSRYAFATAHIHGEIYRRRGLLTSEGKEIKNKDEILALLKALFLPKRLSIIHCPGHQKGHSAEARGNRMADQAARKAAITETPDTSTLLAGKRTADGSEFEKRTADGSEFESPKKKAKVE

SEQ ID NO: 6366 - protein, 2082 aa, synthetic construct
MPAAKRVKLDGGDKKYSIGLDIGTNSVGWAVITDEYKVPSKKFKVLGNTDRHSIKKNLIGALLFDSGETAEATRLKRTARRRYTRRKNRICYLQEIFSNEMAKVDDSFFHRLEESFLVEEDKKHERHPIFGNIVDEVAYHEKYPTIYHLRKKLVDSTDKADLRLIYLALAHMIKFRGHFLIEGDLNPDNSDVDKLFIQLVQTYNQLFEENPINASGVDAKAILSARLSKSRRLENLIAQLPGEKKNGLFGNLIALSLGLTPNFKSNFDLAEDAKLQLSKDTYDDDLDNLLAQIGDQYADLFLAAKNLSDAILLSDILRVNTEITKAPLSASMIKRYDEHHQDLTLLKALVRQQLPEKYKEIFFDQSKNGYAGYIDGGASQEEFYKFIKPILEKMDGTEELLVKLNREDLLRKQRTFDNGSIPHQIHLGELHAILRRQEDFYPFLKDNREKIEKILTFRIPYYVGPLARGNSRFAWMTRKSEETITPWNFEEVVDKGASAQSFIERMTNFDKNLPNEKVLPKHSLLYEYFTVYNELTKVKYVTEGMRKPAFLSGEQKKAIVDLLFKTNRKVTVKQLKEDYFKKIECFDSVEISGVEDRFNASLGTYHDLLKIIKDKDFLDNEENEDILEDIVLTLTLFEDREMIEERLKTYAHLFDDKVMKQLKRRRYTGWGRLSRKLINGIRDKQSGKTILDFLKSDGFANRNFMQLIHDDSLTFKEDIQKAQVSGQGDSLHEHIANLAGSPAIKKGILQTVKVVDELVKVMGRHKPENIVIEMARENQTTQKGQKNSRERMKRIEEGIKELGSQILKEHPVENTQLQNEKLYLYYLQNGRDMYVDQELDINRLSDYDVDHIVPQSFLKDDSIDNKVLTRSDKARGKSDNVPSEEVVKKMKNYWRQLLNAKLITQRKFDNLTKAERGGLSELDKAGFIKRQLVETRQITKHVAQILDSRMNTKYDENDKLIREVKVITLKSKLVSDFRKDFQFYKVREINNYHHAHDAYLNAVVGTALIKKYPKLESEFVYGDYKVYDVRKMIAKSEQEIGKATAKYFFYSNIMNFFKTEITLANGEIRKRPLIETNGETGEIVWDKGRDFATVRKVLSMPQVNIVKKTEVQTGGFSKESILPKRNSDKLIARKKDWDPKKYGGFDSPTVAYSVLVVAKVEKGKSKKLKSVKELLGITIMERSSFEKNPIDFLEAKGYKEVKKDLIIKLPKYSLFELENGRKRMLASAGELQKGNELALPSKYVNFLYLASHYEKLKGSPEDNEQKQLFVEQHKHYLDEIIEQISEFSKRVILADANLDKVLSAYNKHRDKPIREQAENIIHLFTLTNLGAPAAFKYFDTTIDRKRYTSTKEVLDATLIHQSITGLYETRIDLSQLGGDGGEAAAKGGLDDEYRLYSPLVKPDQNIQFWLEQFPQAWAETAGMGLAKQVPPQVIQLKASATPVSVRQYPLSKEAQEGIRPHVQRLIQQGILVPVQSPWNTPLLPVRKPGTNDYRPVQDLREVNKRVQDIHPTVPNPYNLLCALPPQRSWYTVLDLKDAFFCLRLHPTSQPLFAFEWRDPGTGRTGQLTWTRLPQGFKNSPTIFNEALHRDLANFRIQHPQVTLLQYVDDLLLAGATKQDCLEGTKALLLELSDLGYRASAKKAQICRREVTYLGYSLRDGQRWLTEARKKTVVQIPAPTTAKQVREFLGKAGFCRLFIPGFATLAAPLYPLTKPKGEFSWAPEHQKAFDAIKKALLSAPALALPDVTKPFTLYVDERKGVARGVLTQTLGPWRRPVAYLSKKLDPVASGWPVCLKAIAAVAILVKDADKLTLGQNITVIAPHALENIVRQPPDRWMTNARMTHYQSLLLTERVTFAPPAALNPATLLPEETDEPVTHDCHQLLIEETGVRKDLTDIPLTGEVLTWFTDGSSYVVEGKRMAGAAVVDGTRTIWASSLPEGTSAQKAELMALTQALRLAEGKSINIYTDSRYAFATAHVHGAIYKQRGWLTSAGREIKNKEEILSLLEALHLPKRLAIIHCPGHQKAKDPISRGNQMADRVAKQAAQGVNLLPAGKRTADGSEFEKRTADGSEFESPKKKAKVE

SEQ ID NO: 6367 - protein, 2084 aa, synthetic construct
MPAAKRVKLDGGDKKYSIGLDIGTNSVGWAVITDEYKVPSKKFKVLGNTDRHSIKKNLIGALLFDSGETAEATRLKRTARRRYTRRKNRICYLQEIFSNEMAKVDDSFFHRLEESFLVEEDKKHERHPIFGNIVDEVAYHEKYPTIYHLRKKLVDSTDKADLRLIYLALAHMIKFRGHFLIEGDLNPDNSDVDKLFIQLVQTYNQLFEENPINASGVDAKAILSARLSKSRRLENLIAQLPGEKKNGLFGNLIALSLGLTPNFKSNFDLAEDAKLQLSKDTYDDDLDNLLAQIGDQYADLFLAAKNLSDAILLSDILRVNTEITKAPLSASMIKRYDEHHQDLTLLKALVRQQLPEKYKEIFFDQSKNGYAGYIDGGASQEEFYKFIKPILEKMDGTEELLVKLNREDLLRKQRTFDNGSIPHQIHLGELHAILRRQEDFYPFLKDNREKIEKILTFRIPYYVGPLARGNSRFAWMTRKSEETITPWNFEEVVDKGASAQSFIERMTNFDKNLPNEKVLPKHSLLYEYFTVYNELTKVKYVTEGMRKPAFLSGEQKKAIVDLLFKTNRKVTVKQLKEDYFKKIECFDSVEISGVEDRFNASLGTYHDLLKIIKDKDFLDNEENEDILEDIVLTLTLFEDREMIEERLKTYAHLFDDKVMKQLKRRRYTGWGRLSRKLINGIRDKQSGKTILDFLKSDGFANRNFMQLIHDDSLTFKEDIQKAQVSGQGDSLHEHIANLAGSPAIKKGILQTVKVVDELVKVMGRHKPENIVIEMARENQTTQKGQKNSRERMKRIEEGIKELGSQILKEHPVENTQLQNEKLYLYYLQNGRDMYVDQELDINRLSDYDVDHIVPQSFLKDDSIDNKVLTRSDKARGKSDNVPSEEVVKKMKNYWRQLLNAKLITQRKFDNLTKAERGGLSELDKAGFIKRQLVETRQITKHVAQILDSRMNTKYDENDKLIREVKVITLKSKLVSDFRKDFQFYKVREINNYHHAHDAYLNAVVGTALIKKYPKLESEFVYGDYKVYDVRKMIAKSEQEIGKATAKYFFYSNIMNFFKTEITLANGEIRKRPLIETNGETGEIVWDKGRDFATVRKVLSMPQVNIVKKTEVQTGGFSKESILPKRNSDKLIARKKDWDPKKYGGFDSPTVAYSVLVVAKVEKGKSKKLKSVKELLGITIMERSSFEKNPIDFLEAKGYKEVKKDLIIKLPKYSLFELENGRKRMLASAGELQKGNELALPSKYVNFLYLASHYEKLKGSPEDNEQKQLFVEQHKHYLDEIIEQISEFSKRVILADANLDKVLSAYNKHRDKPIREQAENIIHLFTLTNLGAPAAFKYFDTTIDRKRYTSTKEVLDATLIHQSITGLYETRIDLSQLGGDGGEAAAKGGTLQLDDEYRLYSPLVKPDQNIQFWLEQFPQAWAETAGMGLAKQVPPQVIQLKASATPVSVRQYPLSKEAQEGIRPHVQRLIQQGILVPVQSPWNTPLLPVRKPGTNDYRPVQDLREVNKRVQDIHPTVPNPYNLLCALPPQRSWYTVLDLKDAFFCLRLHPTSQPLFAFEWRDPGTGRTGQLTWTRLPQGFKNSPTIFDEALHRDLANFRIQHPQVTLLQYVDDLLLAGATKQDCLEGTKALLLELSDLGYRASAKKAQICRREVTYLGYSLRDGQRWLTEARKKTVVQIPAPTTAKQVREFLGTAGFCRLWIPGFATLAAPLYPLTKEKGEFSWAPEHQKAFDAIKKALLSAPALALPDVTKPFTLYVDERKGVARGVLTQTLGPWRRPVAYLSKKLDPVASGWPVCLKAIAAVAILVKDADKLTLGQNITVIAPHALENIVRQPPDRWMTNARMTHYQSLLLTERVTFAPPAALNPATLLPEETDEPVTHDCHQLLIEETGVRKDLTDIPLTGEVLTWFTDGSSYVVEGKRMAGAAVVDGTRTIWASSLPEGTSAQKAELMALTQALRLAEGKSINIYTDSRYAFATAHVHGAIYKQRGLLTSAGREIKNKEEILSLLEALHLPKRLAIIHCPGHQKAKDPISRGNQMADRVAKQAAQGVNLLAGKRTADGSEFEKRTADGSEFESPKKKAKVE

SEQ ID NO: 6368 - protein, 2082 aa, synthetic construct; identical to SEQ ID NO: 6366

SEQ ID NO: 6369 - protein, 2081 aa, synthetic construct
MPAAKRVKLDGGDKKYSIGLDIGTNSVGWAVITDEYKVPSKKFKVLGNTDRHSIKKNLIGALLFDSGETAEATRLKRTARRRYTRRKNRICYLQEIFSNEMAKVDDSFFHRLEESFLVEEDKKHERHPIFGNIVDEVAYHEKYPTIYHLRKKLVDSTDKADLRLIYLALAHMIKFRGHFLIEGDLNPDNSDVDKLFIQLVQTYNQLFEENPINASGVDAKAILSARLSKSRRLENLIAQLPGEKKNGLFGNLIALSLGLTPNFKSNFDLAEDAKLQLSKDTYDDDLDNLLAQIGDQYADLFLAAKNLSDAILLSDILRVNTEITKAPLSASMIKRYDEHHQDLTLLKALVRQQLPEKYKEIFFDQSKNGYAGYIDGGASQEEFYKFIKPILEKMDGTEELLVKLNREDLLRKQRTFDNGSIPHQIHLGELHAILRRQEDFYPFLKDNREKIEKILTFRIPYYVGPLARGNSRFAWMTRKSEETITPWNFEEVVDKGASAQSFIERMTNFDKNLPNEKVLPKHSLLYEYFTVYNELTKVKYVTEGMRKPAFLSGEQKKAIVDLLFKTNRKVTVKQLKEDYFKKIECFDSVEISGVEDRFNASLGTYHDLLKIIKDKDFLDNEENEDILEDIVLTLTLFEDREMIEERLKTYAHLFDDKVMKQLKRRRYTGWGRLSRKLINGIRDKQSGKTILDFLKSDGFANRNFMQLIHDDSLTFKEDIQKAQVSGQGDSLHEHIANLAGSPAIKKGILQTVKVVDELVKVMGRHKPENIVIEMARENQTTQKGQKNSRERMKRIEEGIKELGSQILKEHPVENTQLQNEKLYLYYLQNGRDMYVDQELDINRLSDYDVDHIVPQSFLKDDSIDNKVLTRSDKARGKSDNVPSEEVVKKMKNYWRQLLNAKLITQRKFDNLTKAERGGLSELDKAGFIKRQLVETRQITKHVAQILDSRMNTKYDENDKLIREVKVITLKSKLVSDFRKDFQFYKVREINNYHHAHDAYLNAVVGTALIKKYPKLESEFVYGDYKVYDVRKMIAKSEQEIGKATAKYFFYSNIMNFFKTEITLANGEIRKRPLIETNGETGEIVWDKGRDFATVRKVLSMPQVNIVKKTEVQTGGFSKESILPKRNSDKLIARKKDWDPKKYGGFDSPTVAYSVLVVAKVEKGKSKKLKSVKELLGITIMERSSFEKNPIDFLEAKGYKEVKKDLIIKLPKYSLFELENGRKRMLASAGELQKGNELALPSKYVNFLYLASHYEKLKGSPEDNEQKQLFVEQHKHYLDEIIEQISEFSKRVILADANLDKVLSAYNKHRDKPIREQAENIIHLFTLTNLGAPAAFKYFDTTIDRKRYTSTKEVLDATLIHQSITGLYETRIDLSQLGGDGGEAAAKGGIPWLMKKPLQLTTLVPLQEYEERLLKQTMLTGSYKEKLQSLFLKYDALWQHWENQVGHRRIKPHHIATGTVNPRPQKQYPINPKAKASIQTVINDLLKQGVLIQQNSIMNTPVYPVPKPDGKWRMVLDYREVNKTIPLIAAQNQHSAGILSSIFRGKYKTTLDLSNGFWAHSITPESYWLTAFTWLGQQYCWTRLPQGFLNSPALFNADVVDLLKEVPNVQVYVDDIYISHDDPREHLEQLEKVFSLLLNAGYVVSLKKSEIAQHEVEFLGFNITKEGRGLTETFKQKLLNITPPRDLKQLQSILGLLNFARNFIPNFSELVKPLYNIIATAPGKYITWTTDNSQQLQNIISMLNSAENLEERNPEVRLIMKVNTSPSAGYIRFYNEFAKRPIMYLNYVYTKAEVKFTNTEKLLTTIHKGLIKALDLGMGQEILVYSPIVSMTKIQKTPLPERKALPIRWITWMSYLEDPRIQFHYDKTLPELQQVPTVTDDIIAKIKHPSEFSMVFYTDGSAIKHPNVNKSHNAGMGIAQVQFKPEFTVINTWSIPLGDHTAQLAEVAAVEFACKKALKIDGPVLIVTDSFYVAESVNKELPYWQSNGFFNNKKKPLKHVSKWKSIADCIQLKPDIIIIHEKGHQPTASTFHTEGNNLADKLATQGSYVVNAGKRTADGSEFEKRTADGSEFESPKKKAKVE

SEQ ID NO: 6370 - protein, 2097 aa, synthetic construct
MPAAKRVKLDGGDKKYSIGLDIGTNSVGWAVITDEYKVPSKKFKVLGNTDRHSIKKNLIGALLFDSGETAEATRLKRTARRRYTRRKNRICYLQEIFSNEMAKVDDSFFHRLEESFLVEEDKKHERHPIFGNIVDEVAYHEKYPTIYHLRKKLVDSTDKADLRLIYLALAHMIKFRGHFLIEGDLNPDNSDVDKLFIQLVQTYNQLFEENPINASGVDAKAILSARLSKSRRLENLIAQLPGEKKNGLFGNLIALSLGLTPNFKSNFDLAEDAKLQLSKDTYDDDLDNLLAQIGDQYADLFLAAKNLSDAILLSDILRVNTEITKAPLSASMIKRYDEHHQDLTLLKALVRQQLPEKYKEIFFDQSKNGYAGYIDGGASQEEFYKFIKPILEKMDGTEELLVKLNREDLLRKQRTFDNGSIPHQIHLGELHAILRRQEDFYPFLKDNREKIEKILTFRIPYYVGPLARGNSRFAWMTRKSEETITPWNFEEVVDKGASAQSFIERMTNFDKNLPNEKVLPKHSLLYEYFTVYNELTKVKYVTEGMRKPAFLSGEQKKAIVDLLFKTNRKVTVKQLKEDYFKKIECFDSVEISGVEDRFNASLGTYHDLLKIIKDKDFLDNEENEDILEDIVLTLTLFEDREMIEERLKTYAHLFDDKVMKQLKRRRYTGWGRLSRKLINGIRDKQSGKTILDFLKSDGFANRNFMQLIHDDSLTFKEDIQKAQVSGQGDSLHEHIANLAGSPAIKKGILQTVKVVDELVKVMGRHKPENIVIEMARENQTTQKGQKNSRERMKRIEEGIKELGSQILKEHPVENTQLQNEKLYLYYLQNGRDMYVDQELDINRLSDYDVDHIVPQSFLKDDSIDNKVLTRSDKARGKSDNVPSEEVVKKMKNYWRQLLNAKLITQRKFDNLTKAERGGLSELDKAGFIKRQLVETRQITKHVAQILDSRMNTKYDENDKLIREVKVITLKSKLVSDFRKDFQFYKVREINNYHHAHDAYLNAVVGTALIKKYPKLESEFVYGDYKVYDVRKMIAKSEQEIGKATAKYFFYSNIMNFFKTEITLANGEIRKRPLIETNGETGEIVWDKGRDFATVRKVLSMPQVNIVKKTEVQTGGFSKESILPKRNSDKLIARKKDWDPKKYGGFDSPTVAYSVLVVAKVEKGKSKKLKSVKELLGITIMERSSFEKNPIDFLEAKGYKEVKKDLIIKLPKYSLFELENGRKRMLASAGELQKGNELALPSKYVNFLYLASHYEKLKGSPEDNEQKQLFVEQHKHYLDEIIEQISEFSKRVILADANLDKVLSAYNKHRDKPIREQAENIIHLFTLTNLGAPAAFKYFDTTIDRKRYTSTKEVLDATLIHQSITGLYETRIDLSQLGGDGGEAAAKEAAAKGGTAPLEEEYRLFLEAPIQNVTLLEQWKREIPKVWAEINPPGLASTQAPIHVQLLSTALPVRVRQYPITLEAKRSLRETIRKFRAAGILRPVHSPWNTPLLPVRKSGTSEYRMVQDLREVNKRVETIHPTVPNPYTLLSLLPPDRIWYSVLDLKDAFFCIPLAPESQLIFAFEWADAEEGESGQLTWTRLPQGFKNSPTLFNEALNRDLQGFRLDHPSVSLLQYVDDLLIAADTQAACLSATRDLLMTLAELGYRVSGKKAQLCQEEVTYLGFKIHKGSRSLSNSRTQAILQIPVPKTKRQVREFLGKIGYCRLFIPGFAELAQPLYAATRPGNDPLVWGEKEEEAFQSLKLALTQPPALALPSLDKPFQLFVEETSGAAKGVLTQALGPWKRPVAYLSKRLDPVAAGWPRCLRAIAAAALLTREASKLTFGQDIEITSSHNLESLLRSPPDKWLTNARITQYQVLLLDPPRVRFKQTAALNPATLLPETDDTLPIHHCLDTLDSLTSTRPDLTDQPLAQAEATLFTDGSSYIRDGKRYAGAAVVTLDSVIWAEPLPIGTSAQKAELIALTKALEWSKDKSVNIYTDSRYAFATLHVHGMIYRERGWLTAGGKAIKNAPEILALLTAVWLPKRVAVMHCKGHQKDDAPTSTGNRRADEVAREVAIRPLSTQATISAGKRTADGSEFEKRTADGSEFESPKKKAKVE

SEQ ID NO: 6371 - protein, 2172 aa, synthetic construct
MPAAKRVKLDGGDKKYSIGLDIGTNSVGWAVITDEYKVPSKKFKVLGNTDRHSIKKNLIGALLFDSGETAEATRLKRTARRRYTRRKNRICYLQEIFSNEMAKVDDSFFHRLEESFLVEEDKKHERHPIFGNIVDEVAYHEKYPTIYHLRKKLVDSTDKADLRLIYLALAHMIKFRGHFLIEGDLNPDNSDVDKLFIQLVQTYNQLFEENPINASGVDAKAILSARLSKSRRLENLIAQLPGEKKNGLFGNLIALSLGLTPNFKSNFDLAEDAKLQLSKDTYDDDLDNLLAQIGDQYADLFLAAKNLSDAILLSDILRVNTEITKAPLSASMIKRYDEHHQDLTLLKALVRQQLPEKYKEIFFDQSKNGYAGYIDGGASQEEFYKFIKPILEKMDGTEELLVKLNREDLLRKQRTFDNGSIPHQIHLGELHAILRRQEDFYPFLKDNREKIEKILTFRIPYYVGPLARGNSRFAWMTRKSEETITPWNFEEVVDKGASAQSFIERMTNFDKNLPNEKVLPKHSLLYEYFTVYNELTKVKYVTEGMRKPAFLSGEQKKAIVDLLFKTNRKVTVKQLKEDYFKKIECFDSVEISGVEDRFNASLGTYHDLLKIIKDKDFLDNEENEDILEDIVLTLTLFEDREMIEERLKTYAHLFDDKVMKQLKRRRYTGWGRLSRKLINGIRDKQSGKTILDFLKSDGFANRNFMQLIHDDSLTFKEDIQKAQVSGQGDSLHEHIANLAGSPAIKKGILQTVKVVDELVKVMGRHKPENIVIEMARENQTTQKGQKNSRERMKRIEEGIKELGSQILKEHPVENTQLQNEKLYLYYLQNGRDMYVDQELDINRLSDYDVDHIVPQSFLKDDSIDNKVLTRSDKARGKSDNVPSEEVVKKMKNYWRQLLNAKLITQRKFDNLTKAERGGLSELDKAGFIKRQLVETRQITKHVAQILDSRMNTKYDENDKLIREVKVITLKSKLVSDFRKDFQFYKVREINNYHHAHDAYLNAVVGTALIKKYPKLESEFVYGDYKVYDVRKMIAKSEQEIGKATAKYFFYSNIMNFFKTEITLANGEIRKRPLIETNGETGEIVWDKGRDFATVRKVLSMPQVNIVKKTEVQTGGFSKESILPKRNSDKLIARKKDWDPKKYGGFDSPTVAYSVLVVAKVEKGKSKKLKSVKELLGITIMERSSFEKNPIDFLEAKGYKEVKKDLIIKLPKYSLFELENGRKRMLASAGELQKGNELALPSKYVNFLYLASHYEKLKGSPEDNEQKQLFVEQHKHYLDEIIEQISEFSKRVILADANLDKVLSAYNKHRDKPIREQAENIIHLFTLTNLGAPAAFKYFDTTIDRKRYTSTKEVLDATLIHQSITGLYETRIDLSQLGGDGGEAAAKEAAAKGGMDLLKPLTVERKGVKIKGYWNSQADITCVPKDLLQGEEPVRQQNVTTIHGTQEGDVYYVNLKIDGRRINTEVIGTTLDYAIITPGDVPWILKKPLELTIKLDLEEQQGTLLNNSILSKKGKEELKQLFEKYSALWQSWENQVGHRRIRPHKIATGTVKPTPQKQYHINPKAKPDIQIVINDLLKQGVLIQKESTMNTPVYPVPKPNGRWRMVLDYRAVNKVTPLIAVQNQHSYGILGSLFKGRYKTTIDLSNGFWAHPIVPEDYWITAFTWQGKQYCWTVLPQGFLNSPGLFTGDVVDLLQGIPNVEVYVDDVYISHDSEKEHLEYLDILFNRLKEAGYIISLKKSNIANSIVDFLGFQITNEGRGLTDTFKEKLENITAPTTLKQLQSILGLLNFARNFIPDFTELIAPLYALIPKSTKNYVPWQIEHSTTLETLITKLNGAEYLQGRKGDKTLIMKVNASYTTGYIRYYNEGEKKPISYVSIVFSKTELKFTELEKLLTTVHKGLLKALDLSMGQNIHVYSPIVSMQNIQKTPQTAKKALASRWLSWLSYLEDPRIRFFYDPQMPALKDLPAVDTGKDNKKHPSNFQHIFYTDGSAITSPTKEGHLNAGMGIVYFINKDGNLQKQQEWSISLGNHTAQFAEIAAFEFALKKCLPLGGNILVVTDSNYVAKAYNEELDVWASNGFVNNRKKPLKHISKWKSVADLKRLRPDVVVTHEPGHQKLDSSPHAYGNNLADQLATQASFKVHAGKRTADGSEFEKRTADGSEFESPKKKAKVE

SEQ ID NO: 6372 - protein, 2086 aa, synthetic construct
MPAAKRVKLDGGDKKYSIGLDIGTNSVGWAVITDEYKVPSKKFKVLGNTDRHSIKKNLIGALLFDSGETAEATRLKRTARRRYTRRKNRICYLQEIFSNEMAKVDDSFFHRLEESFLVEEDKKHERHPIFGNIVDEVAYHEKYPTIYHLRKKLVDSTDKADLRLIYLALAHMIKFRGHFLIEGDLNPDNSDVDKLFIQLVQTYNQLFEENPINASGVDAKAILSARLSKSRRLENLIAQLPGEKKNGLFGNLIALSLGLTPNFKSNFDLAEDAKLQLSKDTYDDDLDNLLAQIGDQYADLFLAAKNLSDAILLSDILRVNTEITKAPLSASMIKRYDEHHQDLTLLKALVRQQLPEKYKEIFFDQSKNGYAGYIDGGASQEEFYKFIKPILEKMDGTEELLVKLNREDLLRKQRTFDNGSIPHQIHLGELHAILRRQEDFYPFLKDNREKIEKILTFRIPYYVGPLARGNSRFAWMTRKSEETITPWNFEEVVDKGASAQSFIERMTNFDKNLPNEKVLPKHSLLYEYFTVYNELTKVKYVTEGMRKPAFLSGEQKKAIVDLLFKTNRKVTVKQLKEDYFKKIECFDSVEISGVEDRFNASLGTYHDLLKIIKDKDFLDNEENEDILEDIVLTLTLFEDREMIEERLKTYAHLFDDKVMKQLKRRRYTGWGRLSRKLINGIRDKQSGKTILDFLKSDGFANRNFMQLIHDDSLTFKEDIQKAQVSGQGDSLHEHIANLAGSPAIKKGILQTVKVVDELVKVMGRHKPENIVIEMARENQTTQKGQKNSRERMKRIEEGIKELGSQILKEHPVENTQLQNEKLYLYYLQNGRDMYVDQELDINRLSDYDVDHIVPQSFLKDDSIDNKVLTRSDKARGKSDNVPSEEVVKKMKNYWRQLLNAKLITQRKFDNLTKAERGGLSELDKAGFIKRQLVETRQITKHVAQILDSRMNTKYDENDKLIREVKVITLKSKLVSDFRKDFQFYKVREINNYHHAHDAYLNAVVGTALIKKYPKLESEFVYGDYKVYDVRKMIAKSEQEIGKATAKYFFYSNIMNFFKTEITLANGEIRKRPLIETNGETGEIVWDKGRDFATVRKVLSMPQVNIVKKTEVQTGGFSKESILPKRNSDKLIARKKDWDPKKYGGFDSPTVAYSVLVVAKVEKGKSKKLKSVKELLGITIMERSSFEKNPIDFLEAKGYKEVKKDLIIKLPKYSLFELENGRKRMLASAGELQKGNELALPSKYVNFLYLASHYEKLKGSPEDNEQKQLFVEQHKHYLDEIIEQISEFSKRVILADANLDKVLSAYNKHRDKPIREQAENIIHLFTLTNLGAPAAFKYFDTTIDRKRYTSTKEVLDATLIHQSITGLYETRIDLSQLGGDGGEAAAKEAAAKGGVPWILKKPLELTIKLDLEEQQGTLLNNSILSKKGKEELKQLFEKYSALWQSWENQVGHRRIRPHKIATGTVKPTPQKQYHINPKAKPDIQIVINDLLKQGVLIQKESTMNTPVYPVPKPNGRWRMVLDYRAVNKVTPLIAVQNQHSYGILGSLFKGRYKTTIDLSNGFWAHPIVPEDYWITAFTWQGKQYCWTVLPQGFLNSPGLFTGDVVDLLQGIPNVEVYVDDVYISHDSEKEHLEYLDILFNRLKEAGYIISLKKSNIANSIVDFLGFQITNEGRGLTDTFKEKLENITAPTTLKQLQSILGLLNFARNFIPDFTELIAPLYALIPKSTKNYVPWQIEHSTTLETLITKLNGAEYLQGRKGDKTLIMKVNASYTTGYIRYYNEGEKKPISYVSIVFSKTELKFTELEKLLTTVHKGLLKALDLSMGQNIHVYSPIVSMQNIQKTPQTAKKALASRWLSWLSYLEDPRIRFFYDPQMPALKDLPAVDTGKDNKKHPSNFQHIFYTDGSAITSPTKEGHLNAGMGIVYFINKDGNLQKQQEWSISLGNHTAQFAEIAAFEFALKKCLPLGGNILVVTDSNYVAKAYNEELDVWASNGFVNNRKKPLKHISKWKSVADLKRLRPDVVVTHEPGHQKLDSSPHAYGNNLADQLATQASFKVHAGKRTADGSEFEKRTADGSEFESPKKKAKVE

SEQ ID NO: 6373 - protein, 2172 aa, synthetic construct
MPAAKRVKLDGGDKKYSIGLDIGTNSVGWAVITDEYKVPSKKFKVLGNTDRHSIKKNLIGALLFDSGETAEATRLKRTARRRYTRRKNRICYLQEIFSNEMAKVDDSFFHRLEESFLVEEDKKHERHPIFGNIVDEVAYHEKYPTIYHLRKKLVDSTDKADLRLIYLALAHMIKFRGHFLIEGDLNPDNSDVDKLFIQLVQTYNQLFEENPINASGVDAKAILSARLSKSRRLENLIAQLPGEKKNGLFGNLIALSLGLTPNFKSNFDLAEDAKLQLSKDTYDDDLDNLLAQIGDQYADLFLAAKNLSDAILLSDILRVNTEITKAPLSASMIKRYDEHHQDLTLLKALVRQQLPEKYKEIFFDQSKNGYAGYIDGGASQEEFYKFIKPILEKMDGTEELLVKLNREDLLRKQRTFDNGSIPHQIHLGELHAILRRQEDFYPFLKDNREKIEKILTFRIPYYVGPLARGNSRFAWMTRKSEETITPWNFEEVVDKGASAQSFIERMTNFDKNLPNEKVLPKHSLLYEYFTVYNELTKVKYVTEGMRKPAFLSGEQKKAIVDLLFKTNRKVTVKQLKEDYFKKIECFDSVEISGVEDRFNASLGTYHDLLKIIKDKDFLDNEENEDILEDIVLTLTLFEDREMIEERLKTYAHLFDDKVMKQLKRRRYTGWGRLSRKLINGIRDKQSGKTILDFLKSDGFANRNFMQLIHDDSLTFKEDIQKAQVSGQGDSLHEHIANLAGSPAIKKGILQTVKVVDELVKVMGRHKPENIVIEMARENQTTQKGQKNSRERMKRIEEGIKELGSQILKEHPVENTQLQNEKLYLYYLQNGRDMYVDQELDINRLSDYDVDHIVPQSFLKDDSIDNKVLTRSDKARGKSDNVPSEEVVKKMKNYWRQLLNAKLITQRKFDNLTKAERGGLSELDKAGFIKRQLVETRQITKHVAQILDSRMNTKYDENDKLIREVKVITLKSKLVSDFRKDFQFYKVREINNYHHAHDAYLNAVVGTALIKKYPKLESEFVYGDYKVYDVRKMIAKSEQEIGKATAKYFFYSNIMNFFKTEITLANGEIRKRPLIETNGETGEIVWDKGRDFATVRKVLSMPQVNIVKKTEVQTGGFSKESILPKRNSDKLIARKKDWDPKKYGGFDSPTVAYSVLVVAKVEKGKSKKLKSVKELLGITIMERSSFEKNPIDFLEAKGYKEVKKDLIIKLPKYSLFELENGRKRMLASAGELQKGNELALPSKYVNFLYLASHYEKLKGSPEDNEQKQLFVEQHKHYLDEIIEQISEFSKRVILADANLDKVLSAYNKHRDKPIREQAENIIHLFTLTNLGAPAAFKYFDTTIDRKRYTSTKEVLDATLIHQSITGLYETRIDLSQLGGDGGEAAAKEAAAKGGMDLLKPLTVERKGVKIKGYWNSQADITCVPKDLLQGEEPVRQQNVTTIHGTQEGDVYYVNLKIDGRRINTEVIGTTLDYAIITPGDVPWILKKPLELTIKLDLEEQQGTLLNNSILSKKGKEELKQLFEKYSALWQSWENQVGHRRIRPHKIATGTVKPTPQKQYHINPKAKPDIQIVINDLLKQGVLIQKESTMNTPVYPVPKPNGRWRMVLDYRAVNKVTPLIAVQNQHSYGILGSLFKGRYKTTIDLSNGFWAHPIVPEDYWITAFTWQGKQYCWTVLPQGFLNSPGLFNGDVVDLLQGIPNVEVYVDDVYISHDSEKEHLEYLDILFNRLKEAGYIISLKKSNIANSIVDFLGFQITNEGRGLTDTFKEKLENITAPTTLKQLQSILGLLNFARNFIPDFTELIAPLYALIPKSPKNYVPWQIEHSTTLETLITKLNGAEYLQGRKGDKTLIMKVNASYTTGYIRYYNEGEKKPISYVSIVFSKTELKFTELEKLLTTVHKGLLKALDLSMGQNIHVYSPIVSMQNIQKTPQTAKKALASRWLSWLSYLEDPRIRFFYDPQMPALKDLPAVDTGKDNKKHPSNFQHIFYTDGSAITSPTKEGHLNAGMGIVYFINKDGNLQKQQEWSISLGNHTAQFAEIAAFEFALKKCLPLGGNILVVTDSNYVAKAYNEELDVWASNGFVNNRKKPLKHISKWKSVADLKRLRPDVVVTHEPGHQKLDSSPHAYGNNLADQLATQASFKVHAGKRTADGSEFEKRTADGSEFESPKKKAKVE

SEQ ID NO: 6374 - protein, 2093 aa, synthetic construct
MPAAKRVKLDGGDKKYSIGLDIGTNSVGWAVITDEYKVPSKKFKVLGNTDRHSIKKNLIGALLFDSGETAEATRLKRTARRRYTRRKNRICYLQEIFSNEMAKVDDSFFHRLEESFLVEEDKKHERHPIFGNIVDEVAYHEKYPTIYHLRKKLVDSTDKADLRLIYLALAHMIKFRGHFLIEGDLNPDNSDVDKLFIQLVQTYNQLFEENPINASGVDAKAILSARLSKSRRLENLIAQLPGEKKNGLFGNLIALSLGLTPNFKSNFDLAEDAKLQLSKDTYDDDLDNLLAQIGDQYADLFLAAKNLSDAILLSDILRVNTEITKAPLSASMIKRYDEHHQDLTLLKALVRQQLPEKYKEIFFDQSKNGYAGYIDGGASQEEFYKFIKPILEKMDGTEELLVKLNREDLLRKQRTFDNGSIPHQIHLGELHAILRRQEDFYPFLKDNREKIEKILTFRIPYYVGPLARGNSRFAWMTRKSEETITPWNFEEVVDKGASAQSFIERMTNFDKNLPNEKVLPKHSLLYEYFTVYNELTKVKYVTEGMRKPAFLSGEQKKAIVDLLFKTNRKVTVKQLKEDYFKKIECFDSVEISGVEDRFNASLGTYHDLLKIIKDKDFLDNEENEDILEDIVLTLTLFEDREMIEERLKTYAHLFDDKVMKQLKRRRYTGWGRLSRKLINGIRDKQSGKTILDFLKSDGFANRNFMQLIHDDSLTFKEDIQKAQVSGQGDSLHEHIANLAGSPAIKKGILQTVKVVDELVKVMGRHKPENIVIEMARENQTTQKGQKNSRERMKRIEEGIKELGSQILKEHPVENTQLQNEKLYLYYLQNGRDMYVDQELDINRLSDYDVDHIVPQSFLKDDSIDNKVLTRSDKARGKSDNVPSEEVVKKMKNYWRQLLNAKLITQRKFDNLTKAERGGLSELDKAGFIKRQLVETRQITKHVAQILDSRMNTKYDENDKLIREVKVITLKSKLVSDFRKDFQFYKVREINNYHHAHDAYLNAVVGTALIKKYPKLESEFVYGDYKVYDVRKMIAKSEQEIGKATAKYFFYSNIMNFFKTEITLANGEIRKRPLIETNGETGEIVWDKGRDFATVRKVLSMPQVNIVKKTEVQTGGFSKESILPKRNSDKLIARKKDWDPKKYGGFDSPTVAYSVLVVAKVEKGKSKKLKSVKELLGITIMERSSFEKNPIDFLEAKGYKEVKKDLIIKLPKYSLFELENGRKRMLASAGELQKGNELALPSKYVNFLYLASHYEKLKGSPEDNEQKQLFVEQHKHYLDEIIEQISEFSKRVILADANLDKVLSAYNKHRDKPIREQAENIIHLFTLTNLGAPAAFKYFDTTIDRKRYTSTKEVLDATLIHQSITGLYETRIDLSQLGGDGGEAAAKEAAAKGGVLNLEEEYRLHEKPVPSSIDPSWLQLFPTVWAERAGMGLANQVPPVVVELRSGASPVAVRQYPMSKEAREGIRPHIQKFLDLGVLVPCRSPWNTPLLPVKKPGTNDYRPVQDLREINKRVQDIHPTVPNPYNLLSSLPPSYTWYSVLDLKDAFFCLRLHPNSQPLFAFEWKDPEKGNTGQLTWTRLPQGFKNSPTLFNEALHRDLAPFRALNPQVVLLQYVDDLLVAAPTYEDCKKGTQKLLQELSKLGYRVSAKKAQLCQREVTYLGYLLKEGKRWLTPARKATVMKIPVPTTPRQVREFLGKAGFCRLFIPGFASLAAPLYPLTKPSIPFIWTEEHQQAFDHIKKALLSAPALALPDLTKPFTLYIDERAGVARGVLTQTLGPWRRPVAYLSKKLDPVASGWPTCLKAVAAVALLLKDADKLTLGQNVTVIASHSLESIVRQPPDRWMTNARMTHYQSLLLNERVSFAPPAVLNPATLLPVESEATPVHRCSEILAEETGTRRDLEDQPLPGVPTWYTDGSSFITEGKRRAGAPIVDGKRTVWASSLPEGTSAQKAELVALTQALRLAEGKNINIYTDSRYAFATAHIHGAIYKQRGWLTSAGKDIKNKEEILALLEAIHLPRRVAIIHCPGHQRGSNPVATGNRRADEAAKQAALSTRVLAGTTKPAGKRTADGSEFEKRTADGSEFESPKKKAKVE

SEQ ID NO: 6375 - protein, 2126 aa, synthetic construct
MPAAKRVKLDGGDKKYSIGLDIGTNSVGWAVITDEYKVPSKKFKVLGNTDRHSIKKNLIGALLFDSGETAEATRLKRTARRRYTRRKNRICYLQEIFSNEMAKVDDSFFHRLEESFLVEEDKKHERHPIFGNIVDEVAYHEKYPTIYHLRKKLVDSTDKADLRLIYLALAHMIKFRGHFLIEGDLNPDNSDVDKLFIQLVQTYNQLFEENPINASGVDAKAILSARLSKSRRLENLIAQLPGEKKNGLFGNLIALSLGLTPNFKSNFDLAEDAKLQLSKDTYDDDLDNLLAQIGDQYADLFLAAKNLSDAILLSDILRVNTEITKAPLSASMIKRYDEHHQDLTLLKALVRQQLPEKYKEIFFDQSKNGYAGYIDGGASQEEFYKFIKPILEKMDGTEELLVKLNREDLLRKQRTFDNGSIPHQIHLGELHAILRRQEDFYPFLKDNREKIEKILTFRIPYYVGPLARGNSRFAWMTRKSEETITPWNFEEVVDKGASAQSFIERMTNFDKNLPNEKVLPKHSLLYEYFTVYNELTKVKYVTEGMRKPAFLSGEQKKAIVDLLFKTNRKVTVKQLKEDYFKKIECFDSVEISGVEDRFNASLGTYHDLLKIIKDKDFLDNEENEDILEDIVLTLTLFEDREMIEERLKTYAHLFDDKVMKQLKRRRYTGWGRLSRKLINGIRDKQSGKTILDFLKSDGFANRNFMQLIHDDSLTFKEDIQKAQVSGQGDSLHEHIANLAGSPAIKKGILQTVKVVDELVKVMGRHKPENIVIEMARENQTTQKGQKNSRERMKRIEEGIKELGSQILKEHPVENTQLQNEKLYLYYLQNGRDMYVDQELDINRLSDYDVDHIVPQSFLKDDSIDNKVLTRSDKARGKSDNVPSEEVVKKMKNYWRQLLNAKLITQRKFDNLTKAERGGLSELDKAGFIKRQLVETRQITKHVAQILDSRMNTKYDENDKLIREVKVITLKSKLVSDFRKDFQFYKVREINNYHHAHDAYLNAVVGTALIKKYPKLESEFVYGDYKVYDVRKMIAKSEQEIGKATAKYFFYSNIMNFFKTEITLANGEIRKRPLIETNGETGEIVWDKGRDFATVRKVLSMPQVNIVKKTEVQTGGFSKESILPKRNSDKLIARKKDWDPKKYGGFDSPTVAYSVLVVAKVEKGKSKKLKSVKELLGITIMERSSFEKNPIDFLEAKGYKEVKKDLIIKLPKYSLFELENGRKRMLASAGELQKGNELALPSKYVNFLYLASHYEKLKGSPEDNEQKQLFVEQHKHYLDEIIEQISEFSKRVILADANLDKVLSAYNKHRDKPIREQAENIIHLFTLTNLGAPAAFKYFDTTIDRKRYTSTKEVLDATLIHQSITGLYETRIDLSQLGGDGGEAAAKEAAAKGGLLGRDLLTKLKAQIQFSTEGPQVTWEDRPAMCLVLNLEEEYRLHEKPVPPSIDPSWLQLFPMVWAEKAGMGLANQVPPVVVELKSDASPVAVRQYPMSKEAREGIRPHIQRFLDLGILVPCQSPWNTPLLPVKKPGTNDYRPVQDLREVNKRVQDIHPTVPNPYNLLSSLPPSHTWYSVLDLKDAFFCLKLHPNSQPLFAFEWRDPEKGNTGQLTWTRLPQGFKNSPTLFNEALHRDLASFRALNPQVVMLQYVDDLLVAAPTYRDCKEGTRRLLQELSKLGYRVSAKKAQLCREEVTYLGYLLKGGKRWLTPARKATVMKIPTPTTPRQVREFLGTAGFCRLWIPGFASLAAPLYPLTRPKVPFTWTEAHQEAFGRIKEALLSAPALALPDLTKPFALYVDEKEGVARGVLTQTLGPWRRPVAYLSKKLDPVASGWPTCLKAIAAVALLLKDADKLTLGQNVLVIAPHNLESIVRQPPDRWMTNARMTHYQSLLLNERVSFAPPAILNPATLLPVESDDTPIHICSEILAEETGTRPDLRDQPLPGVPAWYTDGSSFIMDGRRQAGAAIVDNKRTVWASNLPEGTSAQKAELIALTQALRLAEGKSINIYTDSRYAFATAHVHGAIYKQRGWLTSAGKDIKNKEEILALLEAIHLPKRVAIIHCPGHQRGTDPVATGNRKADEAAKQAAQSTRILTETTKNAGKRTADGSEFEKRTADGSEFESPKKKAKVE

SEQ ID NO: 6376 - protein, 2126 aa, synthetic construct
MPAAKRVKLDGGDKKYSIGLDIGTNSVGWAVITDEYKVPSKKFKVLGNTDRHSIKKNLIGALLFDSGETAEATRLKRTARRRYTRRKNRICYLQEIFSNEMAKVDDSFFHRLEESFLVEEDKKHERHPIFGNIVDEVAYHEKYPTIYHLRKKLVDSTDKADLRLIYLALAHMIKFRGHFLIEGDLNPDNSDVDKLFIQLVQTYNQLFEENPINASGVDAKAILSARLSKSRRLENLIAQLPGEKKNGLFGNLIALSLGLTPNFKSNFDLAEDAKLQLSKDTYDDDLDNLLAQIGDQYADLFLAAKNLSDAILLSDILRVNTEITKAPLSASMIKRYDEHHQDLTLLKALVRQQLPEKYKEIFFDQSKNGYAGYIDGGASQEEFYKFIKPILEKMDGTEELLVKLNREDLLRKQRTFDNGSIPHQIHLGELHAILRRQEDFYPFLKDNREKIEKILTFRIPYYVGPLARGNSRFAWMTRKSEETITPWNFEEVVDKGASAQSFIERMTNFDKNLPNEKVLPKHSLLYEYFTVYNELTKVKYVTEGMRKPAFLSGEQKKAIVDLLFKTNRKVTVKQLKEDYFKKIECFDSVEISGVEDRFNASLGTYHDLLKIIKDKDFLDNEENEDILEDIVLTLTLFEDREMIEERLKTYAHLFDDKVMKQLKRRRYTGWGRLSRKLINGIRDKQSGKTILDFLKSDGFANRNFMQLIHDDSLTFKEDIQKAQVSGQGDSLHEHIANLAGSPAIKKGILQTVKVVDELVKVMGRHKPENIVIEMARENQTTQKGQKNSRERMKRIEEGIKELGSQILKEHPVENTQLQNEKLYLYYLQNGRDMYVDQELDINRLSDYDVDHIVPQSFLKDDSIDNKVLTRSDKARGKSDNVPSEEVVKKMKNYWRQLLNAKLITQRKFDNLTKAERGGLSELDKAGFIKRQLVETRQITKHVAQILDSRMNTKYDENDKLIREVKVITLKSKLVSDFRKDFQFYKVREINNYHHAHDAYLNAVVGTALIKKYPKLESEFVYGDYKVYDVRKMIAKSEQEIGKATAKYFFYSNIMNFFKTEITLANGEIRKRPLIETNGETGEIVWDKGRDFATVRKVLSMPQVNIVKKTEVQTGGFSKESILPKRNSDKLIARKKDWDPKKYGGFDSPTVAYSVLVVAKVEKGKSKKLKSVKELLGITIMERSSFEKNPIDFLEAKGYKEVKKDLIIKLPKYSLFELENGRKRMLASAGELQKGNELALPSKYVNFLYLASHYEKLKGSPEDNEQKQLFVEQHKHYLDEIIEQISEFSKRVILADANLDKVLSAYNKHRDKPIREQAENIIHLFTLTNLGAPAAFKYFDTTIDRKRYTSTKEVLDATLIHQSITGLYETRIDLSQLGGDGGEAAAKEAAAKGGLLGRDLLTKLKAQIQFSTEGPQVTWEDRPAMCLVLNLEEEYRLHEKPVPPSIDPSWLQLFPMVWAEKAGMGLANQVPPVVVELKSDASPVAVRQYPMSKEAREGIRPHIQRFLDLGILVPCQSPWNTPLLPVKKPGTNDYRPVQDLREVNKRVQDIHPTVPNPYNLLSSLPPSHTWYSVLDLKDAFFCLKLHPNSQPLFAFEWRDPEKGNTGQLTWTRLPQGFKNSPTLFNEALHRDLASFRALNPQVVMLQYVDDLLVAAPTYRDCKEGTRRLLQELSKLGYRVSAKKAQLCREEVTYLGYLLKGGKRWLTPARKATVMKIPTPTTPRQVREFLGKAGFCRLFIPGFASLAAPLYPLTRPKVPFTWTEAHQEAFGRIKEALLSAPALALPDLTKPFALYVDEKEGVARGVLTQTLGPWRRPVAYLSKKLDPVASGWPTCLKAIAAVALLLKDADKLTLGQNVLVIAPHNLESIVRQPPDRWMTNARMTHYQSLLLNERVSFAPPAILNPATLLPVESDDTPIHICSEILAEETGTRPDLRDQPLPGVPAWYTDGSSFIMDGRRQAGAAIVDNKRTVWASNLPEGTSAQKAELIALTQALRLAEGKSINIYTDSRYAFATAHVHGAIYKQRGWLTSAGKDIKNKEEILALLEAIHLPKRVAIIHCPGHQRGTDPVATGNRKADEAAKQAAQSTRILTETTKNAGKRTADGSEFEKRTADGSEFESPKKKAKVE

SEQ ID NO: 6377 - protein, 2095 aa, synthetic construct
MPAAKRVKLDGGDKKYSIGLDIGTNSVGWAVITDEYKVPSKKFKVLGNTDRHSIKKNLIGALLFDSGETAEATRLKRTARRRYTRRKNRICYLQEIFSNEMAKVDDSFFHRLEESFLVEEDKKHERHPIFGNIVDEVAYHEKYPTIYHLRKKLVDSTDKADLRLIYLALAHMIKFRGHFLIEGDLNPDNSDVDKLFIQLVQTYNQLFEENPINASGVDAKAILSARLSKSRRLENLIAQLPGEKKNGLFGNLIALSLGLTPNFKSNFDLAEDAKLQLSKDTYDDDLDNLLAQIGDQYADLFLAAKNLSDAILLSDILRVNTEITKAPLSASMIKRYDEHHQDLTLLKALVRQQLPEKYKEIFFDQSKNGYAGYIDGGASQEEFYKFIKPILEKMDGTEELLVKLNREDLLRKQRTFDNGSIPHQIHLGELHAILRRQEDFYPFLKDNREKIEKILTFRIPYYVGPLARGNSRFAWMTRKSEETITPWNFEEVVDKGASAQSFIERMTNFDKNLPNEKVLPKHSLLYEYFTVYNELTKVKYVTEGMRKPAFLSGEQKKAIVDLLFKTNRKVTVKQLKEDYFKKIECFDSVEISGVEDRFNASLGTYHDLLKIIKDKDFLDNEENEDILEDIVLTLTLFEDREMIEERLKTYAHLFDDKVMKQLKRRRYTGWGRLSRKLINGIRDKQSGKTILDFLKSDGFANRNFMQLIHDDSLTFKEDIQKAQVSGQGDSLHEHIANLAGSPAIKKGILQTVKVVDELVKVMGRHKPENIVIEMARENQTTQKGQKNSRERMKRIEEGIKELGSQILKEHPVENTQLQNEKLYLYYLQNGRDMYVDQELDINRLSDYDVDHIVPQSFLKDDSIDNKVLTRSDKARGKSDNVPSEEVVKKMKNYWRQLLNAKLITQRKFDNLTKAERGGLSELDKAGFIKRQLVETRQITKHVAQILDSRMNTKYDENDKLIREVKVITLKSKLVSDFRKDFQFYKVREINNYHHAHDAYLNAVVGTALIKKYPKLESEFVYGDYKVYDVRKMIAKSEQEIGKATAKYFFYSNIMNFFKTEITLANGEIRKRPLIETNGETGEIVWDKGRDFATVRKVLSMPQVNIVKKTEVQTGGFSKESILPKRNSDKLIARKKDWDPKKYGGFDSPTVAYSVLVVAKVEKGKSKKLKSVKELLGITIMERSSFEKNPIDFLEAKGYKEVKKDLIIKLPKYSLFELENGRKRMLASAGELQKGNELALPSKYVNFLYLASHYEKLKGSPEDNEQKQLFVEQHKHYLDEIIEQISEFSKRVILADANLDKVLSAYNKHRDKPIREQAENIIHLFTLTNLGAPAAFKYFDTTIDRKRYTSTKEVLDATLIHQSITGLYETRIDLSQLGGDGGEAAAKEAAAKGGTLNLEDEYRLYETSAEPEVSPGSTWLSDFPQAWAETGGMGLAVRQAPLIIPLKATSTPVSIKQYPMSQEAKLGIKPHIQRLLDQGILVPCQSPWNTPLLPVKKPGTNDYRPVQDLREVNKRVEDIHPTVPNPYNLLSGLPPSHRWYTVLDLKDAFFCLRLHPTSQPLFAFEWRDPGMGISGQLTWTRLPQGFKNSPTLFNEALHRDLADFRIQHPDLILLQYVDDILLAATSELDCQQGTRALLLTLGNLGYRASAKKAQLCQKQVKYLGYLLKEGQRWLTEARKETVMGQPTPKTPRQLREFLGKAGFCRLFIPGFAEMAAPLYPLTKPGTLFNWGPDQQKAYQEIKQALLTAPALGLPDLTKPFELFVDEKQGYAKGVLTQKLGPWRRPVAYLSKKLDPVAAGWPPCLRMVAAIAVLRKDAGKLTMGQPLVILAPHAVEALVKQPPDRWLSNARMTHYQAMLLDTDRVQFGPVVALNPATLLPLPEEGAPHDCLEILAETHGTRPDLTDQPIPDADHTWYTDGSSFLQEGQRKAGAAVTTETEVIWARALPAGTSAQRAELIALTQALKMAEGKRLNVYTDSRYAFATAHIHGEIYRRRGWLTSEGREIKNKSEILALLKALFLPKRLSIIHCLGHQKGDSAEARGNRLADQAAREAAIKTPPDTSTLLAGKRTADGSEFEKRTADGSEFESPKKKAKVE

SEQ ID NO: 6378 - protein, 2095 aa, synthetic construct
MPAAKRVKLDGGDKKYSIGLDIGTNSVGWAVITDEYKVPSKKFKVLGNTDRHSIKKNLIGALLFDSGETAEATRLKRTARRRYTRRKNRICYLQEIFSNEMAKVDDSFFHRLEESFLVEEDKKHERHPIFGNIVDEVAYHEKYPTIYHLRKKLVDSTDKADLRLIYLALAHMIKFRGHFLIEGDLNPDNSDVDKLFIQLVQTYNQLFEENPINASGVDAKAILSARLSKSRRLENLIAQLPGEKKNGLFGNLIALSLGLTPNFKSNFDLAEDAKLQLSKDTYDDDLDNLLAQIGDQYADLFLAAKNLSDAILLSDILRVNTEITKAPLSASMIKRYDEHHQDLTLLKALVRQQLPEKYKEIFFDQSKNGYAGYIDGGASQEEFYKFIKPILEKMDGTEELLVKLNREDLLRKQRTFDNGSIPHQIHLGELHAILRRQEDFYPFLKDNREKIEKILTFRIPYYVGPLARGNSRFAWMTRKSEETITPWNFEEVVDKGASAQSFIERMTNFDKNLPNEKVLPKHSLLYEYFTVYNELTKVKYVTEGMRKPAFLSGEQKKAIVDLLFKTNRKVTVKQLKEDYFKKIECFDSVEISGVEDRFNASLGTYHDLLKIIKDKDFLDNEENEDILEDIVLTLTLFEDREMIEERLKTYAHLFDDKVMKQLKRRRYTGWGRLSRKLINGIRDKQSGKTILDFLKSDGFANRNFMQLIHDDSLTFKEDIQKAQVSGQGDSLHEHIANLAGSPAIKKGILQTVKVVDELVKVMGRHKPENIVIEMARENQTTQKGQKNSRERMKRIEEGIKELGSQILKEHPVENTQLQNEKLYLYYLQNGRDMYVDQELDINRLSDYDVDHIVPQSFLKDDSIDNKVLTRSDKARGKSDNVPSEEVVKKMKNYWRQLLNAKLITQRKFDNLTKAERGGLSELDKAGFIKRQLVETRQITKHVAQILDSRMNTKYDENDKLIREVKVITLKSKLVSDFRKDFQFYKVREINNYHHAHDAYLNAVVGTALIKKYPKLESEFVYGDYKVYDVRKMIAKSEQEIGKATAKYFFYSNIMNFFKTEITLANGEIRKRPLIETNGETGEIVWDKGRDFATVRKVLSMPQVNIVKKTEVQTGGFSKESILPKRNSDKLIARKKDWDPKKYGGFDSPTVAYSVLVVAKVEKGKSKKLKSVKELLGITIMERSSFEKNPIDFLEAKGYKEVKKDLIIKLPKYSLFELENGRKRMLASAGELQKGNELALPSKYVNFLYLASHYEKLKGSPEDNEQKQLFVEQHKHYLDEIIEQISEFSKRVILADANLDKVLSAYNKHRDKPIREQAENIIHLFTLTNLGAPAAFKYFDTTIDRKRYTSTKEVLDATLIHQSITGLYETRIDLSQLGGDGGEAAAKEAAAKGGTLGIEDEYRLHETSTEPDVSLGSTWLSDFPQAWAETGGMGLAVRQAPLIIPLKATSTPVSIQQYPMSHEARLGIKPHIQRLLDQGILVPCQSPWNTPLLPVKKPGTNDYRPVQDLREVNKRVEDIHPTVPNPYNLLSGLPPSHQWYTVLDLKDAFFCLRLHPTSQPLFAFEWRDPGMGISGQLTWTRLPQGFKNSPTLFNEALHRDLADFRIQHPDLILLQYVDDILLAATSELDCQQGTRALLQTLGDLGYRASAKKAQICQKQVKYLGYLLREGQRWLTEARKETVMGQPVPKTPRQLREFLGTAGFCRLWIPGFAEMAAPLYPLTKPGTLFSWGPDQQKAYQEIKQALLTAPALGLPDLTKPFELFVDEKQGYAKGVLTQKLGPWRRPVAYLSKKLDPVAAGWPPCLRMVAAIAVLTKDAGKLTMGQPLVILAPHAVEALVKQPPDRWLSNARMTHYQAMLLDTDRVQFGPVVALNPATLLPLPEEGAPHDCLEILAETHGTRPDLTDQPIPDADHTWYTDGSSFLQEGQRKAGAAVTTETEVIWAGALPAGTSAQRAELIALTQALKMAEGKRLNVYTDSRYAFATAHIHGEIYRRRGWLTSEGREIKNKSEILALLKALFLPKRLSIIHCLGHQKGDSAEARGNRLADQAAREAAIKTPPDTSTLLAGKRTADGSEFEKRTADGSEFESPKKKAKVE

SEQ ID NO: 6379 - protein, 2087 aa, synthetic construct
MPAAKRVKLDGGDKKYSIGLDIGTNSVGWAVITDEYKVPSKKFKVLGNTDRHSIKKNLIGALLFDSGETAEATRLKRTARRRYTRRKNRICYLQEIFSNEMAKVDDSFFHRLEESFLVEEDKKHERHPIFGNIVDEVAYHEKYPTIYHLRKKLVDSTDKADLRLIYLALAHMIKFRGHFLIEGDLNPDNSDVDKLFIQLVQTYNQLFEENPINASGVDAKAILSARLSKSRRLENLIAQLPGEKKNGLFGNLIALSLGLTPNFKSNFDLAEDAKLQLSKDTYDDDLDNLLAQIGDQYADLFLAAKNLSDAILLSDILRVNTEITKAPLSASMIKRYDEHHQDLTLLKALVRQQLPEKYKEIFFDQSKNGYAGYIDGGASQEEFYKFIKPILEKMDGTEELLVKLNREDLLRKQRTFDNGSIPHQIHLGELHAILRRQEDFYPFLKDNREKIEKILTFRIPYYVGPLARGNSRFAWMTRKSEETITPWNFEEVVDKGASAQSFIERMTNFDKNLPNEKVLPKHSLLYEYFTVYNELTKVKYVTEGMRKPAFLSGEQKKAIVDLLFKTNRKVTVKQLKEDYFKKIECFDSVEISGVEDRFNASLGTYHDLLKIIKDKDFLDNEENEDILEDIVLTLTLFEDREMIEERLKTYAHLFDDKVMKQLKRRRYTGWGRLSRKLINGIRDKQSGKTILDFLKSDGFANRNFMQLIHDDSLTFKEDIQKAQVSGQGDSLHEHIANLAGSPAIKKGILQTVKVVDELVKVMGRHKPENIVIEMARENQTTQKGQKNSRERMKRIEEGIKELGSQILKEHPVENTQLQNEKLYLYYLQNGRDMYVDQELDINRLSDYDVDHIVPQSFLKDDSIDNKVLTRSDKARGKSDNVPSEEVVKKMKNYWRQLLNAKLITQRKFDNLTKAERGGLSELDKAGFIKRQLVETRQITKHVAQILDSRMNTKYDENDKLIREVKVITLKSKLVSDFRKDFQFYKVREINNYHHAHDAYLNAVVGTALIKKYPKLESEFVYGDYKVYDVRKMIAKSEQEIGKATAKYFFYSNIMNFFKTEITLANGEIRKRPLIETNGETGEIVWDKGRDFATVRKVLSMPQVNIVKKTEVQTGGFSKESILPKRNSDKLIARKKDWDPKKYGGFDSPTVAYSVLVVAKVEKGKSKKLKSVKELLGITIMERSSFEKNPIDFLEAKGYKEVKKDLIIKLPKYSLFELENGRKRMLASAGELQKGNELALPSKYVNFLYLASHYEKLKGSPEDNEQKQLFVEQHKHYLDEIIEQISEFSKRVILADANLDKVLSAYNKHRDKPIREQAENIIHLFTLTNLGAPAAFKYFDTTIDRKRYTSTKEVLDATLIHQSITGLYETRIDLSQLGGDGGEAAAKEAAAKGGLDDEYRLYSPLVKPDQNIQFWLEQFPQAWAETAGMGLAKQVPPQVIQLKASATPVSVRQYPLSKEAQEGIRPHVQRLIQQGILVPVQSPWNTPLLPVRKPGTNDYRPVQDLREVNKRVQDIHPTVPNPYNLLCALPPQRSWYTVLDLKDAFFCLRLHPTSQPLFAFEWRDPGTGRTGQLTWTRLPQGFKNSPTIFNEALHRDLANFRIQHPQVTLLQYVDDLLLAGATKQDCLEGTKALLLELSDLGYRASAKKAQICRREVTYLGYSLRDGQRWLTEARKKTVVQIPAPTTAKQVREFLGKAGFCRLFIPGFATLAAPLYPLTKPKGEFSWAPEHQKAFDAIKKALLSAPALALPDVTKPFTLYVDERKGVARGVLTQTLGPWRRPVAYLSKKLDPVASGWPVCLKAIAAVAILVKDADKLTLGQNITVIAPHALENIVRQPPDRWMTNARMTHYQSLLLTERVTFAPPAALNPATLLPEETDEPVTHDCHQLLIEETGVRKDLTDIPLTGEVLTWFTDGSSYVVEGKRMAGAAVVDGTRTIWASSLPEGTSAQKAELMALTQALRLAEGKSINIYTDSRYAFATAHVHGAIYKQRGWLTSAGREIKNKEEILSLLEALHLPKRLAIIHCPGHQKAKDPISRGNQMADRVAKQAAQGVNLLPAGKRTADGSEFEKRTADGSEFESPKKKAKVE

SEQ ID NO: 6380 - protein, 2089 aa, synthetic construct
MPAAKRVKLDGGDKKYSIGLDIGTNSVGWAVITDEYKVPSKKFKVLGNTDRHSIKKNLIGALLFDSGETAEATRLKRTARRRYTRRKNRICYLQEIFSNEMAKVDDSFFHRLEESFLVEEDKKHERHPIFGNIVDEVAYHEKYPTIYHLRKKLVDSTDKADLRLIYLALAHMIKFRGHFLIEGDLNPDNSDVDKLFIQLVQTYNQLFEENPINASGVDAKAILSARLSKSRRLENLIAQLPGEKKNGLFGNLIALSLGLTPNFKSNFDLAEDAKLQLSKDTYDDDLDNLLAQIGDQYADLFLAAKNLSDAILLSDILRVNTEITKAPLSASMIKRYDEHHQDLTLLKALVRQQLPEKYKEIFFDQSKNGYAGYIDGGASQEEFYKFIKPILEKMDGTEELLVKLNREDLLRKQRTFDNGSIPHQIHLGELHAILRRQEDFYPFLKDNREKIEKILTFRIPYYVGPLARGNSRFAWMTRKSEETITPWNFEEVVDKGASAQSFIERMTNFDKNLPNEKVLPKHSLLYEYFTVYNELTKVKYVTEGMRKPAFLSGEQKKAIVDLLFKTNRKVTVKQLKEDYFKKIECFDSVEISGVEDRFNASLGTYHDLLKIIKDKDFLDNEENEDILEDIVLTLTLFEDREMIEERLKTYAHLFDDKVMKQLKRRRYTGWGRLSRKLINGIRDKQSGKTILDFLKSDGFANRNFMQLIHDDSLTFKEDIQKAQVSGQGDSLHEHIANLAGSPAIKKGILQTVKVVDELVKVMGRHKPENIVIEMARENQTTQKGQKNSRERMKRIEEGIKELGSQILKEHPVENTQLQNEKLYLYYLQNGRDMYVDQELDINRLSDYDVDHIVPQSFLKDDSIDNKVLTRSDKARGKSDNVPSEEVVKKMKNYWRQLLNAKLITQRKFDNLTKAERGGLSELDKAGFIKRQLVETRQITKHVAQILDSRMNTKYDENDKLIREVKVITLKSKLVSDFRKDFQFYKVREINNYHHAHDAYLNAVVGTALIKKYPKLESEFVYGDYKVYDVRKMIAKSEQEIGKATAKYFFYSNIMNFFKTEITLANGEIRKRPLIETNGETGEIVWDKGRDFATVRKVLSMPQVNIVKKTEVQTGGFSKESILPKRNSDKLIARKKDWDPKKYGGFDSPTVAYSVLVVAKVEKGKSKKLKSVKELLGITIMERSSFEKNPIDFLEAKGYKEVKKDLIIKLPKYSLFELENGRKRMLASAGELQKGNELALPSKYVNFLYLASHYEKLKGSPEDNEQKQLFVEQHKHYLDEIIEQISEFSKRVILADANLDKVLSAYNKHRDKPIREQAENIIHLFTLTNLGAPAAFKYFDTTIDRKRYTSTKEVLDATLIHQSITGLYETRIDLSQLGGDGGEAAAKEAAAKGGTLQLDDEYRLYSPLVKPDQNIQFWLEQFPQAWAETAGMGLAKQVPPQVIQLKASATPVSVRQYPLSKEAQEGIRPHVQRLIQQGILVPVQSPWNTPLLPVRKPGTNDYRPVQDLREVNKRVQDIHPTVPNPYNLLCALPPQRSWYTVLDLKDAFFCLRLHPTSQPLFAFEWRDPGTGRTGQLTWTRLPQGFKNSPTIFDEALHRDLANFRIQHPQVTLLQYVDDLLLAGATKQDCLEGTKALLLELSDLGYRASAKKAQICRREVTYLGYSLRDGQRWLTEARKKTVVQIPAPTTAKQVREFLGTAGFCRLWIPGFATLAAPLYPLTKEKGEFSWAPEHQKAFDAIKKALLSAPALALPDVTKPFTLYVDERKGVARGVLTQTLGPWRRPVAYLSKKLDPVASGWPVCLKAIAAVAILVKDADKLTLGQNITVIAPHALENIVRQPPDRWMTNARMTHYQSLLLTERVTFAPPAALNPATLLPEETDEPVTHDCHQLLIEETGVRKDLTDIPLTGEVLTWFTDGSSYVVEGKRMAGAAVVDGTRTIWASSLPEGTSAQKAELMALTQALRLAEGKSINIYTDSRYAFATAHVHGAIYKQRGLLTSAGREIKNKEEILSLLEALHLPKRLAIIHCPGHQKAKDPISRGNQMADRVAKQAAQGVNLLAGKRTADGSEFEKRTADGSEFESPKKKAKVE

SEQ ID NO: 6381 - protein, 2087 aa, synthetic construct; identical to SEQ ID NO: 6379

SEQ ID NO: 6382 - protein, 2175 aa, synthetic construct
MPAAKRVKLDGGDKKYSIGLDIGTNSVGWAVITDEYKVPSKKFKVLGNTDRHSIKKNLIGALLFDSGETAEATRLKRTARRRYTRRKNRICYLQEIFSNEMAKVDDSFFHRLEESFLVEEDKKHERHPIFGNIVDEVAYHEKYPTIYHLRKKLVDSTDKADLRLIYLALAHMIKFRGHFLIEGDLNPDNSDVDKLFIQLVQTYNQLFEENPINASGVDAKAILSARLSKSRRLENLIAQLPGEKKNGLFGNLIALSLGLTPNFKSNFDLAEDAKLQLSKDTYDDDLDNLLAQIGDQYADLFLAAKNLSDAILLSDILRVNTEITKAPLSASMIKRYDEHHQDLTLLKALVRQQLPEKYKEIFFDQSKNGYAGYIDGGASQEEFYKFIKPILEKMDGTEELLVKLNREDLLRKQRTFDNGSIPHQIHLGELHAILRRQEDFYPFLKDNREKIEKILTFRIPYYVGPLARGNSRFAWMTRKSEETITPWNFEEVVDKGASAQSFIERMTNFDKNLPNEKVLPKHSLLYEYFTVYNELTKVKYVTEGMRKPAFLSGEQKKAIVDLLFKTNRKVTVKQLKEDYFKKIECFDSVEISGVEDRFNASLGTYHDLLKIIKDKDFLDNEENEDILEDIVLTLTLFEDREMIEERLKTYAHLFDDKVMKQLKRRRYTGWGRLSRKLINGIRDKQSGKTILDFLKSDGFANRNFMQLIHDDSLTFKEDIQKAQVSGQGDSLHEHIANLAGSPAIKKGILQTVKVVDELVKVMGRHKPENIVIEMARENQTTQKGQKNSRERMKRIEEGIKELGSQILKEHPVENTQLQNEKLYLYYLQNGRDMYVDQELDINRLSDYDVDHIVPQSFLKDDSIDNKVLTRSDKARGKSDNVPSEEVVKKMKNYWRQLLNAKLITQRKFDNLTKAERGGLSELDKAGFIKRQLVETRQITKHVAQILDSRMNTKYDENDKLIREVKVITLKSKLVSDFRKDFQFYKVREINNYHHAHDAYLNAVVGTALIKKYPKLESEFVYGDYKVYDVRKMIAKSEQEIGKATAKYFFYSNIMNFFKTEITLANGEIRKRPLIETNGETGEIVWDKGRDFATVRKVLSMPQVNIVKKTEVQTGGFSKESILPKRNSDKLIARKKDWDPKKYGGFDSPTVAYSVLVVAKVEKGKSKKLKSVKELLGITIMERSSFEKNPIDFLEAKGYKEVKKDLIIKLPKYSLFELENGRKRMLASAGELQKGNELALPSKYVNFLYLASHYEKLKGSPEDNEQKQLFVEQHKHYLDEIIEQISEFSKRVILADANLDKVLSAYNKHRDKPIREQAENIIHLFTLTNLGAPAAFKYFDTTIDRKRYTSTKEVLDATLIHQSITGLYETRIDLSQLGGDGGEAAAKEAAAKGGMDPLQLLQPLEAEIKGTKLKAHWNSGATITCVPQAFLEEEVPIKNIWIKTIHGEKEQPVYYLTFKIQGRKVEAEVISSPYDYILVSPSDIPWLMKKPLQLTTLVPLQEYEERLLKQTMLTGSYKEKLQSLFLKYDALWQHWENQVGHRRIKPHHIATGTVNPRPQKQYPINPKAKASIQTVINDLLKQGVLIQQNSIMNTPVYPVPKPDGKWRMVLDYREVNKTIPLIAAQNQHSAGILSSIFRGKYKTTLDLSNGFWAHSITPESYWLTAFTWLGQQYCWTRLPQGFLNSPALFNADVVDLLKEVPNVQVYVDDIYISHDDPREHLEQLEKVFSLLLNAGYVVSLKKSEIAQHEVEFLGFNITKEGRGLTETFKQKLLNITPPRDLKQLQSILGKLNFARNFIPNFSELVKPLYNIIATAPGKYITWTTDNSQQLQNIISMLNSAENLEERNPEVRLIMKVNTSPSAGYIRFYNEFAKRPIMYLNYVYTKAEVKFTNTEKLLTTIHKGLIKALDLGMGQEILVYSPIVSMTKIQKTPLPERKALPIRWITWMSYLEDPRIQFHYDKTLPELQQVPTVTDDIIAKIKHPSEFSMVFYTDGSAIKHPNVNKSHNAGMGIAQVQFKPEFTVINTWSIPLGDHTAQLAEVAAVEFACKKALKIDGPVLIVTDSFYVAESVNKELPYWQSNGFFNNKKKPLKHVSKWKSIADCIQLKPDIIIIHEKGHQPTASTFHTEGNNLADKLATQGSYVVNAGKRTADGSEFEKRTADGSEFESPKKKAKVE

SEQ ID NO: 6383 - protein, 2095 aa, synthetic construct
MPAAKRVKLDGGDKKYSIGLDIGTNSVGWAVITDEYKVPSKKFKVLGNTDRHSIKKNLIGALLFDSGETAEATRLKRTARRRYTRRKNRICYLQEIFSNEMAKVDDSFFHRLEESFLVEEDKKHERHPIFGNIVDEVAYHEKYPTIYHLRKKLVDSTDKADLRLIYLALAHMIKFRGHFLIEGDLNPDNSDVDKLFIQLVQTYNQLFEENPINASGVDAKAILSARLSKSRRLENLIAQLPGEKKNGLFGNLIALSLGLTPNFKSNFDLAEDAKLQLSKDTYDDDLDNLLAQIGDQYADLFLAAKNLSDAILLSDILRVNTEITKAPLSASMIKRYDEHHQDLTLLKALVRQQLPEKYKEIFFDQSKNGYAGYIDGGASQEEFYKFIKPILEKMDGTEELLVKLNREDLLRKQRTFDNGSIPHQIHLGELHAILRRQEDFYPFLKDNREKIEKILTFRIPYYVGPLARGNSRFAWMTRKSEETITPWNFEEVVDKGASAQSFIERMTNFDKNLPNEKVLPKHSLLYEYFTVYNELTKVKYVTEGMRKPAFLSGEQKKAIVDLLFKTNRKVTVKQLKEDYFKKIECFDSVEISGVEDRFNASLGTYHDLLKIIKDKDFLDNEENEDILEDIVLTLTLFEDREMIEERLKTYAHLFDDKVMKQLKRRRYTGWGRLSRKLINGIRDKQSGKTILDFLKSDGFANRNFMQLIHDDSLTFKEDIQKAQVSGQGDSLHEHIANLAGSPAIKKGILQTVKVVDELVKVMGRHKPENIVIEMARENQTTQKGQKNSRERMKRIEEGIKELGSQILKEHPVENTQLQNEKLYLYYLQNGRDMYVDQELDINRLSDYDVDHIVPQSFLKDDSIDNKVLTRSDKARGKSDNVPSEEVVKKMKNYWRQLLNAKLITQRKFDNLTKAERGGLSELDKAGFIKRQLVETRQITKHVAQILDSRMNTKYDENDKLIREVKVITLKSKLVSDFRKDFQFYKVREINNYHHAHDAYLNAVVGTALIKKYPKLESEFVYGDYKVYDVRKMIAKSEQEIGKATAKYFFYSNIMNFFKTEITLANGEIRKRPLIETNGETGEIVWDKGRDFATVRKVLSMPQVNIVKKTEVQTGGFSKESILPKRNSDKLIARKKDWDPKKYGGFDSPTVAYSVLVVAKVEKGKSKKLKSVKELLGITIMERSSFEKNPIDFLEAKGYKEVKKDLIIKLPKYSLFELENGRKRMLASAGELQKGNELALPSKYVNFLYLASHYEKLKGSPEDNEQKQLFVEQHKHYLDEIIEQISEFSKRVILADANLDKVLSAYNKHRDKPIREQAENIIHLFTLTNLGAPAAFKYFDTTIDRKRYTSTKEVLDATLIHQSITGLYETRIDLSQLGGDGGEAAAKEAAAKGGTLNIEDEYRLHETSKEPDVPLGSTWLSDFPQAWAETGGMGLAVRQAPLIIPLKATSTPVSIKQYPMSQEARLGIKPHIQRLLDQGILVPCQSPWNTPLLPVKKPGTNDYRPVQDLREVNKRVEDIHPTVPNPYNLLSGLPPSHQWYTVLDLKDAFFCLRLHPTSQPLFAFEWRDPEMGISGQLTWTRLPQGFKNSPTLFNEALHRDLADFRIQHPDLILLQYVDDLLLAATSEQDCQRGTRALLQTLGNLGYRASAKKAQICQKQVKYLGYLLKEGQRWLTEARKETVMGQPTPKTPRQLREFLGKAGFCRLFIPGFAEMAAPLYPLTKPGTLFNWGPDQQKAYQEIKQALLTAPALGLPDLTKPFELFVDEKQGYAKGVLTQKLGPWRRPVAYLSKKLDPVAAGWPPCLRMVAAIAVLTKDAGKLTMGQPLVILAPHAVEALVKQPPDRWLSNARMTHYQAMLLDTDRVQFGPVVALNPATLLPLPEKEAPHDCLEILAETHGTRPDLTDQPIPDADYTWYTDGSSFLQEGQRRAGAAVTTETEVIWARALPAGTSAQRAELIALTQALKMAEGKKLNVYTDSRYAFATAHVHGEIYRRRGWLTSEGREIKNKNEILALLKALFLPKRLSIIHCPGHQKGNSAEARGNRMADQAAREAAMKAVLETSTLLAGKRTADGSEFEKRTADGSEFESPKKKAKVE

SEQ ID NO: 6384 - protein, 2102 aa, synthetic construct
MPAAKRVKLDGGDKKYSIGLDIGTNSVGWAVITDEYKVPSKKFKVLGNTDRHSIKKNLIGALLFDSGETAEATRLKRTARRRYTRRKNRICYLQEIFSNEMAKVDDSFFHRLEESFLVEEDKKHERHPIFGNIVDEVAYHEKYPTIYHLRKKLVDSTDKADLRLIYLALAHMIKFRGHFLIEGDLNPDNSDVDKLFIQLVQTYNQLFEENPINASGVDAKAILSARLSKSRRLENLIAQLPGEKKNGLFGNLIALSLGLTPNFKSNFDLAEDAKLQLSKDTYDDDLDNLLAQIGDQYADLFLAAKNLSDAILLSDILRVNTEITKAPLSASMIKRYDEHHQDLTLLKALVRQQLPEKYKEIFFDQSKNGYAGYIDGGASQEEFYKFIKPILEKMDGTEELLVKLNREDLLRKQRTFDNGSIPHQIHLGELHAILRRQEDFYPFLKDNREKIEKILTFRIPYYVGPLARGNSRFAWMTRKSEETITPWNFEEVVDKGASAQSFIERMTNFDKNLPNEKVLPKHSLLYEYFTVYNELTKVKYVTEGMRKPAFLSGEQKKAIVDLLFKTNRKVTVKQLKEDYFKKIECFDSVEISGVEDRFNASLGTYHDLLKIIKDKDFLDNEENEDILEDIVLTLTLFEDREMIEERLKTYAHLFDDKVMKQLKRRRYTGWGRLSRKLINGIRDKQSGKTILDFLKSDGFANRNFMQLIHDDSLTFKEDIQKAQVSGQGDSLHEHIANLAGSPAIKKGILQTVKVVDELVKVMGRHKPENIVIEMARENQTTQKGQKNSRERMKRIEEGIKELGSQILKEHPVENTQLQNEKLYLYYLQNGRDMYVDQELDINRLSDYDVDHIVPQSFLKDDSIDNKVLTRSDKARGKSDNVPSEEVVKKMKNYWRQLLNAKLITQRKFDNLTKAERGGLSELDKAGFIKRQLVETRQITKHVAQILDSRMNTKYDENDKLIREVKVITLKSKLVSDFRKDFQFYKVREINNYHHAHDAYLNAVVGTALIKKYPKLESEFVYGDYKVYDVRKMIAKSEQEIGKATAKYFFYSNIMNFFKTEITLANGEIRKRPLIETNGETGEIVWDKGRDFATVRKVLSMPQVNIVKKTEVQTGGFSKESILPKRNSDKLIARKKDWDPKKYGGFDSPTVAYSVLVVAKVEKGKSKKLKSVKELLGITIMERSSFEKNPIDFLEAKGYKEVKKDLIIKLPKYSLFELENGRKRMLASAGELQKGNELALPSKYVNFLYLASHYEKLKGSPEDNEQKQLFVEQHKHYLDEIIEQISEFSKRVILADANLDKVLSAYNKHRDKPIREQAENIIHLFTLTNLGAPAAFKYFDTTIDRKRYTSTKEVLDATLIHQSITGLYETRIDLSQLGGDGGEAAAKEAAAKEAAAKGGTAPLEEEYRLFLEAPIQNVTLLEQWKREIPKVWAEINPPGLASTQAPIHVQLLSTALPVRVRQYPITLEAKRSLRETIRKFRAAGILRPVHSPWNTPLLPVRKSGTSEYRMVQDLREVNKRVETIHPTVPNPYTLLSLLPPDRIWYSVLDLKDAFFCIPLAPESQLIFAFEWADAEEGESGQLTWTRLPQGFKNSPTLFNEALNRDLQGFRLDHPSVSLLQYVDDLLIAADTQAACLSATRDLLMTLAELGYRVSGKKAQLCQEEVTYLGFKIHKGSRSLSNSRTQAILQIPVPKTKRQVREFLGTIGYCRLWIPGFAELAQPLYAATRPGNDPLVWGEKEEEAFQSLKLALTQPPALALPSLDKPFQLFVEETSGAAKGVLTQALGPWKRPVAYLSKRLDPVAAGWPRCLRAIAAAALLTREASKLTFGQDIEITSSHNLESLLRSPPDKWLTNARITQYQVLLLDPPRVRFKQTAALNPATLLPETDDTLPIHHCLDTLDSLTSTRPDLTDQPLAQAEATLFTDGSSYIRDGKRYAGAAVVTLDSVIWAEPLPIGTSAQKAELIALTKALEWSKDKSVNIYTDSRYAFATLHVHGMIYRERGWLTAGGKAIKNAPEILALLTAVWLPKRVAVMHCKGHQKDDAPTSTGNRRADEVAREVAIRPLSTQATISAGKRTADGSEFEKRTADGSEFESPKKKAKVE

SEQ ID NO: 6385 - protein, 2102 aa, synthetic construct
MPAAKRVKLDGGDKKYSIGLDIGTNSVGWAVITDEYKVPSKKFKVLGNTDRHSIKKNLIGALLFDSGETAEATRLKRTARRRYTRRKNRICYLQEIFSNEMAKVDDSFFHRLEESFLVEEDKKHERHPIFGNIVDEVAYHEKYPTIYHLRKKLVDSTDKADLRLIYLALAHMIKFRGHFLIEGDLNPDNSDVDKLFIQLVQTYNQLFEENPINASGVDAKAILSARLSKSRRLENLIAQLPGEKKNGLFGNLIALSLGLTPNFKSNFDLAEDAKLQLSKDTYDDDLDNLLAQIGDQYADLFLAAKNLSDAILLSDILRVNTEITKAPLSASMIKRYDEHHQDLTLLKALVRQQLPEKYKEIFFDQSKNGYAGYIDGGASQEEFYKFIKPILEKMDGTEELLVKLNREDLLRKQRTFDNGSIPHQIHLGELHAILRRQEDFYPFLKDNREKIEKILTFRIPYYVGPLARGNSRFAWMTRKSEETITPWNFEEVVDKGASAQSFIERMTNFDKNLPNEKVLPKHSLLYEYFTVYNELTKVKYVTEGMRKPAFLSGEQKKAIVDLLFKTNRKVTVKQLKEDYFKKIECFDSVEISGVEDRFNASLGTYHDLLKIIKDKDFLDNEENEDILEDIVLTLTLFEDREMIEERLKTYAHLFDDKVMKQLKRRRYTGWGRLSRKLINGIRDKQSGKTILDFLKSDGFANRNFMQLIHDDSLTFKEDIQKAQVSGQGDSLHEHIANLAGSPAIKKGILQTVKVVDELVKVMGRHKPENIVIEMARENQTTQKGQKNSRERMKRIEEGIKELGSQILKEHPVENTQLQNEKLYLYYLQNGRDMYVDQELDINRLSDYDVDHIVPQSFLKDDSIDNKVLTRSDKARGKSDNVPSEEVVKKMKNYWRQLLNAKLITQRKFDNLTKAERGGLSELDKAGFIKRQLVETRQITKHVAQILDSRMNTKYDENDKLIREVKVITLKSKLVSDFRKDFQFYKVREINNYHHAHDAYLNAVVGTALIKKYPKLESEFVYGDYKVYDVRKMIAKSEQEIGKATAKYFFYSNIMNFFKTEITLANGEIRKRPLIETNGETGEIVWDKGRDFATVRKVLSMPQVNIVKKTEVQTGGFSKESILPKRNSDKLIARKKDWDPKKYGGFDSPTVAYSVLVVAKVEKGKSKKLKSVKELLGITIMERSSFEKNPIDFLEAKGYKEVKKDLIIKLPKYSLFELENGRKRMLASAGELQKGNELALPSKYVNFLYLASHYEKLKGSPEDNEQKQLFVEQHKHYLDEIIEQISEFSKRVILADANLDKVLSAYNKHRDKPIREQAENIIHLFTLTNLGAPAAFKYFDTTIDRKRYTSTKEVLDATLIHQSITGLYETRIDLSQLGGDGGEAAAKEAAAKEAAAKGGTAPLEEEYRLFLEAPIQNVTLLEQWKREIPKVWAEINPPGLASTQAPIHVQLLSTALPVRVRQYPITLEAKRSLRETIRKFRAAGILRPVHSPWNTPLLPVRKSGTSEYRMVQDLREVNKRVETIHPTVPNPYTLLSLLPPDRIWYSVLDLKDAFFCIPLAPESQLIFAFEWADAEEGESGQLTWTRLPQGFKNSPTLFNEALNRDLQGFRLDHPSVSLLQYVDDLLIAADTQAACLSATRDLLMTLAELGYRVSGKKAQLCQEEVTYLGFKIHKGSRSLSNSRTQAILQIPVPKTKRQVREFLGKIGYCRLFIPGFAELAQPLYAATRPGNDPLVWGEKEEEAFQSLKLALTQPPALALPSLDKPFQLFVEETSGAAKGVLTQALGPWKRPVAYLSKRLDPVAAGWPRCLRAIAAAALLTREASKLTFGQDIEITSSHNLESLLRSPPDKWLTNARITQYQVLLLDPPRVRFKQTAALNPATLLPETDDTLPIHHCLDTLDSLTSTRPDLTDQPLAQAEATLFTDGSSYIRDGKRYAGAAVVTLDSVIWAEPLPIGTSAQKAELIALTKALEWSKDKSVNIYTDSRYAFATLHVHGMIYRERGWLTAGGKAIKNAPEILALLTAVWLPKRVAVMHCKGHQKDDAPTSTGNRRADEVAREVAIRPLSTQATISAGKRTADGSEFEKRTADGSEFESPKKKAKVE

SEQ ID NO: 6386 - protein, 2106 aa, synthetic construct
MPAAKRVKLDGGDKKYSIGLDIGTNSVGWAVITDEYKVPSKKFKVLGNTDRHSIKKNLIGALLFDSGETAEATRLKRTARRRYTRRKNRICYLQEIFSNEMAKVDDSFFHRLEESFLVEEDKKHERHPIFGNIVDEVAYHEKYPTIYHLRKKLVDSTDKADLRLIYLALAHMIKFRGHFLIEGDLNPDNSDVDKLFIQLVQTYNQLFEENPINASGVDAKAILSARLSKSRRLENLIAQLPGEKKNGLFGNLIALSLGLTPNFKSNFDLAEDAKLQLSKDTYDDDLDNLLAQIGDQYADLFLAAKNLSDAILLSDILRVNTEITKAPLSASMIKRYDEHHQDLTLLKALVRQQLPEKYKEIFFDQSKNGYAGYIDGGASQEEFYKFIKPILEKMDGTEELLVKLNREDLLRKQRTFDNGSIPHQIHLGELHAILRRQEDFYPFLKDNREKIEKILTFRIPYYVGPLARGNSRFAWMTRKSEETITPWNFEEVVDKGASAQSFIERMTNFDKNLPNEKVLPKHSLLYEYFTVYNELTKVKYVTEGMRKPAFLSGEQKKAIVDLLFKTNRKVTVKQLKEDYFKKIECFDSVEISGVEDRFNASLGTYHDLLKIIKDKDFLDNEENEDILEDIVLTLTLFEDREMIEERLKTYAHLFDDKVMKQLKRRRYTGWGRLSRKLINGIRDKQSGKTILDFLKSDGFANRNFMQLIHDDSLTFKEDIQKAQVSGQGDSLHEHIANLAGSPAIKKGILQTVKVVDELVKVMGRHKPENIVIEMARENQTTQKGQKNSRERMKRIEEGIKELGSQILKEHPVENTQLQNEKLYLYYLQNGRDMYVDQELDINRLSDYDVDHIVPQSFLKDDSIDNKVLTRSDKARGKSDNVPSEEVVKKMKNYWRQLLNAKLITQRKFDNLTKAERGGLSELDKAGFIKRQLVETRQITKHVAQILDSRMNTKYDENDKLIREVKVITLKSKLVSDFRKDFQFYKVREINNYHHAHDAYLNAVVGTALIKKYPKLESEFVYGDYKVYDVRKMIAKSEQEIGKATAKYFFYSNIMNFFKTEITLANGEIRKRPLIETNGETGEIVWDKGRDFATVRKVLSMPQVNIVKKTEVQTGGFSKESILPKRNSDKLIARKKDWDPKKYGGFDSPTVAYSVLVVAKVEKGKSKKLKSVKELLGITIMERSSFEKNPIDFLEAKGYKEVKKDLIIKLPKYSLFELENGRKRMLASAGELQKGNELALPSKYVNFLYLASHYEKLKGSPEDNEQKQLFVEQHKHYLDEIIEQISEFSKRVILADANLDKVLSAYNKHRDKPIREQAENIIHLFTLTNLGAPAAFKYFDTTIDRKRYTSTKEVLDATLIHQSITGLYETRIDLSQLGGDGGEAAAKEAAAKEAAAKGGTVSLQDEHRLFDIPVTTSLPDVWLQDFPQAWAETGGLGRAKCQAPIIIDLKPTAVPVSIKQYPMSLEAHMGIRQHIIKFLELGVLRPCRSPWNTPLLPVKKPGTQDYRPVQDLREINKRTVDIHPTVPNPYNLLSTLKPDYSWYTVLDLKDAFFCLPLAPQSQELFAFEWKDPERGISGQLTWTRLPQGFKNSPTLFNEALHRDLTDFRTQHPEVTLLQYVDDLLLAAPTKKACTQGTRHLLQELGEKGYRASAKKAQICQTKVTYLGYILSEGKRWLTPGRIETVARIPPPRNPREVREFLGTAGFCRLWIPGFAELAAPLYALTKPSTPFTWQTEHQLAFEALKKALLSAPALGLPDTSKPFTLFLDERQGIAKGVLTQKLGPWKRPVAYLSKKLDPVAAGWPPCLRIMAATAMLVKDSAKLTLGQPLTVITPHTLEAIVRQPPDRWITNARLTHYQALLLDTDRVQFGPPVTLNPATLLPVPENQPSPHDCRQVLAETHGTREDLKDQELPDADHTWYTDGSSYLDSGTRRAGAAVVDGHNTIWAQSLPPGTSAQKAELIALTKALELSKGKKANIYTDSRYAFATAHTHGSIYERRGWLTSEGKEIKNKAEIIALLKALFLPQEVAIIHCPGHQKGQDPVAVGNRQADRVARQAAMAEVLTLATEPDNTSHITAGKRTADGSEFEKRTADGSEFESPKKKAKVE

SEQ ID NO: 6387 - protein, 2091 aa, synthetic construct
MPAAKRVKLDGGDKKYSIGLDIGTNSVGWAVITDEYKVPSKKFKVLGNTDRHSIKKNLIGALLFDSGETAEATRLKRTARRRYTRRKNRICYLQEIFSNEMAKVDDSFFHRLEESFLVEEDKKHERHPIFGNIVDEVAYHEKYPTIYHLRKKLVDSTDKADLRLIYLALAHMIKFRGHFLIEGDLNPDNSDVDKLFIQLVQTYNQLFEENPINASGVDAKAILSARLSKSRRLENLIAQLPGEKKNGLFGNLIALSLGLTPNFKSNFDLAEDAKLQLSKDTYDDDLDNLLAQIGDQYADLFLAAKNLSDAILLSDILRVNTEITKAPLSASMIKRYDEHHQDLTLLKALVRQQLPEKYKEIFFDQSKNGYAGYIDGGASQEEFYKFIKPILEKMDGTEELLVKLNREDLLRKQRTFDNGSIPHQIHLGELHAILRRQEDFYPFLKDNREKIEKILTFRIPYYVGPLARGNSRFAWMTRKSEETITPWNFEEVVDKGASAQSFIERMTNFDKNLPNEKVLPKHSLLYEYFTVYNELTKVKYVTEGMRKPAFLSGEQKKAIVDLLFKTNRKVTVKQLKEDYFKKIECFDSVEISGVEDRFNASLGTYHDLLKIIKDKDFLDNEENEDILEDIVLTLTLFEDREMIEERLKTYAHLFDDKVMKQLKRRRYTGWGRLSRKLINGIRDKQSGKTILDFLKSDGFANRNFMQLIHDDSLTFKEDIQKAQVSGQGDSLHEHIANLAGSPAIKKGILQTVKVVDELVKVMGRHKPENIVIEMARENQTTQKGQKNSRERMKRIEEGIKELGSQILKEHPVENTQLQNEKLYLYYLQNGRDMYVDQELDINRLSDYDVDHIVPQSFLKDDSIDNKVLTRSDKARGKSDNVPSEEVVKKMKNYWRQLLNAKLITQRKFDNLTKAERGGLSELDKAGFIKRQLVETRQITKHVAQILDSRMNTKYDENDKLIREVKVITLKSKLVSDFRKDFQFYKVREINNYHHAHDAYLNAVVGTALIKKYPKLESEFVYGDYKVYDVRKMIAKSEQEIGKATAKYFFYSNIMNFFKTEITLANGEIRKRPLIETNGETGEIVWDKGRDFATVRKVLSMPQVNIVKKTEVQTGGFSKESILPKRNSDKLIARKKDWDPKKYGGFDSPTVAYSVLVVAKVEKGKSKKLKSVKELLGITIMERSSFEKNPIDFLEAKGYKEVKKDLIIKLPKYSLFELENGRKRMLASAGELQKGNELALPSKYVNFLYLASHYEKLKGSPEDNEQKQLFVEQHKHYLDEIIEQISEFSKRVILADANLDKVLSAYNKHRDKPIREQAENIIHLFTLTNLGAPAAFKYFDTTIDRKRYTSTKEVLDATLIHQSITGLYETRIDLSQLGGDGGEAAAKEAAAKEAAAKGGVPWILKKPLELTIKLDLEEQQGTLLNNSILSKKGKEELKQLFEKYSALWQSWENQVGHRRIRPHKIATGTVKPTPQKQYHINPKAKPDIQIVINDLLKQGVLIQKESTMNTPVYPVPKPNGRWRMVLDYRAVNKVTPLIAVQNQHSYGILGSLFKGRYKTTIDLSNGFWAHPIVPEDYWITAFTWQGKQYCWTVLPQGFLNSPGLFTGDVVDLLQGIPNVEVYVDDVYISHDSEKEHLEYLDILFNRLKEAGYIISLKKSNIANSIVDFLGFQITNEGRGLTDTFKEKLENITAPTTLKQLQSILGLLNFARNFIPDFTELIAPLYALIPKSTKNYVPWQIEHSTTLETLITKLNGAEYLQGRKGDKTLIMKVNASYTTGYIRYYNEGEKKPISYVSIVFSKTELKFTELEKLLTTVHKGLLKALDLSMGQNIHVYSPIVSMQNIQKTPQTAKKALASRWLSWLSYLEDPRIRFFYDPQMPALKDLPAVDTGKDNKKHPSNFQHIFYTDGSAITSPTKEGHLNAGMGIVYFINKDGNLQKQQEWSISLGNHTAQFAEIAAFEFALKKCLPLGGNILVVTDSNYVAKAYNEELDVWASNGFVNNRKKPLKHISKWKSVADLKRLRPDVVVTHEPGHQKLDSSPHAYGNNLADQLATQASFKVHAGKRTADGSEFEKRTADGSEFESPKKKAKVE

SEQ ID NO: 6388 - protein, 2091 aa, synthetic construct
MPAAKRVKLDGGDKKYSIGLDIGTNSVGWAVITDEYKVPSKKFKVLGNTDRHSIKKNLIGALLFDSGETAEATRLKRTARRRYTRRKNRICYLQEIFSNEMAKVDDSFFHRLEESFLVEEDKKHERHPIFGNIVDEVAYHEKYPTIYHLRKKLVDSTDKADLRLIYLALAHMIKFRGHFLIEGDLNPDNSDVDKLFIQLVQTYNQLFEENPINASGVDAKAILSARLSKSRRLENLIAQLPGEKKNGLFGNLIALSLGLTPNFKSNFDLAEDAKLQLSKDTYDDDLDNLLAQIGDQYADLFLAAKNLSDAILLSDILRVNTEITKAPLSASMIKRYDEHHQDLTLLKALVRQQLPEKYKEIFFDQSKNGYAGYIDGGASQEEFYKFIKPILEKMDGTEELLVKLNREDLLRKQRTFDNGSIPHQIHLGELHAILRRQEDFYPFLKDNREKIEKILTFRIPYYVGPLARGNSRFAWMTRKSEETITPWNFEEVVDKGASAQSFIERMTNFDKNLPNEKVLPKHSLLYEYFTVYNELTKVKYVTEGMRKPAFLSGEQKKAIVDLLFKTNRKVTVKQLKEDYFKKIECFDSVEISGVEDRFNASLGTYHDLLKIIKDKDFLDNEENEDILEDIVLTLTLFEDREMIEERLKTYAHLFDDKVMKQLKRRRYTGWGRLSRKLINGIRDKQSGKTILDFLKSDGFANRNFMQLIHDDSLTFKEDIQKAQVSGQGDSLHEHIANLAGSPAIKKGILQTVKVVDELVKVMGRHKPENIVIEMARENQTTQKGQKNSRERMKRIEEGIKELGSQILKEHPVENTQLQNEKLYLYYLQNGRDMYVDQELDINRLSDYDVDHIVPQSFLKDDSIDNKVLTRSDKARGKSDNVPSEEVVKKMKNYWRQLLNAKLITQRKFDNLTKAERGGLSELDKAGFIKRQLVETRQITKHVAQILDSRMNTKYDENDKLIREVKVITLKSKLVSDFRKDFQFYKVREINNYHHAHDAYLNAVVGTALIKKYPKLESEFVYGDYKVYDVRKMIAKSEQEIGKATAKYFFYSNIMNFFKTEITLANGEIRKRPLIETNGETGEIVWDKGRDFATVRKVLSMPQVNIVKKTEVQTGGFSKESILPKRNSDKLIARKKDWDPKKYGGFDSPTVAYSVLVVAKVEKGKSKKLKSVKELLGITIMERSSFEKNPIDFLEAKGYKEVKKDLIIKLPKYSLFELENGRKRMLASAGELQKGNELALPSKYVNFLYLASHYEKLKGSPEDNEQKQLFVEQHKHYLDEIIEQISEFSKRVILADANLDKVLSAYNKHRDKPIREQAENIIHLFTLTNLGAPAAFKYFDTTIDRKRYTSTKEVLDATLIHQSITGLYETRIDLSQLGGDGGEAAAKEAAAKEAAAKGGVPWLTQQPLQLTILVPLQEYQEKILSKTALPEDQKQQLKTLFVKYDNLWQHWENQVGHRKIRPHNIATGDYPPRPQKQYPINPKAKPSIQIVIDDLLKQGVLTPQNSTMNTPVYPVPKPDGRWRMVLDYREVNKTIPLTAAQNQHSAGILATIVRQKYKTTLDLANGFWAHPITPESYWLTAFTWQGKQYCWTRLPQGFLNSPALFNADVVDLLKEIPNVQVYVDDIYLSHDDPKEHVQQLEKVFQILLQAGYVVSLKKSEIGQKTVEFLGFNITKEGRGLTDTFKTKLLNITPPKDLKQLQSILGLLNFARNFIPNFAELVQPLYNLIAPAKGKYIEWSEENTKQLNMVIEALNTASNLEERLPEQRLVIKVNTSPSAGYVRYYNETGKKPIMYLNYVFSKAELKFSMLEKLLTTMHKALIKAMDLAMGQEILVYSPIVSMTKIQKTPLPERKALPIRWITWMTYLEDPRIQFHYDKTLPELKHIPDVYTSSQSPVKHPSQYEGVFYTDGSAIKSPDPTKSNNAGMGIVHATYKPEYQVLNQWSIPLGNHTAQMAEIAAVEFACKKALKIPGPVLVITDSFYVAESANKELPYWKSNGFVNNKKKPLKHISKWKSIAECLSMKPDITIQHEKGISLQIPVFILKGNALADKLATQGSYVVNAGKRTADGSEFEKRTADGSEFESPKKKAKVE

SEQ ID NO: 6389 - protein, 2091 aa, synthetic construct
MPAAKRVKLDGGDKKYSIGLDIGTNSVGWAVITDEYKVPSKKFKVLGNTDRHSIKKNLIGALLFDSGETAEATRLKRTARRRYTRRKNRICYLQEIFSNEMAKVDDSFFHRLEESFLVEEDKKHERHPIFGNIVDEVAYHEKYPTIYHLRKKLVDSTDKADLRLIYLALAHMIKFRGHFLIEGDLNPDNSDVDKLFIQLVQTYNQLFEENPINASGVDAKAILSARLSKSRRLENLIAQLPGEKKNGLFGNLIALSLGLTPNFKSNFDLAEDAKLQLSKDTYDDDLDNLLAQIGDQYADLFLAAKNLSDAILLSDILRVNTEITKAPLSASMIKRYDEHHQDLTLLKALVRQQLPEKYKEIFFDQSKNGYAGYIDGGASQEEFYKFIKPILEKMDGTEELLVKLNREDLLRKQRTFDNGSIPHQIHLGELHAILRRQEDFYPFLKDNREKIEKILTFRIPYYVGPLARGNSRFAWMTRKSEETITPWNFEEVVDKGASAQSFIERMTNFDKNLPNEKVLPKHSLLYEYFTVYNELTKVKYVTEGMRKPAFLSGEQKKAIVDLLFKTNRKVTVKQLKEDYFKKIECFDSVEISGVEDRFNASLGTYHDLLKIIKDKDFLDNEENEDILEDIVLTLTLFEDREMIEERLKTYAHLFDDKVMKQLKRRRYTGWGRLSRKLINGIRDKQSGKTILDFLKSDGFANRNFMQLIHDDSLTFKEDIQKAQVSGQGDSLHEHIANLAGSPAIKKGILQTVKVVDELVKVMGRHKPENIVIEMARENQTTQKGQKNSRERMKRIEEGIKELGSQILKEHPVENTQLQNEKLYLYYLQNGRDMYVDQELDINRLSDYDVDHIVPQSFLKDDSIDNKVLTRSDKARGKSDNVPSEEVVKKMKNYWRQLLNAKLITQRKFDNLTKAERGGLSELDKAGFIKRQLVETRQITKHVAQILDSRMNTKYDENDKLIREVKVITLKSKLVSDFRKDFQFYKVREINNYHHAHDAYLNAVVGTALIKKYPKLESEFVYGDYKVYDVRKMIAKSEQEIGKATAKYFFYSNIMNFFKTEITLANGEIRKRPLIETNGETGEIVWDKGRDFATVRKVLSMPQVNIVKKTEVQTGGFSKESILPKRNSDKLIARKKDWDPKKYGGFDSPTVAYSVLVVAKVEKGKSKKLKSVKELLGITIMERSSFEKNPIDFLEAKGYKEVKKDLIIKLPKYSLFELENGRKRMLASAGELQKGNELALPSKYVNFLYLASHYEKLKGSPEDNEQKQLFVEQHKHYLDEIIEQISEFSKRVILADANLDKVLSAYNKHRDKPIREQAENIIHLFTLTNLGAPAAFKYFDTTIDRKRYTSTKEVLDATLIHQSITGLYETRIDLSQLGGDGGEAAAKEAAAKEAAAKGGVPWLTQQPLQLTILVPLQEYQEKILSKTALPEDQKQQLKTLFVKYDNLWQHWENQVGHRKIRPHNIATGDYPPRPQKQYPINPKAKPSIQIVIDDLLKQGVLTPQNSTMNTPVYPVPKPDGRWRMVLDYREVNKTIPLTAAQNQHSAGILATIVRQKYKTTLDLANGFWAHPITPESYWLTAFTWQGKQYCWTRLPQGFLNSPALFNADVVDLLKEIPNVQVYVDDIYLSHDDPKEHVQQLEKVFQILLQAGYVVSLKKSEIGQKTVEFLGFNITKEGRGLTDTFKTKLLNITPPKDLKQLQSILGKLNFARNFIPNFAELVQPLYNLIAPAKGKYIEWSEENTKQLNMVIEALNTASNLEERLPEQRLVIKVNTSPSAGYVRYYNETGKKPIMYLNYVFSKAELKFSMLEKLLTTMHKALIKAMDLAMGQEILVYSPIVSMTKIQKTPLPERKALPIRWITWMTYLEDPRIQFHYDKTLPELKHIPDVYTSSQSPVKHPSQYEGVFYTDGSAIKSPDPTKSNNAGMGIVHATYKPEYQVLNQWSIPLGNHTAQMAEIAAVEFACKKALKIPGPVLVITDSFYVAESANKELPYWKSNGFVNNKKKPLKHISKWKSIAECLSMKPDITIQHEKGISLQIPVFILKGNALADKLATQGSYVVNAGKRTADGSEFEKRTADGSEFESPKKKAKVE

SEQ ID NO: 6390 - protein, 2222 aa, synthetic construct
MPAAKRVKLDGGDKKYSIGLDIGTNSVGWAVITDEYKVPSKKFKVLGNTDRHSIKKNLIGALLFDSGETAEATRLKRTARRRYTRRKNRICYLQEIFSNEMAKVDDSFFHRLEESFLVEEDKKHERHPIFGNIVDEVAYHEKYPTIYHLRKKLVDSTDKADLRLIYLALAHMIKFRGHFLIEGDLNPDNSDVDKLFIQLVQTYNQLFEENPINASGVDAKAILSARLSKSRRLENLIAQLPGEKKNGLFGNLIALSLGLTPNFKSNFDLAEDAKLQLSKDTYDDDLDNLLAQIGDQYADLFLAAKNLSDAILLSDILRVNTEITKAPLSASMIKRYDEHHQDLTLLKALVRQQLPEKYKEIFFDQSKNGYAGYIDGGASQEEFYKFIKPILEKMDGTEELLVKLNREDLLRKQRTFDNGSIPHQIHLGELHAILRRQEDFYPFLKDNREKIEKILTFRIPYYVGPLARGNSRFAWMTRKSEETITPWNFEEVVDKGASAQSFIERMTNFDKNLPNEKVLPKHSLLYEYFTVYNELTKVKYVTEGMRKPAFLSGEQKKAIVDLLFKTNRKVTVKQLKEDYFKKIECFDSVEISGVEDRFNASLGTYHDLLKIIKDKDFLDNEENEDILEDIVLTLTLFEDREMIEERLKTYAHLFDDKVMKQLKRRRYTGWGRLSRKLINGIRDKQSGKTILDFLKSDGFANRNFMQLIHDDSLTFKEDIQKAQVSGQGDSLHEHIANLAGSPAIKKGILQTVKVVDELVKVMGRHKPENIVIEMARENQTTQKGQKNSRERMKRIEEGIKELGSQILKEHPVENTQLQNEKLYLYYLQNGRDMYVDQELDINRLSDYDVDHIVPQSFLKDDSIDNKVLTRSDKARGKSDNVPSEEVVKKMKNYWRQLLNAKLITQRKFDNLTKAERGGLSELDKAGFIKRQLVETRQITKHVAQILDSRMNTKYDENDKLIREVKVITLKSKLVSDFRKDFQFYKVREINNYHHAHDAYLNAVVGTALIKKYPKLESEFVYGDYKVYDVRKMIAKSEQEIGKATAKYFFYSNIMNFFKTEITLANGEIRKRPLIETNGETGEIVWDKGRDFATVRKVLSMPQVNIVKKTEVQTGGFSKESILPKRNSDKLIARKKDWDPKKYGGFDSPTVAYSVLVVAKVEKGKSKKLKSVKELLGITIMERSSFEKNPIDFLEAKGYKEVKKDLIIKLPKYSLFELENGRKRMLASAGELQKGNELALPSKYVNFLYLASHYEKLKGSPEDNEQKQLFVEQHKHYLDEIIEQISEFSKRVILADANLDKVLSAYNKHRDKPIREQAENIIHLFTLTNLGAPAAFKYFDTTIDRKRYTSTKEVLDATLIHQSITGLYETRIDLSQLGGDGGEAAAKEAAAKEAAAKGGTLGDQGSRGSDPLPEPRVTLTVEGIPTEFLVNTGAEHSVLTKPMGKMGSKRTVVAGATGSKVYPWTTKRLLKIGQKQVTHSFLVIPECPAPLLGRDLLTKLKAQIQFSTEGPQVTWEDRPAMCLVLNLEEEYRLHEKPVPPSIDPSWLQLFPMVWAEKAGMGLANQVPPVVVELKSDASPVAVRQYPMSKEAREGIRPHIQRFLDLGILVPCQSPWNTPLLPVKKPGTNDYRPVQDLREVNKRVQDIHPTVPNPYNLLSSLPPSHTWYSVLDLKDAFFCLKLHPNSQPLFAFEWRDPEKGNTGQLTWTRLPQGFKNSPTLFDEALHRDLASFRALNPQVVMLQYVDDLLVAAPTYRDCKEGTRRLLQELSKLGYRVSAKKAQLCREEVTYLGYLLKGGKRWLTPARKATVMKIPTPTTPRQVREFLGTAGFCRLWIPGFASLAAPLYPLTREKVPFTWTEAHQEAFGRIKEALLSAPALALPDLTKPFALYVDEKEGVARGVLTQTLGPWRRPVAYLSKKLDPVASGWPTCLKAIAAVALLLKDADKLTLGQNVLVIAPHNLESIVRQPPDRWMTNARMTHYQSLLLNERVSFAPPAILNPATLLPVESDDTPIHICSEILAEETGTRPDLRDQPLPGVPAWYTDGSSFIMDGRRQAGAAIVDNKRTVWASNLPEGTSAQKAELIALTQALRLAEGKSINIYTDSRYAFATAHVHGAIYKQRGLLTSAGKDIKNKEEILALLEAIHLPKRVAIIHCPGHQRGTDPVATGNRKADEAAKQAAQSTRILTETTKNAGKRTADGSEFEKRTADGSEFESPKKKAKVE

SEQ ID NO: 6391 - protein, 2131 aa, synthetic construct
MPAAKRVKLDGGDKKYSIGLDIGTNSVGWAVITDEYKVPSKKFKVLGNTDRHSIKKNLIGALLFDSGETAEATRLKRTARRRYTRRKNRICYLQEIFSNEMAKVDDSFFHRLEESFLVEEDKKHERHPIFGNIVDEVAYHEKYPTIYHLRKKLVDSTDKADLRLIYLALAHMIKFRGHFLIEGDLNPDNSDVDKLFIQLVQTYNQLFEENPINASGVDAKAILSARLSKSRRLENLIAQLPGEKKNGLFGNLIALSLGLTPNFKSNFDLAEDAKLQLSKDTYDDDLDNLLAQIGDQYADLFLAAKNLSDAILLSDILRVNTEITKAPLSASMIKRYDEHHQDLTLLKALVRQQLPEKYKEIFFDQSKNGYAGYIDGGASQEEFYKFIKPILEKMDGTEELLVKLNREDLLRKQRTFDNGSIPHQIHLGELHAILRRQEDFYPFLKDNREKIEKILTFRIPYYVGPLARGNSRFAWMTRKSEETITPWNFEEVVDKGASAQSFIERMTNFDKNLPNEKVLPKHSLLYEYFTVYNELTKVKYVTEGMRKPAFLSGEQKKAIVDLLFKTNRKVTVKQLKEDYFKKIECFDSVEISGVEDRFNASLGTYHDLLKIIKDKDFLDNEENEDILEDIVLTLTLFEDREMIEERLKTYAHLFDDKVMKQLKRRRYTGWGRLSRKLINGIRDKQSGKTILDFLKSDGFANRNFMQLIHDDSLTFKEDIQKAQVSGQGDSLHEHIANLAGSPAIKKGILQTVKVVDELVKVMGRHKPENIVIEMARENQTTQKGQKNSRERMKRIEEGIKELGSQILKEHPVENTQLQNEKLYLYYLQNGRDMYVDQELDINRLSDYDVDHIVPQSFLKDDSIDNKVLTRSDKARGKSDNVPSEEVVKKMKNYWRQLLNAKLITQRKFDNLTKAERGGLSELDKAGFIKRQLVETRQITKHVAQILDSRMNTKYDENDKLIREVKVITLKSKLVSDFRKDFQFYKVREINNYHHAHDAYLNAVVGTALIKKYPKLESEFVYGDYKVYDVRKMIAKSEQEIGKATAKYFFYSNIMNFFKTEITLANGEIRKRPLIETNGETGEIVWDKGRDFATVRKVLSMPQVNIVKKTEVQTGGFSKESILPKRNSDKLIARKKDWDPKKYGGFDSPTVAYSVLVVAKVEKGKSKKLKSVKELLGITIMERSSFEKNPIDFLEAKGYKEVKKDLIIKLPKYSLFELENGRKRMLASAGELQKGNELALPSKYVNFLYLASHYEKLKGSPEDNEQKQLFVEQHKHYLDEIIEQISEFSKRVILADANLDKVLSAYNKHRDKPIREQAENIIHLFTLTNLGAPAAFKYFDTTIDRKRYTSTKEVLDATLIHQSITGLYETRIDLSQLGGDGGEAAAKEAAAKEAAAKGGLLGRDLLTKLKAQIQFSTEGPQVTWEDRPAMCLVLNLEEEYRLHEKPVPPSIDPSWLQLFPMVWAEKAGMGLANQVPPVVVELKSDASPVAVRQYPMSKEAREGIRPHIQRFLDLGILVPCQSPWNTPLLPVKKPGTNDYRPVQDLREVNKRVQDIHPTVPNPYNLLSSLPPSHTWYSVLDLKDAFFCLKLHPNSQPLFAFEWRDPEKGNTGQLTWTRLPQGFKNSPTLFNEALHRDLASFRALNPQVVMLQYVDDLLVAAPTYRDCKEGTRRLLQELSKLGYRVSAKKAQLCREEVTYLGYLLKGGKRWLTPARKATVMKIPTPTTPRQVREFLGKAGFCRLFIPGFASLAAPLYPLTRPKVPFTWTEAHQEAFGRIKEALLSAPALALPDLTKPFALYVDEKEGVARGVLTQTLGPWRRPVAYLSKKLDPVASGWPTCLKAIAAVALLLKDADKLTLGQNVLVIAPHNLESIVRQPPDRWMTNARMTHYQSLLLNERVSFAPPAILNPATLLPVESDDTPIHICSEILAEETGTRPDLRDQPLPGVPAWYTDGSSFIMDGRRQAGAAIVDNKRTVWASNLPEGTSAQKAELIALTQALRLAEGKSINIYTDSRYAFATAHVHGAIYKQRGWLTSAGKDIKNKEEILALLEAIHLPKRVAIIHCPGHQRGTDPVATGNRKADEAAKQAAQSTRILTETTKNAGKRTADGSEFEKRTADGSEFESPKKKAKVE

SEQ ID NO: 6392 - protein, 2222 aa, synthetic construct
MPAAKRVKLDGGDKKYSIGLDIGTNSVGWAVITDEYKVPSKKFKVLGNTDRHSIKKNLIGALLFDSGETAEATRLKRTARRRYTRRKNRICYLQEIFSNEMAKVDDSFFHRLEESFLVEEDKKHERHPIFGNIVDEVAYHEKYPTIYHLRKKLVDSTDKADLRLIYLALAHMIKFRGHFLIEGDLNPDNSDVDKLFIQLVQTYNQLFEENPINASGVDAKAILSARLSKSRRLENLIAQLPGEKKNGLFGNLIALSLGLTPNFKSNFDLAEDAKLQLSKDTYDDDLDNLLAQIGDQYADLFLAAKNLSDAILLSDILRVNTEITKAPLSASMIKRYDEHHQDLTLLKALVRQQLPEKYKEIFFDQSKNGYAGYIDGGASQEEFYKFIKPILEKMDGTEELLVKLNREDLLRKQRTFDNGSIPHQIHLGELHAILRRQEDFYPFLKDNREKIEKILTFRIPYYVGPLARGNSRFAWMTRKSEETITPWNFEEVVDKGASAQSFIERMTNFDKNLPNEKVLPKHSLLYEYFTVYNELTKVKYVTEGMRKPAFLSGEQKKAIVDLLFKTNRKVTVKQLKEDYFKKIECFDSVEISGVEDRFNASLGTYHDLLKIIKDKDFLDNEENEDILEDIVLTLTLFEDREMIEERLKTYAHLFDDKVMKQLKRRRYTGWGRLSRKLINGIRDKQSGKTILDFLKSDGFANRNFMQLIHDDSLTFKEDIQKAQVSGQGDSLHEHIANLAGSPAIKKGILQTVKVVDELVKVMGRHKPENIVIEMARENQTTQKGQKNSRERMKRIEEGIKELGSQILKEHPVENTQLQNEKLYLYYLQNGRDMYVDQELDINRLSDYDVDHIVPQSFLKDDSIDNKVLTRSDKARGKSDNVPSEEVVKKMKNYWRQLLNAKLITQRKFDNLTKAERGGLSELDKAGFIKRQLVETRQITKHVAQILDSRMNTKYDENDKLIREVKVITLKSKLVSDFRKDFQFYKVREINNYHHAHDAYLNAVVGTALIKKYPKLESEFVYGDYKVYDVRKMIAKSEQEIGKATAKYFFYSNIMNFFKTEITLANGEIRKRPLIETNGETGEIVWDKGRDFATVRKVLSMPQVNIVKKTEVQTGGFSKESILPKRNSDKLIARKKDWDPKKYGGFDSPTVAYSVLVVAKVEKGKSKKLKSVKELLGITIMERSSFEKNPIDFLEAKGYKEVKKDLIIKLPKYSLFELENGRKRMLASAGELQKGNELALPSKYVNFLYLASHYEKLKGSPEDNEQKQLFVEQHKHYLDEIIEQISEFSKRVILADANLDKVLSAYNKHRDKPIREQAENIIHLFTLTNLGAPAAFKYFDTTIDRKRYTSTKEVLDATLIHQSITGLYETRIDLSQLGGDGGEAAAKEAAAKEAAAKGGTLGDQGSRGSDPLPEPRVTLTVEGIPTEFLVNTGAEHSVLTKPMGKMGSKRTVVAGATGSKVYPWTTKRLLKIGQKQVTHSFLVIPECPAPLLGRDLLTKLKAQIQFSTEGPQVTWEDRPAMCLVLNLEEEYRLHEKPVPPSIDPSWLQLFPMVWAEKAGMGLANQVPPVVVELKSDASPVAVRQYPMSKEAREGIRPHIQRFLDLGILVPCQSPWNTPLLPVKKPGTNDYRPVQDLREVNKRVQDIHPTVPNPYNLLSSLPPSHTWYSVLDLKDAFFCLKLHPNSQPLFAFEWRDPEKGNTGQLTWTRLPQGFKNSPTLFNEALHRDLASFRALNPQVVMLQYVDDLLVAAPTYRDCKEGTRRLLQELSKLGYRVSAKKAQLCREEVTYLGYLLKGGKRWLTPARKATVMKIPTPTTPRQVREFLGKAGFCRLFIPGFASLAAPLYPLTRPKVPFTWTEAHQEAFGRIKEALLSAPALALPDLTKPFALYVDEKEGVARGVLTQTLGPWRRPVAYLSKKLDPVASGWPTCLKAIAAVALLLKDADKLTLGQNVLVIAPHNLESIVRQPPDRWMTNARMTHYQSLLLNERVSFAPPAILNPATLLPVESDDTPIHICSEILAEETGTRPDLRDQPLPGVPAWYTDGSSFIMDGRRQAGAAIVDNKRTVWASNLPEGTSAQKAELIALTQALRLAEGKSINIYTDSRYAFATAHVHGAIYKQRGWLTSAGKDIKNKEEILALLEAIHLPKRVAIIHCPGHQRGTDPVATGNRKADEAAKQAAQSTRILTETTKNAGKRTADGSEFEKRTADGSEFESPKKKAKVE

SEQ ID NO: 6393 - protein, 2100 aa, synthetic construct
MPAAKRVKLDGGDKKYSIGLDIGTNSVGWAVITDEYKVPSKKFKVLGNTDRHSIKKNLIGALLFDSGETAEATRLKRTARRRYTRRKNRICYLQEIFSNEMAKVDDSFFHRLEESFLVEEDKKHERHPIFGNIVDEVAYHEKYPTIYHLRKKLVDSTDKADLRLIYLALAHMIKFRGHFLIEGDLNPDNSDVDKLFIQLVQTYNQLFEENPINASGVDAKAILSARLSKSRRLENLIAQLPGEKKNGLFGNLIALSLGLTPNFKSNFDLAEDAKLQLSKDTYDDDLDNLLAQIGDQYADLFLAAKNLSDAILLSDILRVNTEITKAPLSASMIKRYDEHHQDLTLLKALVRQQLPEKYKEIFFDQSKNGYAGYIDGGASQEEFYKFIKPILEKMDGTEELLVKLNREDLLRKQRTFDNGSIPHQIHLGELHAILRRQEDFYPFLKDNREKIEKILTFRIPYYVGPLARGNSRFAWMTRKSEETITPWNFEEVVDKGASAQSFIERMTNFDKNLPNEKVLPKHSLLYEYFTVYNELTKVKYVTEGMRKPAFLSGEQKKAIVDLLFKTNRKVTVKQLKEDYFKKIECFDSVEISGVEDRFNASLGTYHDLLKIIKDKDFLDNEENEDILEDIVLTLTLFEDREMIEERLKTYAHLFDDKVMKQLKRRRYTGWGRLSRKLINGIRDKQSGKTILDFLKSDGFANRNFMQLIHDDSLTFKEDIQKAQVSGQGDSLHEHIANLAGSPAIKKGILQTVKVVDELVKVMGRHKPENIVIEMARENQTTQKGQKNSRERMKRIEEGIKELGSQILKEHPVENTQLQNEKLYLYYLQNGRDMYVDQELDINRLSDYDVDHIVPQSFLKDDSIDNKVLTRSDKARGKSDNVPSEEVVKKMKNYWRQLLNAKLITQRKFDNLTKAERGGLSELDKAGFIKRQLVETRQITKHVAQILDSRMNTKYDENDKLIREVKVITLKSKLVSDFRKDFQFYKVREINNYHHAHDAYLNAVVGTALIKKYPKLESEFVYGDYKVYDVRKMIAKSEQEIGKATAKYFFYSNIMNFFKTEITLANGEIRKRPLIETNGETGEIVWDKGRDFATVRKVLSMPQVNIVKKTEVQTGGFSKESILPKRNSDKLIARKKDWDPKKYGGFDSPTVAYSVLVVAKVEKGKSKKLKSVKELLGITIMERSSFEKNPIDFLEAKGYKEVKKDLIIKLPKYSLFELENGRKRMLASAGELQKGNELALPSKYVNFLYLASHYEKLKGSPEDNEQKQLFVEQHKHYLDEIIEQISEFSKRVILADANLDKVLSAYNKHRDKPIREQAENIIHLFTLTNLGAPAAFKYFDTTIDRKRYTSTKEVLDATLIHQSITGLYETRIDLSQLGGDGGEAAAKEAAAKEAAAKGGLGIEDEYRLHETSTEPDVSLGSTWLSDFPQAWAETGGMGLAVRQAPLIIPLKATSTPVSIQQYPMSHEARLGIKPHIQRLLDQGILVPCQSPWNTPLLPVKKPGTNDYRPVQDLREVNKRVEDIHPTVPNPYNLLSGLPPSHQWYTVLDLKDAFFCLRLHPTSQPLFAFEWRDPGMGISGQLTWTRLPQGFKNSPTLFNEALHRDLADFRIQHPDLILLQYVDDILLAATSELDCQQGTRALLQTLGDLGYRASAKKAQICQKQVKYLGYLLREGQRWLTEARKETVMGQPVPKTPRQLREFLGKAGFCRLFIPGFAEMAAPLYPLTKPGTLFSWGPDQQKAYQEIKQALLTAPALGLPDLTKPFELFVDEKQGYAKGVLTQKLGPWRRPVAYLSKKLDPVAAGWPPCLRMVAAIAVLTKDAGKLTMGQPLVILAPHAVEALVKQPPDRWLSNARMTHYQAMLLDTDRVQFGPVVALNPATLLPLPEEGAPHDCLEILAETHGTRPDLTDQPIPDADHTWYTDGSSFLQEGQRKAGAAVTTETEVIWAGALPAGTSAQRAELIALTQALKMAEGKRLNVYTDSRYAFATAHIHGEIYRRRGWLTSEGREIKNKSEILALLKALFLPKRLSIIHCLGHQKGDSAEARGNRLADQAAREAAIKTPPDTSTLLIAGKRTADGSEFEKRTADGSEFESPKKKAKVE

SEQ ID NO: 6394 - protein, 2100 aa, synthetic construct; identical to SEQ ID NO: 6393

SEQ ID NO: 6395 - protein, 2100 aa, synthetic construct
MPAAKRVKLDGGDKKYSIGLDIGTNSVGWAVITDEYKVPSKKFKVLGNTDRHSIKKNLIGALLFDSGETAEATRLKRTARRRYTRRKNRICYLQEIFSNEMAKVDDSFFHRLEESFLVEEDKKHERHPIFGNIVDEVAYHEKYPTIYHLRKKLVDSTDKADLRLIYLALAHMIKFRGHFLIEGDLNPDNSDVDKLFIQLVQTYNQLFEENPINASGVDAKAILSARLSKSRRLENLIAQLPGEKKNGLFGNLIALSLGLTPNFKSNFDLAEDAKLQLSKDTYDDDLDNLLAQIGDQYADLFLAAKNLSDAILLSDILRVNTEITKAPLSASMIKRYDEHHQDLTLLKALVRQQLPEKYKEIFFDQSKNGYAGYIDGGASQEEFYKFIKPILEKMDGTEELLVKLNREDLLRKQRTFDNGSIPHQIHLGELHAILRRQEDFYPFLKDNREKIEKILTFRIPYYVGPLARGNSRFAWMTRKSEETITPWNFEEVVDKGASAQSFIERMTNFDKNLPNEKVLPKHSLLYEYFTVYNELTKVKYVTEGMRKPAFLSGEQKKAIVDLLFKTNRKVTVKQLKEDYFKKIECFDSVEISGVEDRFNASLGTYHDLLKIIKDKDFLDNEENEDILEDIVLTLTLFEDREMIEERLKTYAHLFDDKVMKQLKRRRYTGWGRLSRKLINGIRDKQSGKTILDFLKSDGFANRNFMQLIHDDSLTFKEDIQKAQVSGQGDSLHEHIANLAGSPAIKKGILQTVKVVDELVKVMGRHKPENIVIEMARENQTTQKGQKNSRERMKRIEEGIKELGSQILKEHPVENTQLQNEKLYLYYLQNGRDMYVDQELDINRLSDYDVDHIVPQSFLKDDSIDNKVLTRSDKARGKSDNVPSEEVVKKMKNYWRQLLNAKLITQRKFDNLTKAERGGLSELDKAGFIKRQLVETRQITKHVAQILDSRMNTKYDENDKLIREVKVITLKSKLVSDFRKDFQFYKVREINNYHHAHDAYLNAVVGTALIKKYPKLESEFVYGDYKVYDVRKMIAKSEQEIGKATAKYFFYSNIMNFFKTEITLANGEIRKRPLIETNGETGEIVWDKGRDFATVRKVLSMPQVNIVKKTEVQTGGFSKESILPKRNSDKLIARKKDWDPKKYGGFDSPTVAYSVLVVAKVEKGKSKKLKSVKELLGITIMERSSFEKNPIDFLEAKGYKEVKKDLIIKLPKYSLFELENGRKRMLASAGELQKGNELALPSKYVNFLYLASHYEKLKGSPEDNEQKQLFVEQHKHYLDEIIEQISEFSKRVILADANLDKVLSAYNKHRDKPIREQAENIIHLFTLTNLGAPAAFKYFDTTIDRKRYTSTKEVLDATLIHQSITGLYETRIDLSQLGGDGGEAAAKEAAAKEAAAKGGTLNIEDEYRLHETSKGPDVPLGSTWLSDFPQAWAETGGMGLAVRQAPLIIPLKATSTPVSIKQYPMSQEARLGIKPHIQRLLDQGILVPCQSPWNTPLLPVKKPGTNDYRPVQDLREVNKRVEDIHPTVPNPYNLLSGLPPSHQWYTVLDLKDAFFCLRLHPTSQSLFAFEWRDPEMGISGQLTWTRLPQGFKNSPTLFNEALHRDLADFRIQHPDLILLQYVDDLLLAATSELDCQQGTRALLQTLGDLGYRASAKKAQICQKQVKYLGYLLKEGQRWLTEARKETVMGQPTPKTPRQLREFLGTAGFCRLWIPGFAEMAAPLYPLTKPGTLFEWGPDQQKAYQEIKQALLTAPALGLPDLTKPFELFVDEKQGYAKGVLTQKLGPWRRPVAYLSKKLDPVAAGWPPCLRMVAAIAVLTKDAGKLTMGQPLVILAPHAVEALVKQPPDRWLSNARMTHYQALLLDTDRVQFGPIVALNPATLLPLPEEGLQHDCLDILAEAHGTRPDLTDQPLPDADHTWYTDGSSFLQEGQRKAGAAVTTETEVVWAKALPAGTSAQRAELIALTQALKMAEGKKLNVYTDSRYAFATAHIHGEIYRRRGWLTSEGKEIKNKDEILALLKALFLPKRLSIIHCPGHQKGNRAEARGNRMADQAAREVATRETPETSTLLAGKRTADGSEFEKRTADGSEFESPKKKAKVE

SEQ ID NO: 6396 - protein, 2100 aa, synthetic construct
MPAAKRVKLDGGDKKYSIGLDIGTNSVGWAVITDEYKVPSKKFKVLGNTDRHSIKKNLIGALLFDSGETAEATRLKRTARRRYTRRKNRICYLQEIFSNEMAKVDDSFFHRLEESFLVEEDKKHERHPIFGNIVDEVAYHEKYPTIYHLRKKLVDSTDKADLRLIYLALAHMIKFRGHFLIEGDLNPDNSDVDKLFIQLVQTYNQLFEENPINASGVDAKAILSARLSKSRRLENLIAQLPGEKKNGLFGNLIALSLGLTPNFKSNFDLAEDAKLQLSKDTYDDDLDNLLAQIGDQYADLFLAAKNLSDAILLSDILRVNTEITKAPLSASMIKRYDEHHQDLTLLKALVRQQLPEKYKEIFFDQSKNGYAGYIDGGASQEEFYKFIKPILEKMDGTEELLVKLNREDLLRKQRTFDNGSIPHQIHLGELHAILRRQEDFYPFLKDNREKIEKILTFRIPYYVGPLARGNSRFAWMTRKSEETITPWNFEEVVDKGASAQSFIERMTNFDKNLPNEKVLPKHSLLYEYFTVYNELTKVKYVTEGMRKPAFLSGEQKKAIVDLLFKTNRKVTVKQLKEDYFKKIECFDSVEISGVEDRFNASLGTYHDLLKIIKDKDFLDNEENEDILEDIVLTLTLFEDREMIEERLKTYAHLFDDKVMKQLKRRRYTGWGRLSRKLINGIRDKQSGKTILDFLKSDGFANRNFMQLIHDDSLTFKEDIQKAQVSGQGDSLHEHIANLAGSPAIKKGILQTVKVVDELVKVMGRHKPENIVIEMARENQTTQKGQKNSRERMKRIEEGIKELGSQILKEHPVENTQLQNEKLYLYYLQNGRDMYVDQELDINRLSDYDVDHIVPQSFLKDDSIDNKVLTRSDKARGKSDNVPSEEVVKKMKNYWRQLLNAKLITQRKFDNLTKAERGGLSELDKAGFIKRQLVETRQITKHVAQILDSRMNTKYDENDKLIREVKVITLKSKLVSDFRKDFQFYKVREINNYHHAHDAYLNAVVGTALIKKYPKLESEFVYGDYKVYDVRKMIAKSEQEIGKATAKYFFYSNIMNFFKTEITLANGEIRKRPLIETNGETGEIVWDKGRDFATVRKVLSMPQVNIVKKTEVQTGGFSKESILPKRNSDKLIARKKDWDPKKYGGFDSPTVAYSVLVVAKVEKGKSKKLKSVKELLGITIMERSSFEKNPIDFLEAKGYKEVKKDLIIKLPKYSLFELENGRKRMLASAGELQKGNELALPSKYVNFLYLASHYEKLKGSPEDNEQKQLFVEQHKHYLDEIIEQISEFSKRVILADANLDKVLSAYNKHRDKPIREQAENIIHLFTLTNLGAPAAFKYFDTTIDRKRYTSTKEVLDATLIHQSITGLYETRIDLSQLGGDGGEAAAKEAAAKEAAAKGGTLNIEDEYRLHEISTEPDVSPGSTWLSDFPQAWAETGGMGLAVRQAPLIIPLKATSTPVSIKQYPMSQEAKLGIKPHIQRLLDQGILVPCQSPWNTPLLPVKKPGTNDYRPVQGLREVNKRVEDIHPTVPNPYNLLSGLPTSHRWYTVLDLKDAFFCLRLHPTSQPLFASEWRDPGMGISGQLTWTRLPQGFKNSPTLFDEALHRGLADFRIQHPDLILLQYVDDLLLAATSELDCQQGTRALLKTLGNLGYRASAKKAQICQKQVKYLGYLLREGQRWLTEARKETVMGQPTPKTPRQLREFLGTAGFCRLWIPRFAEMAAPLYPLTKTGTLFNWGPDQQKAYHEIKQALLTAPALGLPDLTKPFELFVDEKQGYAKGVLTQKLGPWRRPVAYLSKKLDPVAAGWPPCLRMVAAIAVLTKDAGKLTMGQPLVILAPHAVEALVKQPPDRWLSNARMTHYQAMLLDTDRVQFGPVVALNPATLLPLPEEGAPHDCLEILAETHGTEPDLTDQPIPDADHTWYTDGSSFLQEGQRKAGAAVTTETEVIWARALPAGTSAQRAELIALTQALKMAEGKRLNVYTDSRYAFATAHIHGEIYKRRGLLTSEGREIKNKSEILALLKALFLPKRLSIIHCLGHQKGDSAEARGNRLADQAAREAAIKTPPDTSTLLAGKRTADGSEFEKRTADGSEFESPKKKAKVE

SEQ ID NO: 6397 - protein, 2120 aa, synthetic construct
MPAAKRVKLDGGDKKYSIGLDIGTNSVGWAVITDEYKVPSKKFKVLGNTDRHSIKKNLIGALLFDSGETAEATRLKRTARRRYTRRKNRICYLQEIFSNEMAKVDDSFFHRLEESFLVEEDKKHERHPIFGNIVDEVAYHEKYPTIYHLRKKLVDSTDKADLRLIYLALAHMIKFRGHFLIEGDLNPDNSDVDKLFIQLVQTYNQLFEENPINASGVDAKAILSARLSKSRRLENLIAQLPGEKKNGLFGNLIALSLGLTPNFKSNFDLAEDAKLQLSKDTYDDDLDNLLAQIGDQYADLFLAAKNLSDAILLSDILRVNTEITKAPLSASMIKRYDEHHQDLTLLKALVRQQLPEKYKEIFFDQSKNGYAGYIDGGASQEEFYKFIKPILEKMDGTEELLVKLNREDLLRKQRTFDNGSIPHQIHLGELHAILRRQEDFYPFLKDNREKIEKILTFRIPYYVGPLARGNSRFAWMTRKSEETITPWNFEEVVDKGASAQSFIERMTNFDKNLPNEKVLPKHSLLYEYFTVYNELTKVKYVTEGMRKPAFLSGEQKKAIVDLLFKTNRKVTVKQLKEDYFKKIECFDSVEISGVEDRFNASLGTYHDLLKIIKDKDFLDNEENEDILEDIVLTLTLFEDREMIEERLKTYAHLFDDKVMKQLKRRRYTGWGRLSRKLINGIRDKQSGKTILDFLKSDGFANRNFMQLIHDDSLTFKEDIQKAQVSGQGDSLHEHIANLAGSPAIKKGILQTVKVVDELVKVMGRHKPENIVIEMARENQTTQKGQKNSRERMKRIEEGIKELGSQILKEHPVENTQLQNEKLYLYYLQNGRDMYVDQELDINRLSDYDVDHIVPQSFLKDDSIDNKVLTRSDKARGKSDNVPSEEVVKKMKNYWRQLLNAKLITQRKFDNLTKAERGGLSELDKAGFIKRQLVETRQITKHVAQILDSRMNTKYDENDKLIREVKVITLKSKLVSDFRKDFQFYKVREINNYHHAHDAYLNAVVGTALIKKYPKLESEFVYGDYKVYDVRKMIAKSEQEIGKATAKYFFYSNIMNFFKTEITLANGEIRKRPLIETNGETGEIVWDKGRDFATVRKVLSMPQVNIVKKTEVQTGGFSKESILPKRNSDKLIARKKDWDPKKYGGFDSPTVAYSVLVVAKVEKGKSKKLKSVKELLGITIMERSSFEKNPIDFLEAKGYKEVKKDLIIKLPKYSLFELENGRKRMLASAGELQKGNELALPSKYVNFLYLASHYEKLKGSPEDNEQKQLFVEQHKHYLDEIIEQISEFSKRVILADANLDKVLSAYNKHRDKPIREQAENIIHLFTLTNLGAPAAFKYFDTTIDRKRYTSTKEVLDATLIHQSITGLYETRIDLSQLGGDGGEAAAKEAAAKEAAAKGGVQEISDSRPMLHIYLNGRRFLGLLDTGADKTCIAGRDWPANWPIHQTESSLQGLGMACGVARSSQPLRWQHEDKSGIIHPFVIPTLPFTLWGRDIMKDIKVRLMTDSPDDSQDLMIGAIESNLFADQISWKSDQPVWLNQWPLKQEKLQALQQLVTEQLQLGHLEESNSPWNTPVFVIKKKSGKWRLLQDLRAVNATMHDMGALQPGLPSPVAVPKGWEIIIIDLQDCFFNIKLHPEDCKRFAFSVPSPNFKRPYQRFQWKVLPQGMKNSPTLCQKFVDKAILTVRDKYQDSYIVHYMDDILLAHPSRSIVDEILTSMIQALNKHGLVVSTEKIQKYDNLKYLGTHIQGDSVSYQKLQIRTDKLRTLNDFQKLLGNINWIRPFLKLTTGELKPLFEILNGDSNPISTRKLTPEACKALQLMNERLSTARVKRLDLSQPWSLCILKTEYTPTACLWQDGVVEWIHLPHISPKVITPYDIFCTQLIIKGRHRSKELFSKDPDYIVVPYTKVQFDLLLQEKEDWPISLLGFLGEVHFHLPKDPLLTFTLQTAIIFPHMTSTTPLEKGIVIFTDGSANGRSVTYIQGREPIIKENTQNTAQQAEIVAVITAFEEVSQPFNLYTDSKYVTGLFPEIETATLSPRTKIYTELKHLQRLIHKRQEKFYIGHIRGHTGLPGPLAQGNAYADSLTRILTAAGKRTADGSEFEKRTADGSEFESPKKKAKVE

SEQ ID NO: 6398 - protein, 2091 aa, synthetic construct
MPAAKRVKLDGGDKKYSIGLDIGTNSVGWAVITDEYKVPSKKFKVLGNTDRHSIKKNLIGALLFDSGETAEATRLKRTARRRYTRRKNRICYLQEIFSNEMAKVDDSFFHRLEESFLVEEDKKHERHPIFGNIVDEVAYHEKYPTIYHLRKKLVDSTDKADLRLIYLALAHMIKFRGHFLIEGDLNPDNSDVDKLFIQLVQTYNQLFEENPINASGVDAKAILSARLSKSRRLENLIAQLPGEKKNGLFGNLIALSLGLTPNFKSNFDLAEDAKLQLSKDTYDDDLDNLLAQIGDQYADLFLAAKNLSDAILLSDILRVNTEITKAPLSASMIKRYDEHHQDLTLLKALVRQQLPEKYKEIFFDQSKNGYAGYIDGGASQEEFYKFIKPILEKMDGTEELLVKLNREDLLRKQRTFDNGSIPHQIHLGELHAILRRQEDFYPFLKDNREKIEKILTFRIPYYVGPLARGNSRFAWMTRKSEETITPWNFEEVVDKGASAQSFIERMTNFDKNLPNEKVLPKHSLLYEYFTVYNELTKVKYVTEGMRKPAFLSGEQKKAIVDLLFKTNRKVTVKQLKEDYFKKIECFDSVEISGVEDRFNASLGTYHDLLKIIKDKDFLDNEENEDILEDIVLTLTLFEDREMIEERLKTYAHLFDDKVMKQLKRRRYTGWGRLSRKLINGIRDKQSGKTILDFLKSDGFANRNFMQLIHDDSLTFKEDIQKAQVSGQGDSLHEHIANLAGSPAIKKGILQTVKVVDELVKVMGRHKPENIVIEMARENQTTQKGQKNSRERMKRIEEGIKELGSQILKEHPVENTQLQNEKLYLYYLQNGRDMYVDQELDINRLSDYDVDHIVPQSFLKDDSIDNKVLTRSDKARGKSDNVPSEEVVKKMKNYWRQLLNAKLITQRKFDNLTKAERGGLSELDKAGFIKRQLVETRQITKHVAQILDSRMNTKYDENDKLIREVKVITLKSKLVSDFRKDFQFYKVREINNYHHAHDAYLNAVVGTALIKKYPKLESEFVYGDYKVYDVRKMIAKSEQEIGKATAKYFFYSNIMNFFKTEITLANGEIRKRPLIETNGETGEIVWDKGRDFATVRKVLSMPQVNIVKKTEVQTGGFSKESILPKRNSDKLIARKKDWDPKKYGGFDSPTVAYSVLVVAKVEKGKSKKLKSVKELLGITIMERSSFEKNPIDFLEAKGYKEVKKDLIIKLPKYSLFELENGRKRMLASAGELQKGNELALPSKYVNFLYLASHYEKLKGSPEDNEQKQLFVEQHKHYLDEIIEQISEFSKRVILADANLDKVLSAYNKHRDKPIREQAENIIHLFTLTNLGAPAAFKYFDTTIDRKRYTSTKEVLDATLIHQSITGLYETRIDLSQLGGDGGEAAAKEAAAKEAAAKGGIPWLMKKPLQLTTLVPLQEYEERLLKQTMLTGSYKEKLQSLFLKYDALWQHWENQVGHRRIKPHHIATGTVNPRPQKQYPINPKAKASIQTVINDLLKQGVLIQQNSIMNTPVYPVPKPDGKWRMVLDYREVNKTIPLIAAQNQHSAGILSSIFRGKYKTTLDLSNGFWAHSITPESYWLTAFTWLGQQYCWTRLPQGFLNSPALFNADVVDLLKEVPNVQVYVDDIYISHDDPREHLEQLEKVFSLLLNAGYVVSLKKSEIAQHEVEFLGFNITKEGRGLTETFKQKLLNITPPRDLKQLQSILGKLNFARNFIPNFSELVKPLYNIIATAPGKYITWTTDNSQQLQNIISMLNSAENLEERNPEVRLIMKVNTSPSAGYIRFYNEFAKRPIMYLNYVYTKAEVKFTNTEKLLTTIHKGLIKALDLGMGQEILVYSPIVSMTKIQKTPLPERKALPIRWITWMSYLEDPRIQFHYDKTLPELQQVPTVTDDIIAKIKHPSEFSMVFYTDGSAIKHPNVNKSHNAGMGIAQVQFKPEFTVINTWSIPLGDHTAQLAEVAAVEFACKKALKIDGPVLIVTDSFYVAESVNKELPYWQSNGFFNNKKKPLKHVSKWKSIADCIQLKPDIIIIHEKGHQPTASTFHTEGNNLADKLATQGSYVVNAGKRTADGSEFEKRTADGSEFESPKKKAKVE

SEQ ID NO: 6399 - protein, 2180 aa, synthetic construct
MPAAKRVKLDGGDKKYSIGLDIGTNSVGWAVITDEYKVPSKKFKVLGNTDRHSIKKNLIGALLFDSGETAEATRLKRTARRRYTRRKNRICYLQEIFSNEMAKVDDSFFHRLEESFLVEEDKKHERHPIFGNIVDEVAYHEKYPTIYHLRKKLVDSTDKADLRLIYLALAHMIKFRGHFLIEGDLNPDNSDVDKLFIQLVQTYNQLFEENPINASGVDAKAILSARLSKSRRLENLIAQLPGEKKNGLFGNLIALSLGLTPNFKSNFDLAEDAKLQLSKDTYDDDLDNLLAQIGDQYADLFLAAKNLSDAILLSDILRVNTEITKAPLSASMIKRYDEHHQDLTLLKALVRQQLPEKYKEIFFDQSKNGYAGYIDGGASQEEFYKFIKPILEKMDGTEELLVKLNREDLLRKQRTFDNGSIPHQIHLGELHAILRRQEDFYPFLKDNREKIEKILTFRIPYYVGPLARGNSRFAWMTRKSEETITPWNFEEVVDKGASAQSFIERMTNFDKNLPNEKVLPKHSLLYEYFTVYNELTKVKYVTEGMRKPAFLSGEQKKAIVDLLFKTNRKVTVKQLKEDYFKKIECFDSVEISGVEDRFNASLGTYHDLLKIIKDKDFLDNEENEDILEDIVLTLTLFEDREMIEERLKTYAHLFDDKVMKQLKRRRYTGWGRLSRKLINGIRDKQSGKTILDFLKSDGFANRNFMQLIHDDSLTFKEDIQKAQVSGQGDSLHEHIANLAGSPAIKKGILQTVKVVDELVKVMGRHKPENIVIEMARENQTTQKGQKNSRERMKRIEEGIKELGSQILKEHPVENTQLQNEKLYLYYLQNGRDMYVDQELDINRLSDYDVDHIVPQSFLKDDSIDNKVLTRSDKARGKSDNVPSEEVVKKMKNYWRQLLNAKLITQRKFDNLTKAERGGLSELDKAGFIKRQLVETRQITKHVAQILDSRMNTKYDENDKLIREVKVITLKSKLVSDFRKDFQFYKVREINNYHHAHDAYLNAVVGTALIKKYPKLESEFVYGDYKVYDVRKMIAKSEQEIGKATAKYFFYSNIMNFFKTEITLANGEIRKRPLIETNGETGEIVWDKGRDFATVRKVLSMPQVNIVKKTEVQTGGFSKESILPKRNSDKLIARKKDWDPKKYGGFDSPTVAYSVLVVAKVEKGKSKKLKSVKELLGITIMERSSFEKNPIDFLEAKGYKEVKKDLIIKLPKYSLFELENGRKRMLASAGELQKGNELALPSKYVNFLYLASHYEKLKGSPEDNEQKQLFVEQHKHYLDEIIEQISEFSKRVILADANLDKVLSAYNKHRDKPIREQAENIIHLFTLTNLGAPAAFKYFDTTIDRKRYTSTKEVLDATLIHQSITGLYETRIDLSQLGGDGGEAAAKEAAAKEAAAKGGMDPLQLLQPLEAEIKGTKLKAHWNSGATITCVPQAFLEEEVPIKNIWIKTIHGEKEQPVYYLTFKIQGRKVEAEVISSPYDYILVSPSDIPWLMKKPLQLTTLVPLQEYEERLLKQTMLTGSYKEKLQSLFLKYDALWQHWENQVGHRRIKPHHIATGTVNPRPQKQYPINPKAKASIQTVINDLLKQGVLIQQNSIMNTPVYPVPKPDGKWRMVLDYREVNKTIPLIAAQNQHSAGILSSIFRGKYKTTLDLSNGFWAHSITPESYWLTAFTWLGQQYCWTRLPQGFLNSPALFNADVVDLLKEVPNVQVYVDDIYISHDDPREHLEQLEKVFSLLLNAGYVVSLKKSEIAQHEVEFLGFNITKEGRGLTETFKQKLLNITPPRDLKQLQSILGKLNFARNFIPNFSELVKPLYNIIATAPGKYITWTTDNSQQLQNIISMLNSAENLEERNPEVRLIMKVNTSPSAGYIRFYNEFAKRPIMYLNYVYTKAEVKFTNTEKLLTTIHKGLIKALDLGMGQEILVYSPIVSMTKIQKTPLPERKALPIRWITWMSYLEDPRIQFHYDKTLPELQQVPTVTDDIIAKIKHPSEFSMVFYTDGSAIKHPNVNKSHNAGMGIAQVQFKPEFTVINTWSIPLGDHTAQLAEVAAVEFACKKALKIDGPVLIVTDSFYVAESVNKELPYWQSNGFFNNKKKPLKHVSKWKSIADCIQLKPDIIIIHEKGHQPTASTFHTEGNNLADKLATQGSYVVNAGKRTADGSEFEKRTADGSEFESPKKKAKVE

SEQ ID NO: 6400 - protein, 2180 aa, synthetic construct
MPAAKRVKLDGGDKKYSIGLDIGTNSVGWAVITDEYKVPSKKFKVLGNTDRHSIKKNLIGALLFDSGETAEATRLKRTARRRYTRRKNRICYLQEIFSNEMAKVDDSFFHRLEESFLVEEDKKHERHPIFGNIVDEVAYHEKYPTIYHLRKKLVDSTDKADLRLIYLALAHMIKFRGHFLIEGDLNPDNSDVDKLFIQLVQTYNQLFEENPINASGVDAKAILSARLSKSRRLENLIAQLPGEKKNGLFGNLIALSLGLTPNFKSNFDLAEDAKLQLSKDTYDDDLDNLLAQIGDQYADLFLAAKNLSDAILLSDILRVNTEITKAPLSASMIKRYDEHHQDLTLLKALVRQQLPEKYKEIFFDQSKNGYAGYIDGGASQEEFYKFIKPILEKMDGTEELLVKLNREDLLRKQRTFDNGSIPHQIHLGELHAILRRQEDFYPFLKDNREKIEKILTFRIPYYVGPLARGNSRFAWMTRKSEETITPWNFEEVVDKGASAQSFIERMTNFDKNLPNEKVLPKHSLLYEYFTVYNELTKVKYVTEGMRKPAFLSGEQKKAIVDLLFKTNRKVTVKQLKEDYFKKIECFDSVEISGVEDRFNASLGTYHDLLKIIKDKDFLDNEENEDILEDIVLTLTLFEDREMIEERLKTYAHLFDDKVMKQLKRRRYTGWGRLSRKLINGIRDKQSGKTILDFLKSDGFANRNFMQLIHDDSLTFKEDIQKAQVSGQGDSLHEHIANLAGSPAIKKGILQTVKVVDELVKVMGRHKPENIVIEMARENQTTQKGQKNSRERMKRIEEGIKELGSQILKEHPVENTQLQNEKLYLYYLQNGRDMYVDQELDINRLSDYDVDHIVPQSFLKDDSIDNKVLTRSDKARGKSDNVPSEEVVKKMKNYWRQLLNAKLITQRKFDNLTKAERGGLSELDKAGFIKRQLVETRQITKHVAQILDSRMNTKYDENDKLIREVKVITLKSKLVSDFRKDFQFYKVREINNYHHAHDAYLNAVVGTALIKKYPKLESEFVYGDYKVYDVRKMIAKSEQEIGKATAKYFFYSNIMNFFKTEITLANGEIRKRPLIETNGETGEIVWDKGRDFATVRKVLSMPQVNIVKKTEVQTGGFSKESILPKRNSDKLIARKKDWDPKKYGGFDSPTVAYSVLVVAKVEKGKSKKLKSVKELLGITIMERSSFEKNPIDFLEAKGYKEVKKDLIIKLPKYSLFELENGRKRMLASAGELQKGNELALPSKYVNFLYLASHYEKLKGSPEDNEQKQLFVEQHKHYLDEIIEQISEFSKRVILADANLDKVLSAYNKHRDKPIREQAENIIHLFTLTNLGAPAAFKYFDTTIDRKRYTSTKEVLDATLIHQSITGLYETRIDLSQLGGDGGEAAAKEAAAKEAAAKGGMNPLQLLQPLPAEVKGTKLLAHWNSGATITCIPESFLEDEQPIKQTLIKTIHGEKQQNVYYLTFKVKGRKVEAEVIASPYEYILLSPTDVPWLTQQPLQLTILVPLQEYQDRILNKTALPEEQKQQLKALFTKYDNLWQHWENQVGHRKIRPHNIATGDYPPRPQKQYPINPKAKPSIQIVIDDLLKQGVLTPQNSTMNTPVYPVPKPDGRWRMVLDYREVNKTIPLTAAQNQHSAGILATIVRQKYKTTLDLANGFWAHPITPDSYWLTAFTWQGKQYCWTRLPQGFLNSPALFTADAVDLLKEVPNVQVYVDDIYLSHDNPHEHIQQLEKVFQILLQAGYVVSLKKSEIGQRTVEFLGFNITKEGRGLTDTFKTKLLNVTPPKDLKQLQSILGLLNFARNFIPNFAELVQTLYNLIASSKGKYIEWTEDNTKQLNKVIEALNTASNLEERLPDQRLVIKVNTSPSAGYVRYYNESGKKPIMYLNYVFSKAELKFSMLEKLLTTMHKALIKAMDLAMGQEILVYSPIVSMTKIQKTPLPERKALPIRWITWMTYLEDPRIQFHYDKTLPELKHIPDVYTSSIPPLKHPSQYEGVFCTDGSAIKSPDPTKSNNAGMGIVHAIYNPEYKILNQWSIPLGHHTAQMAEIAAVEFACKKALKVPGPVLVITDSFYVAESANKELPYWKSNGFVNNKKEPLKHISKWKSIAECLSIKPDITIQHEKGHQPINTSIHTEGNALADKLATQGSYVVNAGKRTADGSEFEKRTADGSEFESPKKKAKVE

SEQ ID NO: 6401 - protein, 2098 aa, synthetic construct
MPAAKRVKLDGGDKKYSIGLDIGTNSVGWAVITDEYKVPSKKFKVLGNTDRHSIKKNLIGALLFDSGETAEATRLKRTARRRYTRRKNRICYLQEIFSNEMAKVDDSFFHRLEESFLVEEDKKHERHPIFGNIVDEVAYHEKYPTIYHLRKKLVDSTDKADLRLIYLALAHMIKFRGHFLIEGDLNPDNSDVDKLFIQLVQTYNQLFEENPINASGVDAKAILSARLSKSRRLENLIAQLPGEKKNGLFGNLIALSLGLTPNFKSNFDLAEDAKLQLSKDTYDDDLDNLLAQIGDQYADLFLAAKNLSDAILLSDILRVNTEITKAPLSASMIKRYDEHHQDLTLLKALVRQQLPEKYKEIFFDQSKNGYAGYIDGGASQEEFYKFIKPILEKMDGTEELLVKLNREDLLRKQRTFDNGSIPHQIHLGELHAILRRQEDFYPFLKDNREKIEKILTFRIPYYVGPLARGNSRFAWMTRKSEETITPWNFEEVVDKGASAQSFIERMTNFDKNLPNEKVLPKHSLLYEYFTVYNELTKVKYVTEGMRKPAFLSGEQKKAIVDLLFKTNRKVTVKQLKEDYFKKIECFDSVEISGVEDRFNASLGTYHDLLKIIKDKDFLDNEENEDILEDIVLTLTLFEDREMIEERLKTYAHLFDDKVMKQLKRRRYTGWGRLSRKLINGIRDKQSGKTILDFLKSDGFANRNFMQLIHDDSLTFKEDIQKAQVSGQGDSLHEHIANLAGSPAIKKGILQTVKVVDELVKVMGRHKPENIVIEMARENQTTQKGQKNSRERMKRIEEGIKELGSQILKEHPVENTQLQNEKLYLYYLQNGRDMYVDQELDINRLSDYDVDHIVPQSFLKDDSIDNKVLTRSDKARGKSDNVPSEEVVKKMKNYWRQLLNAKLITQRKFDNLTKAERGGLSELDKAGFIKRQLVETRQITKHVAQILDSRMNTKYDENDKLIREVKVITLKSKLVSDFRKDFQFYKVREINNYHHAHDAYLNAVVGTALIKKYPKLESEFVYGDYKVYDVRKMIAKSEQEIGKATAKYFFYSNIMNFFKTEITLANGEIRKRPLIETNGETGEIVWDKGRDFATVRKVLSMPQVNIVKKTEVQTGGFSKESILPKRNSDKLIARKKDWDPKKYGGFDSPTVAYSVLVVAKVEKGKSKKLKSVKELLGITIMERSSFEKNPIDFLEAKGYKEVKKDLIIKLPKYSLFELENGRKRMLASAGELQKGNELALPSKYVNFLYLASHYEKLKGSPEDNEQKQLFVEQHKHYLDEIIEQISEFSKRVILADANLDKVLSAYNKHRDKPIREQAENIIHLFTLTNLGAPAAFKYFDTTIDRKRYTSTKEVLDATLIHQSITGLYETRIDLSQLGGDGGEAAAKEAAAKEAAAKGGVLNLEEEYRLHEKPVPSSIDPSWLQLFPTVWAERAGMGLANQVPPVVVELRSGASPVAVRQYPMSKEAREGIRPHIQRFLDLGVLVPCQSPWNTPLLPVKKPGTNDYRPVQDLREINKRVQDIHPTVPNPYNLLSSLPPSHTWYSVLDLKDAFFCLKLHPNSQPLFAFEWRDPEKGNTGQLTWTRLPQGFKNSPTLFNEALHRDLAPFRALNPQVVLLQYVDDLLVAAPTYRDCKEGTQKLLQELSKLGYRVSAKKAQLCQKEVTYLGYLLKEGKRWLTPARKATVMKIPPPTTPRQVREFLGTAGFCRLWIPGFASLAAPLYPLTKPSIPFIWTEEHQKAFDRIKEALLSAPALALPDLTKPFTLYVDERAGVARGVLTQTLGPWRRPVAYLSKKLDPVASGWPTCLKAVAAVALLLKDADKLTLGQNVTVIASHSLESIVRQPPDRWMTNARMTHYQSLLLNERVSFAPPAVLNPATLLPVESEATPVHRCSEILAEETGTRRDLKDQPLPGVPAWYTDGSSFIAEGKRRAGAAIVDGKRTVWASSLPEGTSAQKAELVALTQALRLAEGKDINIYTDSRYAFATAHIHGAIYKQRGWLTSAGKDIKNKEEILALLEAIHLPKRVAIIHCPGHQKGNDPVATGNRRADEAAKQAALSTRVLAETTKPAGKRTADGSEFEKRTADGSEFESPKKKAKVE

SEQ ID NO: 6402 - protein, 2100 aa, synthetic construct; identical to SEQ ID NO: 4506

SEQ ID NO: 6403 - protein, 2107 aa, synthetic construct
MPAAKRVKLDGGDKKYSIGLDIGTNSVGWAVITDEYKVPSKKFKVLGNTDRHSIKKNLIGALLFDSGETAEATRLKRTARRRYTRRKNRICYLQEIFSNEMAKVDDSFFHRLEESFLVEEDKKHERHPIFGNIVDEVAYHEKYPTIYHLRKKLVDSTDKADLRLIYLALAHMIKFRGHFLIEGDLNPDNSDVDKLFIQLVQTYNQLFEENPINASGVDAKAILSARLSKSRRLENLIAQLPGEKKNGLFGNLIALSLGLTPNFKSNFDLAEDAKLQLSKDTYDDDLDNLLAQIGDQYADLFLAAKNLSDAILLSDILRVNTEITKAPLSASMIKRYDEHHQDLTLLKALVRQQLPEKYKEIFFDQSKNGYAGYIDGGASQEEFYKFIKPILEKMDGTEELLVKLNREDLLRKQRTFDNGSIPHQIHLGELHAILRRQEDFYPFLKDNREKIEKILTFRIPYYVGPLARGNSRFAWMTRKSEETITPWNFEEVVDKGASAQSFIERMTNFDKNLPNEKVLPKHSLLYEYFTVYNELTKVKYVTEGMRKPAFLSGEQKKAIVDLLFKTNRKVTVKQLKEDYFKKIECFDSVEISGVEDRFNASLGTYHDLLKIIKDKDFLDNEENEDILEDIVLTLTLFEDREMIEERLKTYAHLFDDKVMKQLKRRRYTGWGRLSRKLINGIRDKQSGKTILDFLKSDGFANRNFMQLIHDDSLTFKEDIQKAQVSGQGDSLHEHIANLAGSPAIKKGILQTVKVVDELVKVMGRHKPENIVIEMARENQTTQKGQKNSRERMKRIEEGIKELGSQILKEHPVENTQLQNEKLYLYYLQNGRDMYVDQELDINRLSDYDVDHIVPQSFLKDDSIDNKVLTRSDKARGKSDNVPSEEVVKKMKNYWRQLLNAKLITQRKFDNLTKAERGGLSELDKAGFIKRQLVETRQITKHVAQILDSRMNTKYDENDKLIREVKVITLKSKLVSDFRKDFQFYKVREINNYHHAHDAYLNAVVGTALIKKYPKLESEFVYGDYKVYDVRKMIAKSEQEIGKATAKYFFYSNIMNFFKTEITLANGEIRKRPLIETNGETGEIVWDKGRDFATVRKVLSMPQVNIVKKTEVQTGGFSKESILPKRNSDKLIARKKDWDPKKYGGFDSPTVAYSVLVVAKVEKGKSKKLKSVKELLGITIMERSSFEKNPIDFLEAKGYKEVKKDLIIKLPKYSLFELENGRKRMLASAGELQKGNELALPSKYVNFLYLASHYEKLKGSPEDNEQKQLFVEQHKHYLDEIIEQISEFSKRVILADANLDKVLSAYNKHRDKPIREQAENIIHLFTLTNLGAPAAFKYFDTTIDRKRYTSTKEVLDATLIHQSITGLYETRIDLSQLGGDGGEAAAKEAAAKEAAAKEAAAKGGTAPLEEEYRLFLEAPIQNVTLLEQWKREIPKVWAEINPPGLASTQAPIHVQLLSTALPVRVRQYPITLEAKRSLRETIRKFRAAGILRPVHSPWNTPLLPVRKSGTSEYRMVQDLREVNKRVETIHPTVPNPYTLLSLLPPDRIWYSVLDLKDAFFCIPLAPESQLIFAFEWADAEEGESGQLTWTRLPQGFKNSPTLFDEALNRDLQGFRLDHPSVSLLQYVDDLLIAADTQAACLSATRDLLMTLAELGYRVSGKKAQLCQEEVTYLGFKIHKGSRSLSNSRTQAILQIPVPKTKRQVREFLGTIGYCRLWIPGFAELAQPLYAATRGGNDPLVWGEKEEEAFQSLKLALTQPPALALPSLDKPFQLFVEETSGAAKGVLTQALGPWKRPVAYLSKRLDPVAAGWPRCLRAIAAAALLTREASKLTFGQDIEITSSHNLESLLRSPPDKWLTNARITQYQVLLLDPPRVRFKQTAALNPATLLPETDDTLPIHHCLDTLDSLTSTRPDLTDQPLAQAEATLFTDGSSYIRDGKRYAGAAVVTLDSVIWAEPLPIGTSAQKAELIALTKALEWSKDKSVNIYTDSRYAFATLHVHGMIYRERGLLTAGGKAIKNAPEILALLTAVWLPKRVAVMHCKGHQKDDAPTSTGNRRADEVAREVAIRPLSTQATISAGKRTADGSEFEKRTADGSEFESPKKKAKVE

SEQ ID NO: 6404 - protein, 2107 aa, synthetic construct
MPAAKRVKLDGGDKKYSIGLDIGTNSVGWAVITDEYKVPSKKFKVLGNTDRHSIKKNLIGALLFDSGETAEATRLKRTARRRYTRRKNRICYLQEIFSNEMAKVDDSFFHRLEESFLVEEDKKHERHPIFGNIVDEVAYHEKYPTIYHLRKKLVDSTDKADLRLIYLALAHMIKFRGHFLIEGDLNPDNSDVDKLFIQLVQTYNQLFEENPINASGVDAKAILSARLSKSRRLENLIAQLPGEKKNGLFGNLIALSLGLTPNFKSNFDLAEDAKLQLSKDTYDDDLDNLLAQIGDQYADLFLAAKNLSDAILLSDILRVNTEITKAPLSASMIKRYDEHHQDLTLLKALVRQQLPEKYKEIFFDQSKNGYAGYIDGGASQEEFYKFIKPILEKMDGTEELLVKLNREDLLRKQRTFDNGSIPHQIHLGELHAILRRQEDFYPFLKDNREKIEKILTFRIPYYVGPLARGNSRFAWMTRKSEETITPWNFEEVVDKGASAQSFIERMTNFDKNLPNEKVLPKHSLLYEYFTVYNELTKVKYVTEGMRKPAFLSGEQKKAIVDLLFKTNRKVTVKQLKEDYFKKIECFDSVEISGVEDRFNASLGTYHDLLKIIKDKDFLDNEENEDILEDIVLTLTLFEDREMIEERLKTYAHLFDDKVMKQLKRRRYTGWGRLSRKLINGIRDKQSGKTILDFLKSDGFANRNFMQLIHDDSLTFKEDIQKAQVSGQGDSLHEHIANLAGSPAIKKGILQTVKVVDELVKVMGRHKPENIVIEMARENQTTQKGQKNSRERMKRIEEGIKELGSQILKEHPVENTQLQNEKLYLYYLQNGRDMYVDQELDINRLSDYDVDHIVPQSFLKDDSIDNKVLTRSDKARGKSDNVPSEEVVKKMKNYWRQLLNAKLITQRKFDNLTKAERGGLSELDKAGFIKRQLVETRQITKHVAQILDSRMNTKYDENDKLIREVKVITLKSKLVSDFRKDFQFYKVREINNYHHAHDAYLNAVVGTALIKKYPKLESEFVYGDYKVYDVRKMIAKSEQEIGKATAKYFFYSNIMNFFKTEITLANGEIRKRPLIETNGETGEIVWDKGRDFATVRKVLSMPQVNIVKKTEVQTGGFSKESILPKRNSDKLIARKKDWDPKKYGGFDSPTVAYSVLVVAKVEKGKSKKLKSVKELLGITIMERSSFEKNPIDFLEAKGYKEVKKDLIIKLPKYSLFELENGRKRMLASAGELQKGNELALPSKYVNFLYLASHYEKLKGSPEDNEQKQLFVEQHKHYLDEIIEQISEFSKRVILADANLDKVLSAYNKHRDKPIREQAENIIHLFTLTNLGAPAAFKYFDTTIDRKRYTSTKEVLDATLIHQSITGLYETRIDLSQLGGDGGEAAAKEAAAKEAAAKEAAAKGGTAPLEEEYRLFLEAPIQNVTLLEQWKREIPKVWAEINPPGLASTQAPIHVQLLSTALPVRVRQYPITLEAKRSLRETIRKFRAAGILRPVHSPWNTPLLPVRKSGTSEYRMVQDLREVNKRVETIHPTVPNPYTLLSLLPPDRIWYSVLDLKDAFFCIPLAPESQLIFAFEWADAEEGESGQLTWTRLPQGFKNSPTLFNEALNRDLQGFRLDHPSVSLLQYVDDLLIAADTQAACLSATRDLLMTLAELGYRVSGKKAQLCQEEVTYLGFKIHKGSRSLSNSRTQAILQIPVPKTKRQVREFLGKIGYCRLFIPGFAELAQPLYAATRPGNDPLVWGEKEEEAFQSLKLALTQPPALALPSLDKPFQLFVEETSGAAKGVLTQALGPWKRPVAYLSKRLDPVAAGWPRCLRAIAAAALLTREASKLTFGQDIEITSSHNLESLLRSPPDKWLTNARITQYQVLLLDPPRVRFKQTAALNPATLLPETDDTLPIHHCLDTLDSLTSTRPDLTDQPLAQAEATLFTDGSSYIRDGKRYAGAAVVTLDSVIWAEPLPIGTSAQKAELIALTKALEWSKDKSVNIYTDSRYAFATLHVHGMIYRERGWLTAGGKAIKNAPEILALLTAVWLPKRVAVMHCKGHQKDDAPTSTGNRRADEVAREVAIRPLSTQATISAGKRTADGSEFEKRTADGSEFESPKKKAKVE

SEQ ID NO: 6405 - protein, 2096 aa, synthetic construct
MPAAKRVKLDGGDKKYSIGLDIGTNSVGWAVITDEYKVPSKKFKVLGNTDRHSIKKNLIGALLFDSGETAEATRLKRTARRRYTRRKNRICYLQEIFSNEMAKVDDSFFHRLEESFLVEEDKKHERHPIFGNIVDEVAYHEKYPTIYHLRKKLVDSTDKADLRLIYLALAHMIKFRGHFLIEGDLNPDNSDVDKLFIQLVQTYNQLFEENPINASGVDAKAILSARLSKSRRLENLIAQLPGEKKNGLFGNLIALSLGLTPNFKSNFDLAEDAKLQLSKDTYDDDLDNLLAQIGDQYADLFLAAKNLSDAILLSDILRVNTEITKAPLSASMIKRYDEHHQDLTLLKALVRQQLPEKYKEIFFDQSKNGYAGYIDGGASQEEFYKFIKPILEKMDGTEELLVKLNREDLLRKQRTFDNGSIPHQIHLGELHAILRRQEDFYPFLKDNREKIEKILTFRIPYYVGPLARGNSRFAWMTRKSEETITPWNFEEVVDKGASAQSFIERMTNFDKNLPNEKVLPKHSLLYEYFTVYNELTKVKYVTEGMRKPAFLSGEQKKAIVDLLFKTNRKVTVKQLKEDYFKKIECFDSVEISGVEDRFNASLGTYHDLLKIIKDKDFLDNEENEDILEDIVLTLTLFEDREMIEERLKTYAHLFDDKVMKQLKRRRYTGWGRLSRKLINGIRDKQSGKTILDFLKSDGFANRNFMQLIHDDSLTFKEDIQKAQVSGQGDSLHEHIANLAGSPAIKKGILQTVKVVDELVKVMGRHKPENIVIEMARENQTTQKGQKNSRERMKRIEEGIKELGSQILKEHPVENTQLQNEKLYLYYLQNGRDMYVDQELDINRLSDYDVDHIVPQSFLKDDSIDNKVLTRSDKARGKSDNVPSEEVVKKMKNYWRQLLNAKLITQRKFDNLTKAERGGLSELDKAGFIKRQLVETRQITKHVAQILDSRMNTKYDENDKLIREVKVITLKSKLVSDFRKDFQFYKVREINNYHHAHDAYLNAVVGTALIKKYPKLESEFVYGDYKVYDVRKMIAKSEQEIGKATAKYFFYSNIMNFFKTEITLANGEIRKRPLIETNGETGEIVWDKGRDFATVRKVLSMPQVNIVKKTEVQTGGFSKESILPKRNSDKLIARKKDWDPKKYGGFDSPTVAYSVLVVAKVEKGKSKKLKSVKELLGITIMERSSFEKNPIDFLEAKGYKEVKKDLIIKLPKYSLFELENGRKRMLASAGELQKGNELALPSKYVNFLYLASHYEKLKGSPEDNEQKQLFVEQHKHYLDEIIEQISEFSKRVILADANLDKVLSAYNKHRDKPIREQAENIIHLFTLTNLGAPAAFKYFDTTIDRKRYTSTKEVLDATLIHQSITGLYETRIDLSQLGGDGGEAAAKEAAAKEAAAKEAAAKGGVPWILKKPLELTIKLDLEEQQGTLLNNSILSKKGKEELKQLFEKYSALWQSWENQVGHRRIRPHKIATGTVKPTPQKQYHINPKAKPDIQIVINDLLKQGVLIQKESTMNTPVYPVPKPNGRWRMVLDYRAVNKVTPLIAVQNQHSYGILGSLFKGRYKTTIDLSNGFWAHPIVPEDYWITAFTWQGKQYCWTVLPQGFLNSPGLFNGDVVDLLQGIPNVEVYVDDVYISHDSEKEHLEYLDILFNRLKEAGYIISLKKSNIANSIVDFLGFQITNEGRGLTDTFKEKLENITAPTTLKQLQSILGLLNFARNFIPDFTELIAPLYALIPKSPKNYVPWQIEHSTTLETLITKLNGAEYLQGRKGDKTLIMKVNASYTTGYIRYYNEGEKKPISYVSIVFSKTELKFTELEKLLTTVHKGLLKALDLSMGQNIHVYSPIVSMQNIQKTPQTAKKALASRWLSWLSYLEDPRIRFFYDPQMPALKDLPAVDTGKDNKKHPSNFQHIFYTDGSAITSPTKEGHLNAGMGIVYFINKDGNLQKQQEWSISLGNHTAQFAEIAAFEFALKKCLPLGGNILVVTDSNYVAKAYNEELDVWASNGFVNNRKKPLKHISKWKSVADLKRLRPDVVVTHEPGHQKLDSSPHAYGNNLADQLATQASFKVHAGKRTADGSEFEKRTADGSEFESPKKKAKVE

SEQ ID NO: 6406 - protein, 2185 aa, synthetic construct
MPAAKRVKLDGGDKKYSIGLDIGTNSVGWAVITDEYKVPSKKFKVLGNTDRHSIKKNLIGALLFDSGETAEATRLKRTARRRYTRRKNRICYLQEIFSNEMAKVDDSFFHRLEESFLVEEDKKHERHPIFGNIVDEVAYHEKYPTIYHLRKKLVDSTDKADLRLIYLALAHMIKFRGHFLIEGDLNPDNSDVDKLFIQLVQTYNQLFEENPINASGVDAKAILSARLSKSRRLENLIAQLPGEKKNGLFGNLIALSLGLTPNFKSNFDLAEDAKLQLSKDTYDDDLDNLLAQIGDQYADLFLAAKNLSDAILLSDILRVNTEITKAPLSASMIKRYDEHHQDLTLLKALVRQQLPEKYKEIFFDQSKNGYAGYIDGGASQEEFYKFIKPILEKMDGTEELLVKLNREDLLRKQRTFDNGSIPHQIHLGELHAILRRQEDFYPFLKDNREKIEKILTFRIPYYVGPLARGNSRFAWMTRKSEETITPWNFEEVVDKGASAQSFIERMTNFDKNLPNEKVLPKHSLLYEYFTVYNELTKVKYVTEGMRKPAFLSGEQKKAIVDLLFKTNRKVTVKQLKEDYFKKIECFDSVEISGVEDRFNASLGTYHDLLKIIKDKDFLDNEENEDILEDIVLTLTLFEDREMIEERLKTYAHLFDDKVMKQLKRRRYTGWGRLSRKLINGIRDKQSGKTILDFLKSDGFANRNFMQLIHDDSLTFKEDIQKAQVSGQGDSLHEHIANLAGSPAIKKGILQTVKVVDELVKVMGRHKPENIVIEMARENQTTQKGQKNSRERMKRIEEGIKELGSQILKEHPVENTQLQNEKLYLYYLQNGRDMYVDQELDINRLSDYDVDHIVPQSFLKDDSIDNKVLTRSDKARGKSDNVPSEEVVKKMKNYWRQLLNAKLITQRKFDNLTKAERGGLSELDKAGFIKRQLVETRQITKHVAQILDSRMNTKYDENDKLIREVKVITLKSKLVSDFRKDFQFYKVREINNYHHAHDAYLNAVVGTALIKKYPKLESEFVYGDYKVYDVRKMIAKSEQEIGKATAKYFFYSNIMNFFKTEITLANGEIRKRPLIETNGETGEIVWDKGRDFATVRKVLSMPQVNIVKKTEVQTGGFSKESILPKRNSDKLIARKKDWDPKKYGGFDSPTVAYSVLVVAKVEKGKSKKLKSVKELLGITIMERSSFEKNPIDFLEAKGYKEVKKDLIIKLPKYSLFELENGRKRMLASAGELQKGNELALPSKYVNFLYLASHYEKLKGSPEDNEQKQLFVEQHKHYLDEIIEQISEFSKRVILADANLDKVLSAYNKHRDKPIREQAENIIHLFTLTNLGAPAAFKYFDTTIDRKRYTSTKEVLDATLIHQSITGLYETRIDLSQLGGDGGEAAAKEAAAKEAAAKEAAAKGGMNPLQLLQPLPAEIKGTKLLAHWNSGATITCIPESFLEDEQPIKKTLIKTIHGEKQQNVYYVTFKVKGRKVEAEVIASPYEYILLSPTDVPWLTQQPLQLTILVPLQEYQEKILSKTALPEDQKQQLKTLFVKYDNLWQHWENQVGHRKIRPHNIATGDYPPRPQKQYPINPKAKPSIQIVIDDLLKQGVLTPQNSTMNTPVYPVPKPDGRWRMVLDYREVNKTIPLTAAQNQHSAGILATIVRQKYKTTLDLANGFWAHPITPESYWLTAFTWQGKQYCWTRLPQGFLNSPALFTADVVDLLKEIPNVQVYVDDIYLSHDDPKEHVQQLEKVFQILLQAGYVVSLKKSEIGQKTVEFLGFNITKEGRGLTDTFKTKLLNITPPKDLKQLQSILGLLNFARNFIPNFAELVQPLYNLIASAKGKYIEWSEENTKQLNMVIEALNTASNLEERLPEQRLVIKVNTSPSAGYVRYYNETGKKPIMYLNYVFSKAELKFSMLEKLLTTMHKALIKAMDLAMGQEILVYSPIVSMTKIQKTPLPERKALPIRWITWMTYLEDPRIQFHYDKTLPELKHIPDVYTSSQSPVKHPSQYEGVFYTDGSAIKSPDPTKSNNAGMGIVHATYKPEYQVLNQWSIPLGNHTAQMAEIAAVEFACKKALKIPGPVLVITDSFYVAESANKELPYWKSNGFVNNKKKPLKHISKWKSIAECLSMKPDITIQHEKGISLQIPVFILKGNALADKLATQGSYVVNAGKRTADGSEFEKRTADGSEFESPKKKAKVE

SEQ ID NO: 6407 - protein, 2103 aa, synthetic construct
MPAAKRVKLDGGDKKYSIGLDIGTNSVGWAVITDEYKVPSKKFKVLGNTDRHSIKKNLIGALLFDSGETAEATRLKRTARRRYTRRKNRICYLQEIFSNEMAKVDDSFFHRLEESFLVEEDKKHERHPIFGNIVDEVAYHEKYPTIYHLRKKLVDSTDKADLRLIYLALAHMIKFRGHFLIEGDLNPDNSDVDKLFIQLVQTYNQLFEENPINASGVDAKAILSARLSKSRRLENLIAQLPGEKKNGLFGNLIALSLGLTPNFKSNFDLAEDAKLQLSKDTYDDDLDNLLAQIGDQYADLFLAAKNLSDAILLSDILRVNTEITKAPLSASMIKRYDEHHQDLTLLKALVRQQLPEKYKEIFFDQSKNGYAGYIDGGASQEEFYKFIKPILEKMDGTEELLVKLNREDLLRKQRTFDNGSIPHQIHLGELHAILRRQEDFYPFLKDNREKIEKILTFRIPYYVGPLARGNSRFAWMTRKSEETITPWNFEEVVDKGASAQSFIERMTNFDKNLPNEKVLPKHSLLYEYFTVYNELTKVKYVTEGMRKPAFLSGEQKKAIVDLLFKTNRKVTVKQLKEDYFKKIECFDSVEISGVEDRFNASLGTYHDLLKIIKDKDFLDNEENEDILEDIVLTLTLFEDREMIEERLKTYAHLFDDKVMKQLKRRRYTGWGRLSRKLINGIRDKQSGKTILDFLKSDGFANRNFMQLIHDDSLTFKEDIQKAQVSGQGDSLHEHIANLAGSPAIKKGILQTVKVVDELVKVMGRHKPENIVIEMARENQTTQKGQKNSRERMKRIEEGIKELGSQILKEHPVENTQLQNEKLYLYYLQNGRDMYVDQELDINRLSDYDVDHIVPQSFLKDDSIDNKVLTRSDKARGKSDNVPSEEVVKKMKNYWRQLLNAKLITQRKFDNLTKAERGGLSELDKAGFIKRQLVETRQITKHVAQILDSRMNTKYDENDKLIREVKVITLKSKLVSDFRKDFQFYKVREINNYHHAHDAYLNAVVGTALIKKYPKLESEFVYGDYKVYDVRKMIAKSEQEIGKATAKYFFYSNIMNFFKTEITLANGEIRKRPLIETNGETGEIVWDKGRDFATVRKVLSMPQVNIVKKTEVQTGGFSKESILPKRNSDKLIARKKDWDPKKYGGFDSPTVAYSVLVVAKVEKGKSKKLKSVKELLGITIMERSSFEKNPIDFLEAKGYKEVKKDLIIKLPKYSLFELENGRKRMLASAGELQKGNELALPSKYVNFLYLASHYEKLKGSPEDNEQKQLFVEQHKHYLDEIIEQISEFSKRVILADANLDKVLSAYNKHRDKPIREQAENIIHLFTLTNLGAPAAFKYFDTTIDRKRYTSTKEVLDATLIHQSITGLYETRIDLSQLGGDGGEAAAKEAAAKEAAAKEAAAKGGVLNLEEEYRLHEKPVPSSIDPSWLQLFPTVWAERAGMGLANQVPPVVVELRSGASPVAVRQYPMSKEAREGIRPHIQKFLDLGVLVPCRSPWNTPLLPVKKPGTNDYRPVQDLREINKRVQDIHPTVPNPYNLLSSLPPSYTWYSVLDLKDAFFCLRLHPNSQPLFAFEWKDPEKGNTGQLTWTRLPQGFKNSPTLFNEALHRDLAPFRALNPQVVLLQYVDDLLVAAPTYEDCKKGTQKLLQELSKLGYRVSAKKAQLCQREVTYLGYLLKEGKRWLTPARKATVMKIPVPTTPRQVREFLGKAGFCRLFIPGFASLAAPLYPLTKPSIPFIWTEEHQQAFDHIKKALLSAPALALPDLTKPFTLYIDERAGVARGVLTQTLGPWRRPVAYLSKKLDPVASGWPTCLKAVAAVALLLKDADKLTLGQNVTVIASHSLESIVRQPPDRWMTNARMTHYQSLLLNERVSFAPPAVLNPATLLPVESEATPVHRCSEILAEETGTRRDLEDQPLPGVPTWYTDGSSFITEGKRRAGAPIVDGKRTVWASSLPEGTSAQKAELVALTQALRLAEGKNINIYTDSRYAFATAHIHGAIYKQRGWLTSAGKDIKNKEEILALLEAIHLPRRVAIIHCPGHQRGSNPVATGNRRADEAAKQAALSTRVLAGTTKPAGKRTADGSEFEKRTADGSEFESPKKKAKVE

SEQ ID NO: 6408 - protein, 2136 aa, synthetic construct
MPAAKRVKLDGGDKKYSIGLDIGTNSVGWAVITDEYKVPSKKFKVLGNTDRHSIKKNLIGALLFDSGETAEATRLKRTARRRYTRRKNRICYLQEIFSNEMAKVDDSFFHRLEESFLVEEDKKHERHPIFGNIVDEVAYHEKYPTIYHLRKKLVDSTDKADLRLIYLALAHMIKFRGHFLIEGDLNPDNSDVDKLFIQLVQTYNQLFEENPINASGVDAKAILSARLSKSRRLENLIAQLPGEKKNGLFGNLIALSLGLTPNFKSNFDLAEDAKLQLSKDTYDDDLDNLLAQIGDQYADLFLAAKNLSDAILLSDILRVNTEITKAPLSASMIKRYDEHHQDLTLLKALVRQQLPEKYKEIFFDQSKNGYAGYIDGGASQEEFYKFIKPILEKMDGTEELLVKLNREDLLRKQRTFDNGSIPHQIHLGELHAILRRQEDFYPFLKDNREKIEKILTFRIPYYVGPLARGNSRFAWMTRKSEETITPWNFEEVVDKGASAQSFIERMTNFDKNLPNEKVLPKHSLLYEYFTVYNELTKVKYVTEGMRKPAFLSGEQKKAIVDLLFKTNRKVTVKQLKEDYFKKIECFDSVEISGVEDRFNASLGTYHDLLKIIKDKDFLDNEENEDILEDIVLTLTLFEDREMIEERLKTYAHLFDDKVMKQLKRRRYTGWGRLSRKLINGIRDKQSGKTILDFLKSDGFANRNFMQLIHDDSLTFKEDIQKAQVSGQGDSLHEHIANLAGSPAIKKGILQTVKVVDELVKVMGRHKPENIVIEMARENQTTQKGQKNSRERMKRIEEGIKELGSQILKEHPVENTQLQNEKLYLYYLQNGRDMYVDQELDINRLSDYDVDHIVPQSFLKDDSIDNKVLTRSDKARGKSDNVPSEEVVKKMKNYWRQLLNAKLITQRKFDNLTKAERGGLSELDKAGFIKRQLVETRQITKHVAQILDSRMNTKYDENDKLIREVKVITLKSKLVSDFRKDFQFYKVREINNYHHAHDAYLNAVVGTALIKKYPKLESEFVYGDYKVYDVRKMIAKSEQEIGKATAKYFFYSNIMNFFKTEITLANGEIRKRPLIETNGETGEIVWDKGRDFATVRKVLSMPQVNIVKKTEVQTGGFSKESILPKRNSDKLIARKKDWDPKKYGGFDSPTVAYSVLVVAKVEKGKSKKLKSVKELLGITIMERSSFEKNPIDFLEAKGYKEVKKDLIIKLPKYSLFELENGRKRMLASAGELQKGNELALPSKYVNFLYLASHYEKLKGSPEDNEQKQLFVEQHKHYLDEIIEQISEFSKRVILADANLDKVLSAYNKHRDKPIREQAENIIHLFTLTNLGAPAAFKYFDTTIDRKRYTSTKEVLDATLIHQSITGLYETRIDLSQLGGDGGEAAAKEAAAKEAAAKEAAAKGGLLGRDLLTKLKAQIQFSTEGPQVTWEDRPAMCLVLNLEEEYRLHEKPVPPSIDPSWLQLFPMVWAEKAGMGLANQVPPVVVELKSDASPVAVRQYPMSKEAREGIRPHIQRFLDLGILVPCQSPWNTPLLPVKKPGTNDYRPVQDLREVNKRVQDIHPTVPNPYNLLSSLPPSHTWYSVLDLKDAFFCLKLHPNSQPLFAFEWRDPEKGNTGQLTWTRLPQGFKNSPTLFDEALHRDLASFRALNPQVVMLQYVDDLLVAAPTYRDCKEGTRRLLQELSKLGYRVSAKKAQLCREEVTYLGYLLKGGKRWLTPARKATVMKIPTPTTPRQVREFLGTAGFCRLWIPGFASLAAPLYPLTREKVPFTWTEAHQEAFGRIKEALLSAPALALPDLTKPFALYVDEKEGVARGVLTQTLGPWRRPVAYLSKKLDPVASGWPTCLKAIAAVALLLKDADKLTLGQNVLVIAPHNLESIVRQPPDRWMTNARMTHYQSLLLNERVSFAPPAILNPATLLPVESDDTPIHICSEILAEETGTRPDLRDQPLPGVPAWYTDGSSFIMDGRRQAGAAIVDNKRTVWASNLPEGTSAQKAELIALTQALRLAEGKSINIYTDSRYAFATAHVHGAIYKQRGLLTSAGKDIKNKEEILALLEAIHLPKRVAIIHCPGHQRGTDPVATGNRKADEAAKQAAQSTRILTETTKNAGKRTADGSEFEKRTADGSEFESPKKKAKVE

SEQ ID NO: 6409 - protein, 2136 aa, synthetic construct
MPAAKRVKLDGGDKKYSIGLDIGTNSVGWAVITDEYKVPSKKFKVLGNTDRHSIKKNLIGALLFDSGETAEATRLKRTARRRYTRRKNRICYLQEIFSNEMAKVDDSFFHRLEESFLVEEDKKHERHPIFGNIVDEVAYHEKYPTIYHLRKKLVDSTDKADLRLIYLALAHMIKFRGHFLIEGDLNPDNSDVDKLFIQLVQTYNQLFEENPINASGVDAKAILSARLSKSRRLENLIAQLPGEKKNGLFGNLIALSLGLTPNFKSNFDLAEDAKLQLSKDTYDDDLDNLLAQIGDQYADLFLAAKNLSDAILLSDILRVNTEITKAPLSASMIKRYDEHHQDLTLLKALVRQQLPEKYKEIFFDQSKNGYAGYIDGGASQEEFYKFIKPILEKMDGTEELLVKLNREDLLRKQRTFDNGSIPHQIHLGELHAILRRQEDFYPFLKDNREKIEKILTFRIPYYVGPLARGNSRFAWMTRKSEETITPWNFEEVVDKGASAQSFIERMTNFDKNLPNEKVLPKHSLLYEYFTVYNELTKVKYVTEGMRKPAFLSGEQKKAIVDLLFKTNRKVTVKQLKEDYFKKIECFDSVEISGVEDRFNASLGTYHDLLKIIKDKDFLDNEENEDILEDIVLTLTLFEDREMIEERLKTYAHLFDDKVMKQLKRRRYTGWGRLSRKLINGIRDKQSGKTILDFLKSDGFANRNFMQLIHDDSLTFKEDIQKAQVSGQGDSLHEHIANLAGSPAIKKGILQTVKVVDELVKVMGRHKPENIVIEMARENQTTQKGQKNSRERMKRIEEGIKELGSQILKEHPVENTQLQNEKLYLYYLQNGRDMYVDQELDINRLSDYDVDHIVPQSFLKDDSIDNKVLTRSDKARGKSDNVPSEEVVKKMKNYWRQLLNAKLITQRKFDNLTKAERGGLSELDKAGFIKRQLVETRQITKHVAQILDSRMNTKYDENDKLIREVKVITLKSKLVSDFRKDFQFYKVREINNYHHAHDAYLNAVVGTALIKKYPKLESEFVYGDYKVYDVRKMIAKSEQEIGKATAKYFFYSNIMNFFKTEITLANGEIRKRPLIETNGETGEIVWDKGRDFATVRKVLSMPQVNIVKKTEVQTGGFSKESILPKRNSDKLIARKKDWDPKKYGGFDSPTVAYSVLVVAKVEKGKSKKLKSVKELLGITIMERSSFEKNPIDFLEAKGYKEVKKDLIIKLPKYSLFELENGRKRMLASAGELQKGNELALPSKYVNFLYLASHYEKLKGSPEDNEQKQLFVEQHKHYLDEIIEQISEFSKRVILADANLDKVLSAYNKHRDKPIREQAENIIHLFTLTNLGAPAAFKYFDTTIDRKRYTSTKEVLDATLIHQSITGLYETRIDLSQLGGDGGEAAAKEAAAKEAAAKEAAAKGGLLGRDLLTKLKAQIQFSTEGPQVTWEDRPAMCLVLNLEEEYRLHEKPVPPSIDPSWLQLFPMVWAEKAGMGLANQVPPVVVELKSDASPVAVRQYPMSKEAREGIRPHIQRFLDLGILVPCQSPWNTPLLPVKKPGTNDYRPVQDLREVNKRVQDIHPTVPNPYNLLSSLPPSHTWYSVLDLKDAFFCLKLHPNSQPLFAFEWRDPEKGNTGQLTWTRLPQGFKNSPTLFNEALHRDLASFRALNPQVVMLQYVDDLLVAAPTYRDCKEGTRRLLQELSKLGYRVSAKKAQLCREEVTYLGYLLKGGKRWLTPARKATVMKIPTPTTPRQVREFLGTAGFCRLWIPGFASLAAPLYPLTRPKVPFTWTEAHQEAFGRIKEALLSAPALALPDLTKPFALYVDEKEGVARGVLTQTLGPWRRPVAYLSKKLDPVASGWPTCLKAIAAVALLLKDADKLTLGQNVLVIAPHNLESIVRQPPDRWMTNARMTHYQSLLLNERVSFAPPAILNPATLLPVESDDTPIHICSEILAEETGTRPDLRDQPLPGVPAWYTDGSSFIMDGRRQAGAAIVDNKRTVWASNLPEGTSAQKAELIALTQALRLAEGKSINIYTDSRYAFATAHVHGAIYKQRGWLTSAGKDIKNKEEILALLEAIHLPKRVAIIHCPGHQRGTDPVATGNRKADEAAKQAAQSTRILTETTKNAGKRTADGSEFEKRTADGSEFESPKKKAKVE

SEQ ID NO: 6410 - protein, 2227 aa, synthetic construct
MPAAKRVKLDGGDKKYSIGLDIGTNSVGWAVITDEYKVPSKKFKVLGNTDRHSIKKNLIGALLFDSGETAEATRLKRTARRRYTRRKNRICYLQEIFSNEMAKVDDSFFHRLEESFLVEEDKKHERHPIFGNIVDEVAYHEKYPTIYHLRKKLVDSTDKADLRLIYLALAHMIKFRGHFLIEGDLNPDNSDVDKLFIQLVQTYNQLFEENPINASGVDAKAILSARLSKSRRLENLIAQLPGEKKNGLFGNLIALSLGLTPNFKSNFDLAEDAKLQLSKDTYDDDLDNLLAQIGDQYADLFLAAKNLSDAILLSDILRVNTEITKAPLSASMIKRYDEHHQDLTLLKALVRQQLPEKYKEIFFDQSKNGYAGYIDGGASQEEFYKFIKPILEKMDGTEELLVKLNREDLLRKQRTFDNGSIPHQIHLGELHAILRRQEDFYPFLKDNREKIEKILTFRIPYYVGPLARGNSRFAWMTRKSEETITPWNFEEVVDKGASAQSFIERMTNFDKNLPNEKVLPKHSLLYEYFTVYNELTKVKYVTEGMRKPAFLSGEQKKAIVDLLFKTNRKVTVKQLKEDYFKKIECFDSVEISGVEDRFNASLGTYHDLLKIIKDKDFLDNEENEDILEDIVLTLTLFEDREMIEERLKTYAHLFDDKVMKQLKRRRYTGWGRLSRKLINGIRDKQSGKTILDFLKSDGFANRNFMQLIHDDSLTFKEDIQKAQVSGQGDSLHEHIANLAGSPAIKKGILQTVKVVDELVKVMGRHKPENIVIEMARENQTTQKGQKNSRERMKRIEEGIKELGSQILKEHPVENTQLQNEKLYLYYLQNGRDMYVDQELDINRLSDYDVDHIVPQSFLKDDSIDNKVLTRSDKARGKSDNVPSEEVVKKMKNYWRQLLNAKLITQRKFDNLTKAERGGLSELDKAGFIKRQLVETRQITKHVAQILDSRMNTKYDENDKLIREVKVITLKSKLVSDFRKDFQFYKVREINNYHHAHDAYLNAVVGTALIKKYPKLESEFVYGDYKVYDVRKMIAKSEQEIGKATAKYFFYSNIMNFFKTEITLANGEIRKRPLIETNGETGEIVWDKGRDFATVRKVLSMPQVNIVKKTEVQTGGFSKESILPKRNSDKLIARKKDWDPKKYGGFDSPTVAYSVLVVAKVEKGKSKKLKSVKELLGITIMERSSFEKNPIDFLEAKGYKEVKKDLIIKLPKYSLFELENGRKRMLASAGELQKGNELALPSKYVNFLYLASHYEKLKGSPEDNEQKQLFVEQHKHYLDEIIEQISEFSKRVILADANLDKVLSAYNKHRDKPIREQAENIIHLFTLTNLGAPAAFKYFDTTIDRKRYTSTKEVLDATLIHQSITGLYETRIDLSQLGGDGGEAAAKEAAAKEAAAKEAAAKGGTLGDQGSRGSDPLPEPRVTLTVEGIPTEFLVNTGAEHSVLTKPMGKMGSKRTVVAGATGSKVYPWTTKRLLKIGQKQVTHSFLVIPECPAPLLGRDLLTKLKAQIQFSTEGPQVTWEDRPAMCLVLNLEEEYRLHEKPVPPSIDPSWLQLFPMVWAEKAGMGLANQVPPVVVELKSDASPVAVRQYPMSKEAREGIRPHIQRFLDLGILVPCQSPWNTPLLPVKKPGTNDYRPVQDLREVNKRVQDIHPTVPNPYNLLSSLPPSHTWYSVLDLKDAFFCLKLHPNSQPLFAFEWRDPEKGNTGQLTWTRLPQGFKNSPTLFNEALHRDLASFRALNPQVVMLQYVDDLLVAAPTYRDCKEGTRRLLQELSKLGYRVSAKKAQLCREEVTYLGYLLKGGKRWLTPARKATVMKIPTPTTPRQVREFLGTAGFCRLWIPGFASLAAPLYPLTRPKVPFTWTEAHQEAFGRIKEALLSAPALALPDLTKPFALYVDEKEGVARGVLTQTLGPWRRPVAYLSKKLDPVASGWPTCLKAIAAVALLLKDADKLTLGQNVLVIAPHNLESIVRQPPDRWMTNARMTHYQSLLLNERVSFAPPAILNPATLLPVESDDTPIHICSEILAEETGTRPDLRDQPLPGVPAWYTDGSSFIMDGRRQAGAAIVDNKRTVWASNLPEGTSAQKAELIALTQALRLAEGKSINIYTDSRYAFATAHVHGAIYKQRGWLTSAGKDIKNKEEILALLEAIHLPKRVAIIHCPGHQRGTDPVATGNRKADEAAKQAAQSTRILTETTKNAGKRTADGSEFEKRTADGSEFESPKKKAKVE

SEQ ID NO: 6411 - protein, 2105 aa, synthetic construct
MPAAKRVKLDGGDKKYSIGLDIGTNSVGWAVITDEYKVPSKKFKVLGNTDRHSIKKNLIGALLFDSGETAEATRLKRTARRRYTRRKNRICYLQEIFSNEMAKVDDSFFHRLEESFLVEEDKKHERHPIFGNIVDEVAYHEKYPTIYHLRKKLVDSTDKADLRLIYLALAHMIKFRGHFLIEGDLNPDNSDVDKLFIQLVQTYNQLFEENPINASGVDAKAILSARLSKSRRLENLIAQLPGEKKNGLFGNLIALSLGLTPNFKSNFDLAEDAKLQLSKDTYDDDLDNLLAQIGDQYADLFLAAKNLSDAILLSDILRVNTEITKAPLSASMIKRYDEHHQDLTLLKALVRQQLPEKYKEIFFDQSKNGYAGYIDGGASQEEFYKFIKPILEKMDGTEELLVKLNREDLLRKQRTFDNGSIPHQIHLGELHAILRRQEDFYPFLKDNREKIEKILTFRIPYYVGPLARGNSRFAWMTRKSEETITPWNFEEVVDKGASAQSFIERMTNFDKNLPNEKVLPKHSLLYEYFTVYNELTKVKYVTEGMRKPAFLSGEQKKAIVDLLFKTNRKVTVKQLKEDYFKKIECFDSVEISGVEDRFNASLGTYHDLLKIIKDKDFLDNEENEDILEDIVLTLTLFEDREMIEERLKTYAHLFDDKVMKQLKRRRYTGWGRLSRKLINGIRDKQSGKTILDFLKSDGFANRNFMQLIHDDSLTFKEDIQKAQVSGQGDSLHEHIANLAGSPAIKKGILQTVKVVDELVKVMGRHKPENIVIEMARENQTTQKGQKNSRERMKRIEEGIKELGSQILKEHPVENTQLQNEKLYLYYLQNGRDMYVDQELDINRLSDYDVDHIVPQSFLKDDSIDNKVLTRSDKARGKSDNVPSEEVVKKMKNYWRQLLNAKLITQRKFDNLTKAERGGLSELDKAGFIKRQLVETRQITKHVAQILDSRMNTKYDENDKLIREVKVITLKSKLVSDFRKDFQFYKVREINNYHHAHDAYLNAVVGTALIKKYPKLESEFVYGDYKVYDVRKMIAKSEQEIGKATAKYFFYSNIMNFFKTEITLANGEIRKRPLIETNGETGEIVWDKGRDFATVRKVLSMPQVNIVKKTEVQTGGFSKESILPKRNSDKLIARKKDWDPKKYGGFDSPTVAYSVLVVAKVEKGKSKKLKSVKELLGITIMERSSFEKNPIDFLEAKGYKEVKKDLIIKLPKYSLFELENGRKRMLASAGELQKGNELALPSKYVNFLYLASHYEKLKGSPEDNEQKQLFVEQHKHYLDEIIEQISEFSKRVILADANLDKVLSAYNKHRDKPIREQAENIIHLFTLTNLGAPAAFKYFDTTIDRKRYTSTKEVLDATLIHQSITGLYETRIDLSQLGGDGGEAAAKEAAAKEAAAKEAAAKGGTLNIEDEHRLHETSKEPDVSLGSTWLSDFPQAWAETGGMGLAVRQAPLIIPLKATSTPVSIKQYPMSQEARLGIKPHIQRLLDQGILVPCQSPWNTPLLPVKKPGTNDYRPVQDLREVNKRVEDIHPTVPNPYNLLSGLPPSHQWYTVLDLKDAFFCLRLHPTSQPLFAFEWRDPEMGISGQLTWTRLPQGFKNSPTLFDEALHRDLADFRIQHPDLILLQYVDDLLLAATSELDCQQGTRALLQTLGNLGYRASAKKAQICQKQVKYLGYLLKEGQRWLTEARKETVMGQPTPKTPRQLREFLGTAGFCRLWIPGFAEMAAPLYPLTKTGTLFNWGPDQQKAYQEIKQALLTAPALGLPDLTKPFELFVDEKQGYAKGVLTQKLGPWRRPVAYLSKKLDPVAAGWPPCLRMVAAIAVLTKDAGKLTMGQPLVILAPHAVEALVKQPPDRWLSNARMTHYQALLLDTDRVQFGPVVALNPATLLPLPEEGLQHNCLDILAEAHGTRPDLTDQPLPDADHTWYTDGSSLLQEGQRKAGAAVTTETEVIWAKALPAGTSAQRAELIALTQALKMAEGKKLNVYTDSRYAFATAHIHGEIYRRRGLLTSEGKEIKNKDEILALLKALFLPKRLSIIHCPGHQKGHSAEARGNRMADQAARKAAITETPDTSTLLAGKRTADGSEFEKRTADGSEFESPKKKAKVE

SEQ ID NO: 6412 - protein, 2099 aa, synthetic construct
MPAAKRVKLDGGDKKYSIGLDIGTNSVGWAVITDEYKVPSKKFKVLGNTDRHSIKKNLIGALLFDSGETAEATRLKRTARRRYTRRKNRICYLQEIFSNEMAKVDDSFFHRLEESFLVEEDKKHERHPIFGNIVDEVAYHEKYPTIYHLRKKLVDSTDKADLRLIYLALAHMIKFRGHFLIEGDLNPDNSDVDKLFIQLVQTYNQLFEENPINASGVDAKAILSARLSKSRRLENLIAQLPGEKKNGLFGNLIALSLGLTPNFKSNFDLAEDAKLQLSKDTYDDDLDNLLAQIGDQYADLFLAAKNLSDAILLSDILRVNTEITKAPLSASMIKRYDEHHQDLTLLKALVRQQLPEKYKEIFFDQSKNGYAGYIDGGASQEEFYKFIKPILEKMDGTEELLVKLNREDLLRKQRTFDNGSIPHQIHLGELHAILRRQEDFYPFLKDNREKIEKILTFRIPYYVGPLARGNSRFAWMTRKSEETITPWNFEEVVDKGASAQSFIERMTNFDKNLPNEKVLPKHSLLYEYFTVYNELTKVKYVTEGMRKPAFLSGEQKKAIVDLLFKTNRKVTVKQLKEDYFKKIECFDSVEISGVEDRFNASLGTYHDLLKIIKDKDFLDNEENEDILEDIVLTLTLFEDREMIEERLKTYAHLFDDKVMKQLKRRRYTGWGRLSRKLINGIRDKQSGKTILDFLKSDGFANRNFMQLIHDDSLTFKEDIQKAQVSGQGDSLHEHIANLAGSPAIKKGILQTVKVVDELVKVMGRHKPENIVIEMARENQTTQKGQKNSRERMKRIEEGIKELGSQILKEHPVENTQLQNEKLYLYYLQNGRDMYVDQELDINRLSDYDVDHIVPQSFLKDDSIDNKVLTRSDKARGKSDNVPSEEVVKKMKNYWRQLLNAKLITQRKFDNLTKAERGGLSELDKAGFIKRQLVETRQITKHVAQILDSRMNTKYDENDKLIREVKVITLKSKLVSDFRKDFQFYKVREINNYHHAHDAYLNAVVGTALIKKYPKLESEFVYGDYKVYDVRKMIAKSEQEIGKATAKYFFYSNIMNFFKTEITLANGEIRKRPLIETNGETGEIVWDKGRDFATVRKVLSMPQVNIVKKTEVQTGGFSKESILPKRNSDKLIARKKDWDPKKYGGFDSPTVAYSVLVVAKVEKGKSKKLKSVKELLGITIMERSSFEKNPIDFLEAKGYKEVKKDLIIKLPKYSLFELENGRKRMLASAGELQKGNELALPSKYVNFLYLASHYEKLKGSPEDNEQKQLFVEQHKHYLDEIIEQISEFSKRVILADANLDKVLSAYNKHRDKPIREQAENIIHLFTLTNLGAPAAFKYFDTTIDRKRYTSTKEVLDATLIHQSITGLYETRIDLSQLGGDGGEAAAKEAAAKEAAAKEAAAKGGTLQLDDEYRLYSPLVKPDQNIQFWLEQFPQAWAETAGMGLAKQVPPQVIQLKASATPVSVRQYPLSKEAQEGIRPHVQRLIQQGILVPVQSPWNTPLLPVRKPGTNDYRPVQDLREVNKRVQDIHPTVPNPYNLLCALPPQRSWYTVLDLKDAFFCLRLHPTSQPLFAFEWRDPGTGRTGQLTWTRLPQGFKNSPTIFDEALHRDLANFRIQHPQVTLLQYVDDLLLAGATKQDCLEGTKALLLELSDLGYRASAKKAQICRREVTYLGYSLRDGQRWLTEARKKTVVQIPAPTTAKQVREFLGTAGFCRLWIPGFATLAAPLYPLTKEKGEFSWAPEHQKAFDAIKKALLSAPALALPDVTKPFTLYVDERKGVARGVLTQTLGPWRRPVAYLSKKLDPVASGWPVCLKAIAAVAILVKDADKLTLGQNITVIAPHALENIVRQPPDRWMTNARMTHYQSLLLTERVTFAPPAALNPATLLPEETDEPVTHDCHQLLIEETGVRKDLTDIPLTGEVLTWFTDGSSYVVEGKRMAGAAVVDGTRTIWASSLPEGTSAQKAELMALTQALRLAEGKSINIYTDSRYAFATAHVHGAIYKQRGLLTSAGREIKNKEEILSLLEALHLPKRLAIIHCPGHQKAKDPISRGNQMADRVAKQAAQGVNLLAGKRTADGSEFEKRTADGSEFESPKKKAKVE

SEQ ID NO: 6413 - protein, 2099 aa, synthetic construct; identical to SEQ ID NO: 6412

SEQ ID NO: 6414 - protein, 2096 aa, synthetic construct
MPAAKRVKLDGGDKKYSIGLDIGTNSVGWAVITDEYKVPSKKFKVLGNTDRHSIKKNLIGALLFDSGETAEATRLKRTARRRYTRRKNRICYLQEIFSNEMAKVDDSFFHRLEESFLVEEDKKHERHPIFGNIVDEVAYHEKYPTIYHLRKKLVDSTDKADLRLIYLALAHMIKFRGHFLIEGDLNPDNSDVDKLFIQLVQTYNQLFEENPINASGVDAKAILSARLSKSRRLENLIAQLPGEKKNGLFGNLIALSLGLTPNFKSNFDLAEDAKLQLSKDTYDDDLDNLLAQIGDQYADLFLAAKNLSDAILLSDILRVNTEITKAPLSASMIKRYDEHHQDLTLLKALVRQQLPEKYKEIFFDQSKNGYAGYIDGGASQEEFYKFIKPILEKMDGTEELLVKLNREDLLRKQRTFDNGSIPHQIHLGELHAILRRQEDFYPFLKDNREKIEKILTFRIPYYVGPLARGNSRFAWMTRKSEETITPWNFEEVVDKGASAQSFIERMTNFDKNLPNEKVLPKHSLLYEYFTVYNELTKVKYVTEGMRKPAFLSGEQKKAIVDLLFKTNRKVTVKQLKEDYFKKIECFDSVEISGVEDRFNASLGTYHDLLKIIKDKDFLDNEENEDILEDIVLTLTLFEDREMIEERLKTYAHLFDDKVMKQLKRRRYTGWGRLSRKLINGIRDKQSGKTILDFLKSDGFANRNFMQLIHDDSLTFKEDIQKAQVSGQGDSLHEHIANLAGSPAIKKGILQTVKVVDELVKVMGRHKPENIVIEMARENQTTQKGQKNSRERMKRIEEGIKELGSQILKEHPVENTQLQNEKLYLYYLQNGRDMYVDQELDINRLSDYDVDHIVPQSFLKDDSIDNKVLTRSDKARGKSDNVPSEEVVKKMKNYWRQLLNAKLITQRKFDNLTKAERGGLSELDKAGFIKRQLVETRQITKHVAQILDSRMNTKYDENDKLIREVKVITLKSKLVSDFRKDFQFYKVREINNYHHAHDAYLNAVVGTALIKKYPKLESEFVYGDYKVYDVRKMIAKSEQEIGKATAKYFFYSNIMNFFKTEITLANGEIRKRPLIETNGETGEIVWDKGRDFATVRKVLSMPQVNIVKKTEVQTGGFSKESILPKRNSDKLIARKKDWDPKKYGGFDSPTVAYSVLVVAKVEKGKSKKLKSVKELLGITIMERSSFEKNPIDFLEAKGYKEVKKDLIIKLPKYSLFELENGRKRMLASAGELQKGNELALPSKYVNFLYLASHYEKLKGSPEDNEQKQLFVEQHKHYLDEIIEQISEFSKRVILADANLDKVLSAYNKHRDKPIREQAENIIHLFTLTNLGAPAAFKYFDTTIDRKRYTSTKEVLDATLIHQSITGLYETRIDLSQLGGDGGEAAAKEAAAKEAAAKEAAAKGGVPWLMKKPLQLTVLVPLHEYQERLLQQTALPKEQKELLQKLFLKYDALWQHWENQVGHRRIKPHNIATGTLAPRPQKQYPINPKAKPSIQIVIDDLLKQGVLIQQNSTMNTPVYPVPKPDGKWRMVLDYREVNKTIPLIAAQNQHSAGILSSIYRGKYKTTLDLTNGFWAHPITPESYWLTAFTWQGKQYCWTRLPQGFLNSPALFNADVVDLLKEIPNVQAYVDDIYISHDDPQEHLEQLEKIFSILLNAGYVVSLKKSEIAQREVEFLGFNITKEGRGLTDTFKQKLLNITPPKDLKQLQSILGKLNFARNFIPNYSELVKPLYTIVAPANGKFISWTEDNSNQLQHIISVLNQADNLEERNPETRLIIKVNSSPSAGYIRYYNEGSKRPIMYVNYIFSKAEAKFTQTEKLLTTMHKGLIKAMDLAMGQEILVYSPIVSMTKIQRTPLPERKALPVRWITWMTYLEDPRIQFHYDKSLPELQQIPNVTEDVIAKTKHPSEFAMVFYTDGSAIKHPDVNKSHSAGMGIAQVQFIPEYKIVHQWSIPLGDHTAQLAEIAAVEFACKKALKISGPVLIVTDSFYVAESANKELPYWKSNGFLNNKKKPLRHVSKWKSIAECLQLKPDIIIMHEKGHQQPMTTLHTEGNNLADKLATQGSYVVHAGKRTADGSEFEKRTADGSEFESPKKKAKVE

SEQ ID NO: 6415 - protein, 2185 aa, synthetic construct
MPAAKRVKLDGGDKKYSIGLDIGTNSVGWAVITDEYKVPSKKFKVLGNTDRHSIKKNLIGALLFDSGETAEATRLKRTARRRYTRRKNRICYLQEIFSNEMAKVDDSFFHRLEESFLVEEDKKHERHPIFGNIVDEVAYHEKYPTIYHLRKKLVDSTDKADLRLIYLALAHMIKFRGHFLIEGDLNPDNSDVDKLFIQLVQTYNQLFEENPINASGVDAKAILSARLSKSRRLENLIAQLPGEKKNGLFGNLIALSLGLTPNFKSNFDLAEDAKLQLSKDTYDDDLDNLLAQIGDQYADLFLAAKNLSDAILLSDILRVNTEITKAPLSASMIKRYDEHHQDLTLLKALVRQQLPEKYKEIFFDQSKNGYAGYIDGGASQEEFYKFIKPILEKMDGTEELLVKLNREDLLRKQRTFDNGSIPHQIHLGELHAILRRQEDFYPFLKDNREKIEKILTFRIPYYVGPLARGNSRFAWMTRKSEETITPWNFEEVVDKGASAQSFIERMTNFDKNLPNEKVLPKHSLLYEYFTVYNELTKVKYVTEGMRKPAFLSGEQKKAIVDLLFKTNRKVTVKQLKEDYFKKIECFDSVEISGVEDRFNASLGTYHDLLKIIKDKDFLDNEENEDILEDIVLTLTLFEDREMIEERLKTYAHLFDDKVMKQLKRRRYTGWGRLSRKLINGIRDKQSGKTILDFLKSDGFANRNFMQLIHDDSLTFKEDIQKAQVSGQGDSLHEHIANLAGSPAIKKGILQTVKVVDELVKVMGRHKPENIVIEMARENQTTQKGQKNSRERMKRIEEGIKELGSQILKEHPVENTQLQNEKLYLYYLQNGRDMYVDQELDINRLSDYDVDHIVPQSFLKDDSIDNKVLTRSDKARGKSDNVPSEEVVKKMKNYWRQLLNAKLITQRKFDNLTKAERGGLSELDKAGFIKRQLVETRQITKHVAQILDSRMNTKYDENDKLIREVKVITLKSKLVSDFRKDFQFYKVREINNYHHAHDAYLNAVVGTALIKKYPKLESEFVYGDYKVYDVRKMIAKSEQEIGKATAKYFFYSNIMNFFKTEITLANGEIRKRPLIETNGETGEIVWDKGRDFATVRKVLSMPQVNIVKKTEVQTGGFSKESILPKRNSDKLIARKKDWDPKKYGGFDSPTVAYSVLVVAKVEKGKSKKLKSVKELLGITIMERSSFEKNPIDFLEAKGYKEVKKDLIIKLPKYSLFELENGRKRMLASAGELQKGNELALPSKYVNFLYLASHYEKLKGSPEDNEQKQLFVEQHKHYLDEIIEQISEFSKRVILADANLDKVLSAYNKHRDKPIREQAENIIHLFTLTNLGAPAAFKYFDTTIDRKRYTSTKEVLDATLIHQSITGLYETRIDLSQLGGDGGEAAAKEAAAKEAAAKEAAAKGGMDPLQLLQPLEAEIKGTKLKAHWNSGATITCVPEAFLEDERPIQTMLIKTIHGEKQQDVYYLTFKVQGRKVEAEVLASPYDYILLNPSDVPWLMKKPLQLTVLVPLHEYQERLLQQTALPKEQKELLQKLFLKYDALWQHWENQVGHRRIKPHNIATGTLAPRPQKQYPINPKAKPSIQIVIDDLLKQGVLIQQNSTMNTPVYPVPKPDGKWRMVLDYREVNKTIPLIAAQNQHSAGILSSIYRGKYKTTLDLTNGFWAHPITPESYWLTAFTWQGKQYCWTRLPQGFLNSPALFNADVVDLLKEIPNVQAYVDDIYISHDDPQEHLEQLEKIFSILLNAGYVVSLKKSEIAQREVEFLGFNITKEGRGLTDTFKQKLLNITPPKDLKQLQSILGLLNFARNFIPNYSELVKPLYTIVAPANGKFISWTEDNSNQLQHIISVLNQADNLEERNPETRLIIKVNSSPSAGYIRYYNEGSKRPIMYVNYIFSKAEAKFTQTEKLLTTMHKGLIKAMDLAMGQEILVYSPIVSMTKIQRTPLPERKALPVRWITWMTYLEDPRIQFHYDKSLPELQQIPNVTEDVIAKTKHPSEFAMVFYTDGSAIKHPDVNKSHSAGMGIAQVQFIPEYKIVHQWSIPLGDHTAQLAEIAAVEFACKKALKISGPVLIVTDSFYVAESANKELPYWKSNGFLNNKKKPLRHVSKWKSIAECLQLKPDIIIMHEKGHQQPMTTLHTEGNNLADKLATQGSYVVHAGKRTADGSEFEKRTADGSEFESPKKKAKVE

SEQ ID NO: 6416 - protein, 2185 aa, synthetic construct
MPAAKRVKLDGGDKKYSIGLDIGTNSVGWAVITDEYKVPSKKFKVLGNTDRHSIKKNLIGALLFDSGETAEATRLKRTARRRYTRRKNRICYLQEIFSNEMAKVDDSFFHRLEESFLVEEDKKHERHPIFGNIVDEVAYHEKYPTIYHLRKKLVDSTDKADLRLIYLALAHMIKFRGHFLIEGDLNPDNSDVDKLFIQLVQTYNQLFEENPINASGVDAKAILSARLSKSRRLENLIAQLPGEKKNGLFGNLIALSLGLTPNFKSNFDLAEDAKLQLSKDTYDDDLDNLLAQIGDQYADLFLAAKNLSDAILLSDILRVNTEITKAPLSASMIKRYDEHHQDLTLLKALVRQQLPEKYKEIFFDQSKNGYAGYIDGGASQEEFYKFIKPILEKMDGTEELLVKLNREDLLRKQRTFDNGSIPHQIHLGELHAILRRQEDFYPFLKDNREKIEKILTFRIPYYVGPLARGNSRFAWMTRKSEETITPWNFEEVVDKGASAQSFIERMTNFDKNLPNEKVLPKHSLLYEYFTVYNELTKVKYVTEGMRKPAFLSGEQKKAIVDLLFKTNRKVTVKQLKEDYFKKIECFDSVEISGVEDRFNASLGTYHDLLKIIKDKDFLDNEENEDILEDIVLTLTLFEDREMIEERLKTYAHLFDDKVMKQLKRRRYTGWGRLSRKLINGIRDKQSGKTILDFLKSDGFANRNFMQLIHDDSLTFKEDIQKAQVSGQGDSLHEHIANLAGSPAIKKGILQTVKVVDELVKVMGRHKPENIVIEMARENQTTQKGQKNSRERMKRIEEGIKELGSQILKEHPVENTQLQNEKLYLYYLQNGRDMYVDQELDINRLSDYDVDHIVPQSFLKDDSIDNKVLTRSDKARGKSDNVPSEEVVKKMKNYWRQLLNAKLITQRKFDNLTKAERGGLSELDKAGFIKRQLVETRQITKHVAQILDSRMNTKYDENDKLIREVKVITLKSKLVSDFRKDFQFYKVREINNYHHAHDAYLNAVVGTALIKKYPKLESEFVYGDYKVYDVRKMIAKSEQEIGKATAKYFFYSNIMNFFKTEITLANGEIRKRPLIETNGETGEIVWDKGRDFATVRKVLSMPQVNIVKKTEVQTGGFSKESILPKRNSDKLIARKKDWDPKKYGGFDSPTVAYSVLVVAKVEKGKSKKLKSVKELLGITIMERSSFEKNPIDFLEAKGYKEVKKDLIIKLPKYSLFELENGRKRMLASAGELQKGNELALPSKYVNFLYLASHYEKLKGSPEDNEQKQLFVEQHKHYLDEIIEQISEFSKRVILADANLDKVLSAYNKHRDKPIREQAENIIHLFTLTNLGAPAAFKYFDTTIDRKRYTSTKEVLDATLIHQSITGLYETRIDLSQLGGDGGEAAAKEAAAKEAAAKEAAAKGGMDPLQLLQPLEAEIKGTKLKAHWNSGATITCVPEAFLEDERPIQTMLIKTIHGEKQQDVYYLTFKVQGRKVEAEVLASPYDYILLNPSDVPWLMKKPLQLTVLVPLHEYQERLLQQTALPKEQKELLQKLFLKYDALWQHWENQVGHRRIKPHNIATGTLAPRPQKQYPINPKAKPSIQIVIDDLLKQGVLIQQNSTMNTPVYPVPKPDGKWRMVLDYREVNKTIPLIAAQNQHSAGILSSIYRGKYKTTLDLTNGFWAHPITPESYWLTAFTWQGKQYCWTRLPQGFLNSPALFNADVVDLLKEIPNVQAYVDDIYISHDDPQEHLEQLEKIFSILLNAGYVVSLKKSEIAQREVEFLGFNITKEGRGLTDTFKQKLLNITPPKDLKQLQSILGKLNFARNFIPNYSELVKPLYTIVAPANGKFISWTEDNSNQLQHIISVLNQADNLEERNPETRLIIKVNSSPSAGYIRYYNEGSKRPIMYVNYIFSKAEAKFTQTEKLLTTMHKGLIKAMDLAMGQEILVYSPIVSMTKIQRTPLPERKALPVRWITWMTYLEDPRIQFHYDKSLPELQQIPNVTEDVIAKTKHPSEFAMVFYTDGSAIKHPDVNKSHSAGMGIAQVQFIPEYKIVHQWSIPLGDHTAQLAEIAAVEFACKKALKISGPVLIVTDSFYVAESANKELPYWKSNGFLNNKKKPLRHVSKWKSIAECLQLKPDIIIMHEKGHQQPMTTLHTEGNNLADKLATQGSYVVHAGKRTADGSEFEKRTADGSEFESPKKKAKVE

SEQ ID NO: 6417 - protein, 2185 aa, synthetic construct
MPAAKRVKLDGGDKKYSIGLDIGTNSVGWAVITDEYKVPSKKFKVLGNTDRHSIKKNLIGALLFDSGETAEATRLKRTARRRYTRRKNRICYLQEIFSNEMAKVDDSFFHRLEESFLVEEDKKHERHPIFGNIVDEVAYHEKYPTIYHLRKKLVDSTDKADLRLIYLALAHMIKFRGHFLIEGDLNPDNSDVDKLFIQLVQTYNQLFEENPINASGVDAKAILSARLSKSRRLENLIAQLPGEKKNGLFGNLIALSLGLTPNFKSNFDLAEDAKLQLSKDTYDDDLDNLLAQIGDQYADLFLAAKNLSDAILLSDILRVNTEITKAPLSASMIKRYDEHHQDLTLLKALVRQQLPEKYKEIFFDQSKNGYAGYIDGGASQEEFYKFIKPILEKMDGTEELLVKLNREDLLRKQRTFDNGSIPHQIHLGELHAILRRQEDFYPFLKDNREKIEKILTFRIPYYVGPLARGNSRFAWMTRKSEETITPWNFEEVVDKGASAQSFIERMTNFDKNLPNEKVLPKHSLLYEYFTVYNELTKVKYVTEGMRKPAFLSGEQKKAIVDLLFKTNRKVTVKQLKEDYFKKIECFDSVEISGVEDRFNASLGTYHDLLKIIKDKDFLDNEENEDILEDIVLTLTLFEDREMIEERLKTYAHLFDDKVMKQLKRRRYTGWGRLSRKLINGIRDKQSGKTILDFLKSDGFANRNFMQLIHDDSLTFKEDIQKAQVSGQGDSLHEHIANLAGSPAIKKGILQTVKVVDELVKVMGRHKPENIVIEMARENQTTQKGQKNSRERMKRIEEGIKELGSQILKEHPVENTQLQNEKLYLYYLQNGRDMYVDQELDINRLSDYDVDHIVPQSFLKDDSIDNKVLTRSDKARGKSDNVPSEEVVKKMKNYWRQLLNAKLITQRKFDNLTKAERGGLSELDKAGFIKRQLVETRQITKHVAQILDSRMNTKYDENDKLIREVKVITLKSKLVSDFRKDFQFYKVREINNYHHAHDAYLNAVVGTALIKKYPKLESEFVYGDYKVYDVRKMIAKSEQEIGKATAKYFFYSNIMNFFKTEITLANGEIRKRPLIETNGETGEIVWDKGRDFATVRKVLSMPQVNIVKKTEVQTGGFSKESILPKRNSDKLIARKKDWDPKKYGGFDSPTVAYSVLVVAKVEKGKSKKLKSVKELLGITIMERSSFEKNPIDFLEAKGYKEVKKDLIIKLPKYSLFELENGRKRMLASAGELQKGNELALPSKYVNFLYLASHYEKLKGSPEDNEQKQLFVEQHKHYLDEIIEQISEFSKRVILADANLDKVLSAYNKHRDKPIREQAENIIHLFTLTNLGAPAAFKYFDTTIDRKRYTSTKEVLDATLIHQSITGLYETRIDLSQLGGDGGEAAAKEAAAKEAAAKEAAAKGGMDPLQLLQPLEAEIKGTKLKAHWNSGATITCVPQAFLEEEVPIKNIWIKTIHGEKEQPVYYLTFKIQGRKVEAEVISSPYDYILVSPSDIPWLMKKPLQLTTLVPLQEYEERLLKQTMLTGSYKEKLQSLFLKYDALWQHWENQVGHRRIKPHHIATGTVNPRPQKQYPINPKAKASIQTVINDLLKQGVLIQQNSIMNTPVYPVPKPDGKWRMVLDYREVNKTIPLIAAQNQHSAGILSSIFRGKYKTTLDLSNGFWAHSITPESYWLTAFTWLGQQYCWTRLPQGFLNSPALFNADVVDLLKEVPNVQVYVDDIYISHDDPREHLEQLEKVFSLLLNAGYVVSLKKSEIAQHEVEFLGFNITKEGRGLTETFKQKLLNITPPRDLKQLQSILGLLNFARNFIPNFSELVKPLYNIIATAPGKYITWTTDNSQQLQNIISMLNSAENLEERNPEVRLIMKVNTSPSAGYIRFYNEFAKRPIMYLNYVYTKAEVKFTNTEKLLTTIHKGLIKALDLGMGQEILVYSPIVSMTKIQKTPLPERKALPIRWITWMSYLEDPRIQFHYDKTLPELQQVPTVTDDIIAKIKHPSEFSMVFYTDGSAIKHPNVNKSHNAGMGIAQVQFKPEFTVINTWSIPLGDHTAQLAEVAAVEFACKKALKIDGPVLIVTDSFYVAESVNKELPYWQSNGFFNNKKKPLKHVSKWKSIADCIQLKPDIIIIHEKGHQPTASTFHTEGNNLADKLATQGSYVVNAGKRTADGSEFEKRTADGSEFESPKKKAKVE

SEQ ID NO: 6418 - protein, 2185 aa, synthetic construct
MPAAKRVKLDGGDKKYSIGLDIGTNSVGWAVITDEYKVPSKKFKVLGNTDRHSIKKNLIGALLFDSGETAEATRLKRTARRRYTRRKNRICYLQEIFSNEMAKVDDSFFHRLEESFLVEEDKKHERHPIFGNIVDEVAYHEKYPTIYHLRKKLVDSTDKADLRLIYLALAHMIKFRGHFLIEGDLNPDNSDVDKLFIQLVQTYNQLFEENPINASGVDAKAILSARLSKSRRLENLIAQLPGEKKNGLFGNLIALSLGLTPNFKSNFDLAEDAKLQLSKDTYDDDLDNLLAQIGDQYADLFLAAKNLSDAILLSDILRVNTEITKAPLSASMIKRYDEHHQDLTLLKALVRQQLPEKYKEIFFDQSKNGYAGYIDGGASQEEFYKFIKPILEKMDGTEELLVKLNREDLLRKQRTFDNGSIPHQIHLGELHAILRRQEDFYPFLKDNREKIEKILTFRIPYYVGPLARGNSRFAWMTRKSEETITPWNFEEVVDKGASAQSFIERMTNFDKNLPNEKVLPKHSLLYEYFTVYNELTKVKYVTEGMRKPAFLSGEQKKAIVDLLFKTNRKVTVKQLKEDYFKKIECFDSVEISGVEDRFNASLGTYHDLLKIIKDKDFLDNEENEDILEDIVLTLTLFEDREMIEERLKTYAHLFDDKVMKQLKRRRYTGWGRLSRKLINGIRDKQSGKTILDFLKSDGFANRNFMQLIHDDSLTFKEDIQKAQVSGQGDSLHEHIANLAGSPAIKKGILQTVKVVDELVKVMGRHKPENIVIEMARENQTTQKGQKNSRERMKRIEEGIKELGSQILKEHPVENTQLQNEKLYLYYLQNGRDMYVDQELDINRLSDYDVDHIVPQSFLKDDSIDNKVLTRSDKARGKSDNVPSEEVVKKMKNYWRQLLNAKLITQRKFDNLTKAERGGLSELDKAGFIKRQLVETRQITKHVAQILDSRMNTKYDENDKLIREVKVITLKSKLVSDFRKDFQFYKVREINNYHHAHDAYLNAVVGTALIKKYPKLESEFVYGDYKVYDVRKMIAKSEQEIGKATAKYFFYSNIMNFFKTEITLANGEIRKRPLIETNGETGEIVWDKGRDFATVRKVLSMPQVNIVKKTEVQTGGFSKESILPKRNSDKLIARKKDWDPKKYGGFDSPTVAYSVLVVAKVEKGKSKKLKSVKELLGITIMERSSFEKNPIDFLEAKGYKEVKKDLIIKLPKYSLFELENGRKRMLASAGELQKGNELALPSKYVNFLYLASHYEKLKGSPEDNEQKQLFVEQHKHYLDEIIEQISEFSKRVILADANLDKVLSAYNKHRDKPIREQAENIIHLFTLTNLGAPAAFKYFDTTIDRKRYTSTKEVLDATLIHQSITGLYETRIDLSQLGGDGGEAAAKEAAAKEAAAKEAAAKGGMDPLQLLQPLEAEIKGTKLKAHWNSGATITCVPQAFLEEEVPIKNIWIKTIHGEKEQPVYYLTFKIQGRKVEAEVISSPYDYILVSPSDIPWLMKKPLQLTTLVPLQEYEERLLKQTMLTGSYKEKLQSLFLKYDALWQHWENQVGHRRIKPHHIATGTVNPRPQKQYPINPKAKASIQTVINDLLKQGVLIQQNSIMNTPVYPVPKPDGKWRMVLDYREVNKTIPLIAAQNQHSAGILSSIFRGKYKTTLDLSNGFWAHSITPESYWLTAFTWLGQQYCWTRLPQGFLNSPALFNADVVDLLKEVPNVQVYVDDIYISHDDPREHLEQLEKVFSLLLNAGYVVSLKKSEIAQHEVEFLGFNITKEGRGLTETFKQKLLNITPPRDLKQLQSILGKLNFARNFIPNFSELVKPLYNIIATAPGKYITWTTDNSQQLQNIISMLNSAENLEERNPEVRLIMKVNTSPSAGYIRFYNEFAKRPIMYLNYVYTKAEVKFTNTEKLLTTIHKGLIKALDLGMGQEILVYSPIVSMTKIQKTPLPERKALPIRWITWMSYLEDPRIQFHYDKTLPELQQVPTVTDDIIAKIKHPSEFSMVFYTDGSAIKHPNVNKSHNAGMGIAQVQFKPEFTVINTWSIPLGDHTAQLAEVAAVEFACKKALKIDGPVLIVTDSFYVAESVNKELPYWQSNGFFNNKKKPLKHVSKWKSIADCIQLKPDIIIIHEKGHQPTASTFHTEGNNLADKLATQGSYVVNAGKRTADGSEFEKRTADGSEFESPKKKAKVE

SEQ ID NO: 6419 - protein, 2105 aa, synthetic construct
MPAAKRVKLDGGDKKYSIGLDIGTNSVGWAVITDEYKVPSKKFKVLGNTDRHSIKKNLIGALLFDSGETAEATRLKRTARRRYTRRKNRICYLQEIFSNEMAKVDDSFFHRLEESFLVEEDKKHERHPIFGNIVDEVAYHEKYPTIYHLRKKLVDSTDKADLRLIYLALAHMIKFRGHFLIEGDLNPDNSDVDKLFIQLVQTYNQLFEENPINASGVDAKAILSARLSKSRRLENLIAQLPGEKKNGLFGNLIALSLGLTPNFKSNFDLAEDAKLQLSKDTYDDDLDNLLAQIGDQYADLFLAAKNLSDAILLSDILRVNTEITKAPLSASMIKRYDEHHQDLTLLKALVRQQLPEKYKEIFFDQSKNGYAGYIDGGASQEEFYKFIKPILEKMDGTEELLVKLNREDLLRKQRTFDNGSIPHQIHLGELHAILRRQEDFYPFLKDNREKIEKILTFRIPYYVGPLARGNSRFAWMTRKSEETITPWNFEEVVDKGASAQSFIERMTNFDKNLPNEKVLPKHSLLYEYFTVYNELTKVKYVTEGMRKPAFLSGEQKKAIVDLLFKTNRKVTVKQLKEDYFKKIECFDSVEISGVEDRFNASLGTYHDLLKIIKDKDFLDNEENEDILEDIVLTLTLFEDREMIEERLKTYAHLFDDKVMKQLKRRRYTGWGRLSRKLINGIRDKQSGKTILDFLKSDGFANRNFMQLIHDDSLTFKEDIQKAQVSGQGDSLHEHIANLAGSPAIKKGILQTVKVVDELVKVMGRHKPENIVIEMARENQTTQKGQKNSRERMKRIEEGIKELGSQILKEHPVENTQLQNEKLYLYYLQNGRDMYVDQELDINRLSDYDVDHIVPQSFLKDDSIDNKVLTRSDKARGKSDNVPSEEVVKKMKNYWRQLLNAKLITQRKFDNLTKAERGGLSELDKAGFIKRQLVETRQITKHVAQILDSRMNTKYDENDKLIREVKVITLKSKLVSDFRKDFQFYKVREINNYHHAHDAYLNAVVGTALIKKYPKLESEFVYGDYKVYDVRKMIAKSEQEIGKATAKYFFYSNIMNFFKTEITLANGEIRKRPLIETNGETGEIVWDKGRDFATVRKVLSMPQVNIVKKTEVQTGGFSKESILPKRNSDKLIARKKDWDPKKYGGFDSPTVAYSVLVVAKVEKGKSKKLKSVKELLGITIMERSSFEKNPIDFLEAKGYKEVKKDLIIKLPKYSLFELENGRKRMLASAGELQKGNELALPSKYVNFLYLASHYEKLKGSPEDNEQKQLFVEQHKHYLDEIIEQISEFSKRVILADANLDKVLSAYNKHRDKPIREQAENIIHLFTLTNLGAPAAFKYFDTTIDRKRYTSTKEVLDATLIHQSITGLYETRIDLSQLGGDGGEAAAKEAAAKEAAAKEAAAKGGTLNIEDEYRLHETSKEPDVPLGSTWLSDFPQAWAETGGMGLAVRQAPLIIPLKATSTPVSIKQYPMSQEARLGIKPHIQRLLDQGILVPCQSPWNTPLLPVKKPGTNDYRPVQDLREVNKRVEDIHPTVPNPYNLLSGLPPSHQWYTVLDLKDAFFCLRLHPTSQPLFAFEWRDPEMGISGQLTWTRLPQGFKNSPTLFDEALHRDLADFRIQHPDLILLQYVDDLLLAATSEQDCQRGTRALLQTLGNLGYRASAKKAQICQKQVKYLGYLLKEGQRWLTEARKETVMGQPTPKTPRQLREFLGTAGFCRLWIPGFAEMAAPLYPLTKTGTLFNWGPDQQKAYQEIKQALLTAPALGLPDLTKPFELFVDEKQGYAKGVLTQKLGPWRRPVAYLSKKLDPVAAGWPPCLRMVAAIAVLTKDAGKLTMGQPLVILAPHAVEALVKQPPDRWLSNARMTHYQAMLLDTDRVQFGPVVALNPATLLPLPEKEAPHDCLEILAETHGTRPDLTDQPIPDADYTWYTDGSSFLQEGQRRAGAAVTTETEVIWARALPAGTSAQRAELIALTQALKMAEGKKLNVYTDSRYAFATAHVHGEIYRRRGLLTSEGREIKNKNEILALLKALFLPKRLSIIHCPGHQKGNSAEARGNRMADQAAREAAMKAVLETSTLLAGKRTADGSEFEKRTADGSEFESPKKKAKVE

SEQ ID NO: 6420 - protein, 2112 aa, synthetic construct
MPAAKRVKLDGGDKKYSIGLDIGTNSVGWAVITDEYKVPSKKFKVLGNTDRHSIKKNLIGALLFDSGETAEATRLKRTARRRYTRRKNRICYLQEIFSNEMAKVDDSFFHRLEESFLVEEDKKHERHPIFGNIVDEVAYHEKYPTIYHLRKKLVDSTDKADLRLIYLALAHMIKFRGHFLIEGDLNPDNSDVDKLFIQLVQTYNQLFEENPINASGVDAKAILSARLSKSRRLENLIAQLPGEKKNGLFGNLIALSLGLTPNFKSNFDLAEDAKLQLSKDTYDDDLDNLLAQIGDQYADLFLAAKNLSDAILLSDILRVNTEITKAPLSASMIKRYDEHHQDLTLLKALVRQQLPEKYKEIFFDQSKNGYAGYIDGGASQEEFYKFIKPILEKMDGTEELLVKLNREDLLRKQRTFDNGSIPHQIHLGELHAILRRQEDFYPFLKDNREKIEKILTFRIPYYVGPLARGNSRFAWMTRKSEETITPWNFEEVVDKGASAQSFIERMTNFDKNLPNEKVLPKHSLLYEYFTVYNELTKVKYVTEGMRKPAFLSGEQKKAIVDLLFKTNRKVTVKQLKEDYFKKIECFDSVEISGVEDRFNASLGTYHDLLKIIKDKDFLDNEENEDILEDIVLTLTLFEDREMIEERLKTYAHLFDDKVMKQLKRRRYTGWGRLSRKLINGIRDKQSGKTILDFLKSDGFANRNFMQLIHDDSLTFKEDIQKAQVSGQGDSLHEHIANLAGSPAIKKGILQTVKVVDELVKVMGRHKPENIVIEMARENQTTQKGQKNSRERMKRIEEGIKELGSQILKEHPVENTQLQNEKLYLYYLQNGRDMYVDQELDINRLSDYDVDHIVPQSFLKDDSIDNKVLTRSDKARGKSDNVPSEEVVKKMKNYWRQLLNAKLITQRKFDNLTKAERGGLSELDKAGFIKRQLVETRQITKHVAQILDSRMNTKYDENDKLIREVKVITLKSKLVSDFRKDFQFYKVREINNYHHAHDAYLNAVVGTALIKKYPKLESEFVYGDYKVYDVRKMIAKSEQEIGKATAKYFFYSNIMNFFKTEITLANGEIRKRPLIETNGETGEIVWDKGRDFATVRKVLSMPQVNIVKKTEVQTGGFSKESILPKRNSDKLIARKKDWDPKKYGGFDSPTVAYSVLVVAKVEKGKSKKLKSVKELLGITIMERSSFEKNPIDFLEAKGYKEVKKDLIIKLPKYSLFELENGRKRMLASAGELQKGNELALPSKYVNFLYLASHYEKLKGSPEDNEQKQLFVEQHKHYLDEIIEQISEFSKRVILADANLDKVLSAYNKHRDKPIREQAENIIHLFTLTNLGAPAAFKYFDTTIDRKRYTSTKEVLDATLIHQSITGLYETRIDLSQLGGDGGEAAAKEAAAKEAAAKEAAAKEAAAKGGTAPLEEEYRLFLEAPIQNVTLLEQWKREIPKVWAEINPPGLASTQAPIHVQLLSTALPVRVRQYPITLEAKRSLRETIRKFRAAGILRPVHSPWNTPLLPVRKSGTSEYRMVQDLREVNKRVETIHPTVPNPYTLLSLLPPDRIWYSVLDLKDAFFCIPLAPESQLIFAFEWADAEEGESGQLTWTRLPQGFKNSPTLFDEALNRDLQGFRLDHPSVSLLQYVDDLLIAADTQAACLSATRDLLMTLAELGYRVSGKKAQLCQEEVTYLGFKIHKGSRSLSNSRTQAILQIPVPKTKRQVREFLGTIGYCRLWIPGFAELAQPLYAATRGGNDPLVWGEKEEEAFQSLKLALTQPPALALPSLDKPFQLFVEETSGAAKGVLTQALGPWKRPVAYLSKRLDPVAAGWPRCLRAIAAAALLTREASKLTFGQDIEITSSHNLESLLRSPPDKWLTNARITQYQVLLLDPPRVRFKQTAALNPATLLPETDDTLPIHHCLDTLDSLTSTRPDLTDQPLAQAEATLFTDGSSYIRDGKRYAGAAVVTLDSVIWAEPLPIGTSAQKAELIALTKALEWSKDKSVNIYTDSRYAFATLHVHGMIYRERGLLTAGGKAIKNAPEILALLTAVWLPKRVAVMHCKGHQKDDAPTSTGNRRADEVAREVAIRPLSTQATISAGKRTADGSEFEKRTADGSEFESPKKKAKVE

SEQ ID NO: 6421 - protein, 2112 aa, synthetic construct
MPAAKRVKLDGGDKKYSIGLDIGTNSVGWAVITDEYKVPSKKFKVLGNTDRHSIKKNLIGALLFDSGETAEATRLKRTARRRYTRRKNRICYLQEIFSNEMAKVDDSFFHRLEESFLVEEDKKHERHPIFGNIVDEVAYHEKYPTIYHLRKKLVDSTDKADLRLIYLALAHMIKFRGHFLIEGDLNPDNSDVDKLFIQLVQTYNQLFEENPINASGVDAKAILSARLSKSRRLENLIAQLPGEKKNGLFGNLIALSLGLTPNFKSNFDLAEDAKLQLSKDTYDDDLDNLLAQIGDQYADLFLAAKNLSDAILLSDILRVNTEITKAPLSASMIKRYDEHHQDLTLLKALVRQQLPEKYKEIFFDQSKNGYAGYIDGGASQEEFYKFIKPILEKMDGTEELLVKLNREDLLRKQRTFDNGSIPHQIHLGELHAILRRQEDFYPFLKDNREKIEKILTFRIPYYVGPLARGNSRFAWMTRKSEETITPWNFEEVVDKGASAQSFIERMTNFDKNLPNEKVLPKHSLLYEYFTVYNELTKVKYVTEGMRKPAFLSGEQKKAIVDLLFKTNRKVTVKQLKEDYFKKIECFDSVEISGVEDRFNASLGTYHDLLKIIKDKDFLDNEENEDILEDIVLTLTLFEDREMIEERLKTYAHLFDDKVMKQLKRRRYTGWGRLSRKLINGIRDKQSGKTILDFLKSDGFANRNFMQLIHDDSLTFKEDIQKAQVSGQGDSLHEHIANLAGSPAIKKGILQTVKVVDELVKVMGRHKPENIVIEMARENQTTQKGQKNSRERMKRIEEGIKELGSQILKEHPVENTQLQNEKLYLYYLQNGRDMYVDQELDINRLSDYDVDHIVPQSFLKDDSIDNKVLTRSDKARGKSDNVPSEEVVKKMKNYWRQLLNAKLITQRKFDNLTKAERGGLSELDKAGFIKRQLVETRQITKHVAQILDSRMNTKYDENDKLIREVKVITLKSKLVSDFRKDFQFYKVREINNYHHAHDAYLNAVVGTALIKKYPKLESEFVYGDYKVYDVRKMIAKSEQEIGKATAKYFFYSNIMNFFKTEITLANGEIRKRPLIETNGETGEIVWDKGRDFATVRKVLSMPQVNIVKKTEVQTGGFSKESILPKRNSDKLIARKKDWDPKKYGGFDSPTVAYSVLVVAKVEKGKSKKLKSVKELLGITIMERSSFEKNPIDFLEAKGYKEVKKDLIIKLPKYSLFELENGRKRMLASAGELQKGNELALPSKYVNFLYLASHYEKLKGSPEDNEQKQLFVEQHKHYLDEIIEQISEFSKRVILADANLDKVLSAYNKHRDKPIREQAENIIHLFTLTNLGAPAAFKYFDTTIDRKRYTSTKEVLDATLIHQSITGLYETRIDLSQLGGDGGEAAAKEAAAKEAAAKEAAAKEAAAKGGTAPLEEEYRLFLEAPIQNVTLLEQWKREIPKVWAEINPPGLASTQAPIHVQLLSTALPVRVRQYPITLEAKRSLRETIRKFRAAGILRPVHSPWNTPLLPVRKSGTSEYRMVQDLREVNKRVETIHPTVPNPYTLLSLLPPDRIWYSVLDLKDAFFCIPLAPESQLIFAFEWADAEEGESGQLTWTRLPQGFKNSPTLFNEALNRDLQGFRLDHPSVSLLQYVDDLLIAADTQAACLSATRDLLMTLAELGYRVSGKKAQLCQEEVTYLGFKIHKGSRSLSNSRTQAILQIPVPKTKRQVREFLGTIGYCRLWIPGFAELAQPLYAATRPGNDPLVWGEKEEEAFQSLKLALTQPPALALPSLDKPFQLFVEETSGAAKGVLTQALGPWKRPVAYLSKRLDPVAAGWPRCLRAIAAAALLTREASKLTFGQDIEITSSHNLESLLRSPPDKWLTNARITQYQVLLLDPPRVRFKQTAALNPATLLPETDDTLPIHHCLDTLDSLTSTRPDLTDQPLAQAEATLFTDGSSYIRDGKRYAGAAVVTLDSVIWAEPLPIGTSAQKAELIALTKALEWSKDKSVNIYTDSRYAFATLHVHGMIYRERGWLTAGGKAIKNAPEILALLTAVWLPKRVAVMHCKGHQKDDAPTSTGNRRADEVAREVAIRPLSTQATISAGKRTADGSEFEKRTADGSEFESPKKKAKVE

SEQ ID NO: 6422 - protein, 2187 aa, synthetic construct
MPAAKRVKLDGGDKKYSIGLDIGTNSVGWAVITDEYKVPSKKFKVLGNTDRHSIKKNLIGALLFDSGETAEATRLKRTARRRYTRRKNRICYLQEIFSNEMAKVDDSFFHRLEESFLVEEDKKHERHPIFGNIVDEVAYHEKYPTIYHLRKKLVDSTDKADLRLIYLALAHMIKFRGHFLIEGDLNPDNSDVDKLFIQLVQTYNQLFEENPINASGVDAKAILSARLSKSRRLENLIAQLPGEKKNGLFGNLIALSLGLTPNFKSNFDLAEDAKLQLSKDTYDDDLDNLLAQIGDQYADLFLAAKNLSDAILLSDILRVNTEITKAPLSASMIKRYDEHHQDLTLLKALVRQQLPEKYKEIFFDQSKNGYAGYIDGGASQEEFYKFIKPILEKMDGTEELLVKLNREDLLRKQRTFDNGSIPHQIHLGELHAILRRQEDFYPFLKDNREKIEKILTFRIPYYVGPLARGNSRFAWMTRKSEETITPWNFEEVVDKGASAQSFIERMTNFDKNLPNEKVLPKHSLLYEYFTVYNELTKVKYVTEGMRKPAFLSGEQKKAIVDLLFKTNRKVTVKQLKEDYFKKIECFDSVEISGVEDRFNASLGTYHDLLKIIKDKDFLDNEENEDILEDIVLTLTLFEDREMIEERLKTYAHLFDDKVMKQLKRRRYTGWGRLSRKLINGIRDKQSGKTILDFLKSDGFANRNFMQLIHDDSLTFKEDIQKAQVSGQGDSLHEHIANLAGSPAIKKGILQTVKVVDELVKVMGRHKPENIVIEMARENQTTQKGQKNSRERMKRIEEGIKELGSQILKEHPVENTQLQNEKLYLYYLQNGRDMYVDQELDINRLSDYDVDHIVPQSFLKDDSIDNKVLTRSDKARGKSDNVPSEEVVKKMKNYWRQLLNAKLITQRKFDNLTKAERGGLSELDKAGFIKRQLVETRQITKHVAQILDSRMNTKYDENDKLIREVKVITLKSKLVSDFRKDFQFYKVREINNYHHAHDAYLNAVVGTALIKKYPKLESEFVYGDYKVYDVRKMIAKSEQEIGKATAKYFFYSNIMNFFKTEITLANGEIRKRPLIETNGETGEIVWDKGRDFATVRKVLSMPQVNIVKKTEVQTGGFSKESILPKRNSDKLIARKKDWDPKKYGGFDSPTVAYSVLVVAKVEKGKSKKLKSVKELLGITIMERSSFEKNPIDFLEAKGYKEVKKDLIIKLPKYSLFELENGRKRMLASAGELQKGNELALPSKYVNFLYLASHYEKLKGSPEDNEQKQLFVEQHKHYLDEIIEQISEFSKRVILADANLDKVLSAYNKHRDKPIREQAENIIHLFTLTNLGAPAAFKYFDTTIDRKRYTSTKEVLDATLIHQSITGLYETRIDLSQLGGDGGEAAAKEAAAKEAAAKEAAAKEAAAKGGMDLLKPLTVERKGVKIKGYWNSQADITCVPKDLLQGEEPVRQQNVTTIHGTQEGDVYYVNLKIDGRRINTEVIGTTLDYAIITPGDVPWILKKPLELTIKLDLEEQQGTLLNNSILSKKGKEELKQLFEKYSALWQSWENQVGHRRIRPHKIATGTVKPTPQKQYHINPKAKPDIQIVINDLLKQGVLIQKESTMNTPVYPVPKPNGRWRMVLDYRAVNKVTPLIAVQNQHSYGILGSLFKGRYKTTIDLSNGFWAHPIVPEDYWITAFTWQGKQYCWTVLPQGFLNSPGLFTGDVVDLLQGIPNVEVYVDDVYISHDSEKEHLEYLDILFNRLKEAGYIISLKKSNIANSIVDFLGFQITNEGRGLTDTFKEKLENITAPTTLKQLQSILGLLNFARNFIPDFTELIAPLYALIPKSTKNYVPWQIEHSTTLETLITKLNGAEYLQGRKGDKTLIMKVNASYTTGYIRYYNEGEKKPISYVSIVFSKTELKFTELEKLLTTVHKGLLKALDLSMGQNIHVYSPIVSMQNIQKTPQTAKKALASRWLSWLSYLEDPRIRFFYDPQMPALKDLPAVDTGKDNKKHPSNFQHIFYTDGSAITSPTKEGHLNAGMGIVYFINKDGNLQKQQEWSISLGNHTAQFAEIAAFEFALKKCLPLGGNILVVTDSNYVAKAYNEELDVWASNGFVNNRKKPLKHISKWKSVADLKRLRPDVVVTHEPGHQKLDSSPHAYGNNLADQLATQASFKVHAGKRTADGSEFEKRTADGSEFESPKKKAKVE

SEQ ID NO: 6423 - protein, 2101 aa, synthetic construct
MPAAKRVKLDGGDKKYSIGLDIGTNSVGWAVITDEYKVPSKKFKVLGNTDRHSIKKNLIGALLFDSGETAEATRLKRTARRRYTRRKNRICYLQEIFSNEMAKVDDSFFHRLEESFLVEEDKKHERHPIFGNIVDEVAYHEKYPTIYHLRKKLVDSTDKADLRLIYLALAHMIKFRGHFLIEGDLNPDNSDVDKLFIQLVQTYNQLFEENPINASGVDAKAILSARLSKSRRLENLIAQLPGEKKNGLFGNLIALSLGLTPNFKSNFDLAEDAKLQLSKDTYDDDLDNLLAQIGDQYADLFLAAKNLSDAILLSDILRVNTEITKAPLSASMIKRYDEHHQDLTLLKALVRQQLPEKYKEIFFDQSKNGYAGYIDGGASQEEFYKFIKPILEKMDGTEELLVKLNREDLLRKQRTFDNGSIPHQIHLGELHAILRRQEDFYPFLKDNREKIEKILTFRIPYYVGPLARGNSRFAWMTRKSEETITPWNFEEVVDKGASAQSFIERMTNFDKNLPNEKVLPKHSLLYEYFTVYNELTKVKYVTEGMRKPAFLSGEQKKAIVDLLFKTNRKVTVKQLKEDYFKKIECFDSVEISGVEDRFNASLGTYHDLLKIIKDKDFLDNEENEDILEDIVLTLTLFEDREMIEERLKTYAHLFDDKVMKQLKRRRYTGWGRLSRKLINGIRDKQSGKTILDFLKSDGFANRNFMQLIHDDSLTFKEDIQKAQVSGQGDSLHEHIANLAGSPAIKKGILQTVKVVDELVKVMGRHKPENIVIEMARENQTTQKGQKNSRERMKRIEEGIKELGSQILKEHPVENTQLQNEKLYLYYLQNGRDMYVDQELDINRLSDYDVDHIVPQSFLKDDSIDNKVLTRSDKARGKSDNVPSEEVVKKMKNYWRQLLNAKLITQRKFDNLTKAERGGLSELDKAGFIKRQLVETRQITKHVAQILDSRMNTKYDENDKLIREVKVITLKSKLVSDFRKDFQFYKVREINNYHHAHDAYLNAVVGTALIKKYPKLESEFVYGDYKVYDVRKMIAKSEQEIGKATAKYFFYSNIMNFFKTEITLANGEIRKRPLIETNGETGEIVWDKGRDFATVRKVLSMPQVNIVKKTEVQTGGFSKESILPKRNSDKLIARKKDWDPKKYGGFDSPTVAYSVLVVAKVEKGKSKKLKSVKELLGITIMERSSFEKNPIDFLEAKGYKEVKKDLIIKLPKYSLFELENGRKRMLASAGELQKGNELALPSKYVNFLYLASHYEKLKGSPEDNEQKQLFVEQHKHYLDEIIEQISEFSKRVILADANLDKVLSAYNKHRDKPIREQAENIIHLFTLTNLGAPAAFKYFDTTIDRKRYTSTKEVLDATLIHQSITGLYETRIDLSQLGGDGGEAAAKEAAAKEAAAKEAAAKEAAAKGGVPWILKKPLELTIKLDLEEQQGTLLNNSILSKKGKEELKQLFEKYSALWQSWENQVGHRRIRPHKIATGTVKPTPQKQYHINPKAKPDIQIVINDLLKQGVLIQKESTMNTPVYPVPKPNGRWRMVLDYRAVNKVTPLIAVQNQHSYGILGSLFKGRYKTTIDLSNGFWAHPIVPEDYWITAFTWQGKQYCWTVLPQGFLNSPGLFTGDVVDLLQGIPNVEVYVDDVYISHDSEKEHLEYLDILFNRLKEAGYIISLKKSNIANSIVDFLGFQITNEGRGLTDTFKEKLENITAPTTLKQLQSILGLLNFARNFIPDFTELIAPLYALIPKSTKNYVPWQIEHSTTLETLITKLNGAEYLQGRKGDKTLIMKVNASYTTGYIRYYNEGEKKPISYVSIVFSKTELKFTELEKLLTTVHKGLLKALDLSMGQNIHVYSPIVSMQNIQKTPQTAKKALASRWLSWLSYLEDPRIRFFYDPQMPALKDLPAVDTGKDNKKHPSNFQHIFYTDGSAITSPTKEGHLNAGMGIVYFINKDGNLQKQQEWSISLGNHTAQFAEIAAFEFALKKCLPLGGNILVVTDSNYVAKAYNEELDVWASNGFVNNRKKPLKHISKWKSVADLKRLRPDVVVTHEPGHQKLDSSPHAYGNNLADQLATQASFKVHAGKRTADGSEFEKRTADGSEFESPKKKAKVE

SEQ ID NO: 6424 - protein, 2101 aa, synthetic construct
MPAAKRVKLDGGDKKYSIGLDIGTNSVGWAVITDEYKVPSKKFKVLGNTDRHSIKKNLIGALLFDSGETAEATRLKRTARRRYTRRKNRICYLQEIFSNEMAKVDDSFFHRLEESFLVEEDKKHERHPIFGNIVDEVAYHEKYPTIYHLRKKLVDSTDKADLRLIYLALAHMIKFRGHFLIEGDLNPDNSDVDKLFIQLVQTYNQLFEENPINASGVDAKAILSARLSKSRRLENLIAQLPGEKKNGLFGNLIALSLGLTPNFKSNFDLAEDAKLQLSKDTYDDDLDNLLAQIGDQYADLFLAAKNLSDAILLSDILRVNTEITKAPLSASMIKRYDEHHQDLTLLKALVRQQLPEKYKEIFFDQSKNGYAGYIDGGASQEEFYKFIKPILEKMDGTEELLVKLNREDLLRKQRTFDNGSIPHQIHLGELHAILRRQEDFYPFLKDNREKIEKILTFRIPYYVGPLARGNSRFAWMTRKSEETITPWNFEEVVDKGASAQSFIERMTNFDKNLPNEKVLPKHSLLYEYFTVYNELTKVKYVTEGMRKPAFLSGEQKKAIVDLLFKTNRKVTVKQLKEDYFKKIECFDSVEISGVEDRFNASLGTYHDLLKIIKDKDFLDNEENEDILEDIVLTLTLFEDREMIEERLKTYAHLFDDKVMKQLKRRRYTGWGRLSRKLINGIRDKQSGKTILDFLKSDGFANRNFMQLIHDDSLTFKEDIQKAQVSGQGDSLHEHIANLAGSPAIKKGILQTVKVVDELVKVMGRHKPENIVIEMARENQTTQKGQKNSRERMKRIEEGIKELGSQILKEHPVENTQLQNEKLYLYYLQNGRDMYVDQELDINRLSDYDVDHIVPQSFLKDDSIDNKVLTRSDKARGKSDNVPSEEVVKKMKNYWRQLLNAKLITQRKFDNLTKAERGGLSELDKAGFIKRQLVETRQITKHVAQILDSRMNTKYDENDKLIREVKVITLKSKLVSDFRKDFQFYKVREINNYHHAHDAYLNAVVGTALIKKYPKLESEFVYGDYKVYDVRKMIAKSEQEIGKATAKYFFYSNIMNFFKTEITLANGEIRKRPLIETNGETGEIVWDKGRDFATVRKVLSMPQVNIVKKTEVQTGGFSKESILPKRNSDKLIARKKDWDPKKYGGFDSPTVAYSVLVVAKVEKGKSKKLKSVKELLGITIMERSSFEKNPIDFLEAKGYKEVKKDLIIKLPKYSLFELENGRKRMLASAGELQKGNELALPSKYVNFLYLASHYEKLKGSPEDNEQKQLFVEQHKHYLDEIIEQISEFSKRVILADANLDKVLSAYNKHRDKPIREQAENIIHLFTLTNLGAPAAFKYFDTTIDRKRYTSTKEVLDATLIHQSITGLYETRIDLSQLGGDGGEAAAKEAAAKEAAAKEAAAKEAAAKGGVPWILKKPLELTIKLDLEEQQGTLLNNSILSKKGKEELKQLFEKYSALWQSWENQVGHRRIRPHKIATGTVKPTPQKQYHINPKAKPDIQIVINDLLKQGVLIQKESTMNTPVYPVPKPNGRWRMVLDYRAVNKVTPLIAVQNQHSYGILGSLFKGRYKTTIDLSNGFWAHPIVPEDYWITAFTWQGKQYCWTVLPQGFLNSPGLFNGDVVDLLQGIPNVEVYVDDVYISHDSEKEHLEYLDILFNRLKEAGYIISLKKSNIANSIVDFLGFQITNEGRGLTDTFKEKLENITAPTTLKQLQSILGLLNFARNFIPDFTELIAPLYALIPKSPKNYVPWQIEHSTTLETLITKLNGAEYLQGRKGDKTLIMKVNASYTTGYIRYYNEGEKKPISYVSIVFSKTELKFTELEKLLTTVHKGLLKALDLSMGQNIHVYSPIVSMQNIQKTPQTAKKALASRWLSWLSYLEDPRIRFFYDPQMPALKDLPAVDTGKDNKKHPSNFQHIFYTDGSAITSPTKEGHLNAGMGIVYFINKDGNLQKQQEWSISLGNHTAQFAEIAAFEFALKKCLPLGGNILVVTDSNYVAKAYNEELDVWASNGFVNNRKKPLKHISKWKSVADLKRLRPDVVVTHEPGHQKLDSSPHAYGNNLADQLATQASFKVHAGKRTADGSEFEKRTADGSEFESPKKKAKVE

SEQ ID NO: 6425 - protein, 2109 aa, synthetic construct
MPAAKRVKLDGGDKKYSIGLDIGTNSVGWAVITDEYKVPSKKFKVLGNTDRHSIKKNLIGALLFDSGETAEATRLKRTARRRYTRRKNRICYLQEIFSNEMAKVDDSFFHRLEESFLVEEDKKHERHPIFGNIVDEVAYHEKYPTIYHLRKKLVDSTDKADLRLIYLALAHMIKFRGHFLIEGDLNPDNSDVDKLFIQLVQTYNQLFEENPINASGVDAKAILSARLSKSRRLENLIAQLPGEKKNGLFGNLIALSLGLTPNFKSNFDLAEDAKLQLSKDTYDDDLDNLLAQIGDQYADLFLAAKNLSDAILLSDILRVNTEITKAPLSASMIKRYDEHHQDLTLLKALVRQQLPEKYKEIFFDQSKNGYAGYIDGGASQEEFYKFIKPILEKMDGTEELLVKLNREDLLRKQRTFDNGSIPHQIHLGELHAILRRQEDFYPFLKDNREKIEKILTFRIPYYVGPLARGNSRFAWMTRKSEETITPWNFEEVVDKGASAQSFIERMTNFDKNLPNEKVLPKHSLLYEYFTVYNELTKVKYVTEGMRKPAFLSGEQKKAIVDLLFKTNRKVTVKQLKEDYFKKIECFDSVEISGVEDRFNASLGTYHDLLKIIKDKDFLDNEENEDILEDIVLTLTLFEDREMIEERLKTYAHLFDDKVMKQLKRRRYTGWGRLSRKLINGIRDKQSGKTILDFLKSDGFANRNFMQLIHDDSLTFKEDIQKAQVSGQGDSLHEHIANLAGSPAIKKGILQTVKVVDELVKVMGRHKPENIVIEMARENQTTQKGQKNSRERMKRIEEGIKELGSQILKEHPVENTQLQNEKLYLYYLQNGRDMYVDQELDINRLSDYDVDHIVPQSFLKDDSIDNKVLTRSDKARGKSDNVPSEEVVKKMKNYWRQLLNAKLITQRKFDNLTKAERGGLSELDKAGFIKRQLVETRQITKHVAQILDSRMNTKYDENDKLIREVKVITLKSKLVSDFRKDFQFYKVREINNYHHAHDAYLNAVVGTALIKKYPKLESEFVYGDYKVYDVRKMIAKSEQEIGKATAKYFFYSNIMNFFKTEITLANGEIRKRPLIETNGETGEIVWDKGRDFATVRKVLSMPQVNIVKKTEVQTGGFSKESILPKRNSDKLIARKKDWDPKKYGGFDSPTVAYSVLVVAKVEKGKSKKLKSVKELLGITIMERSSFEKNPIDFLEAKGYKEVKKDLIIKLPKYSLFELENGRKRMLASAGELQKGNELALPSKYVNFLYLASHYEKLKGSPEDNEQKQLFVEQHKHYLDEIIEQISEFSKRVILADANLDKVLSAYNKHRDKPIREQAENIIHLFTLTNLGAPAAFKYFDTTIDRKRYTSTKEVLDATLIHQSITGLYETRIDLSQLGGDGGEAAAKEAAAKEAAAKEAAAKEAAAKGGTLQLEEEYRLFEPESTQKQEMDIWLKNFPQAWAETGGMGTAHCQAPVLIQLKATATPISIRQYPMPHEAYQGIKPHIRRMLDQGILKPCQSPWNTPLLPVKKPGTEDYRPVQDLREVNKRVEDIHPTVPNPYNLLSTLPPSHPWYTVLDLKDAFFCLRLHSESQLLFAFEWRDPEIGLSGQLTWTRLPQGFKNSPTLFNEALHSDLADFRVRYPALVLLQYVDDLLLAAATRTECLEGTKALLETLGNKGYRASAKKAQICLQEVTYLGYSLKDGQRWLTKARKEAILSIPVPKNSRQVREFLGKAGYCRLFIPGFAELAAPLYPLTRPGTLFQWGTEQQLAFEDIKKALLSSPALGLPDITKPFELFIDENSGFAKGVLVQKLGPWKRPVAYLSKKLDTVASGWPPCLRMVAAIAILVKDAGKLTLGQPLTILTSHPVEALVRQPPNKWLSNARMTHYQAMLLDAERVHFGPTVSLNPATLLPLPSGGNHHDCLQILAETHGTRPDLTDQPLPDADLTWYTDGSSFIRNGEREAGAAVTTESEVIWAAPLPPGTSAQRAELIALTQALKMAEGKKLTVYTDSRYAFATTHVHGEIYRRRGWLTSEGKEIKNKNEILALLEALFLPKRLSIIHCPGHQKGDSPQAKGNRLADDTAKKAATETHSSLTVLPAGKRTADGSEFEKRTADGSEFESPKKKAKVE

SEQ ID NO: 6426 - protein, 2101 aa, synthetic construct
MPAAKRVKLDGGDKKYSIGLDIGTNSVGWAVITDEYKVPSKKFKVLGNTDRHSIKKNLIGALLFDSGETAEATRLKRTARRRYTRRKNRICYLQEIFSNEMAKVDDSFFHRLEESFLVEEDKKHERHPIFGNIVDEVAYHEKYPTIYHLRKKLVDSTDKADLRLIYLALAHMIKFRGHFLIEGDLNPDNSDVDKLFIQLVQTYNQLFEENPINASGVDAKAILSARLSKSRRLENLIAQLPGEKKNGLFGNLIALSLGLTPNFKSNFDLAEDAKLQLSKDTYDDDLDNLLAQIGDQYADLFLAAKNLSDAILLSDILRVNTEITKAPLSASMIKRYDEHHQDLTLLKALVRQQLPEKYKEIFFDQSKNGYAGYIDGGASQEEFYKFIKPILEKMDGTEELLVKLNREDLLRKQRTFDNGSIPHQIHLGELHAILRRQEDFYPFLKDNREKIEKILTFRIPYYVGPLARGNSRFAWMTRKSEETITPWNFEEVVDKGASAQSFIERMTNFDKNLPNEKVLPKHSLLYEYFTVYNELTKVKYVTEGMRKPAFLSGEQKKAIVDLLFKTNRKVTVKQLKEDYFKKIECFDSVEISGVEDRFNASLGTYHDLLKIIKDKDFLDNEENEDILEDIVLTLTLFEDREMIEERLKTYAHLFDDKVMKQLKRRRYTGWGRLSRKLINGIRDKQSGKTILDFLKSDGFANRNFMQLIHDDSLTFKEDIQKAQVSGQGDSLHEHIANLAGSPAIKKGILQTVKVVDELVKVMGRHKPENIVIEMARENQTTQKGQKNSRERMKRIEEGIKELGSQILKEHPVENTQLQNEKLYLYYLQNGRDMYVDQELDINRLSDYDVDHIVPQSFLKDDSIDNKVLTRSDKARGKSDNVPSEEVVKKMKNYWRQLLNAKLITQRKFDNLTKAERGGLSELDKAGFIKRQLVETRQITKHVAQILDSRMNTKYDENDKLIREVKVITLKSKLVSDFRKDFQFYKVREINNYHHAHDAYLNAVVGTALIKKYPKLESEFVYGDYKVYDVRKMIAKSEQEIGKATAKYFFYSNIMNFFKTEITLANGEIRKRPLIETNGETGEIVWDKGRDFATVRKVLSMPQVNIVKKTEVQTGGFSKESILPKRNSDKLIARKKDWDPKKYGGFDSPTVAYSVLVVAKVEKGKSKKLKSVKELLGITIMERSSFEKNPIDFLEAKGYKEVKKDLIIKLPKYSLFELENGRKRMLASAGELQKGNELALPSKYVNFLYLASHYEKLKGSPEDNEQKQLFVEQHKHYLDEIIEQISEFSKRVILADANLDKVLSAYNKHRDKPIREQAENIIHLFTLTNLGAPAAFKYFDTTIDRKRYTSTKEVLDATLIHQSITGLYETRIDLSQLGGDGGEAAAKEAAAKEAAAKEAAAKEAAAKGGVPWLTQQPLQLTILVPLQEYQEKILSKTALPEDQKQQLKTLFVKYDNLWQHWENQVGHRKIRPHNIATGDYPPRPQKQYPINPKAKPSIQIVIDDLLKQGVLTPQNSTMNTPVYPVPKPDGRWRMVLDYREVNKTIPLTAAQNQHSAGILATIVRQKYKTTLDLANGFWAHPITPESYWLTAFTWQGKQYCWTRLPQGFLNSPALFNADVVDLLKEIPNVQVYVDDIYLSHDDPKEHVQQLEKVFQILLQAGYVVSLKKSEIGQKTVEFLGFNITKEGRGLTDTFKTKLLNITPPKDLKQLQSILGLLNFARNFIPNFAELVQPLYNLIAPAKGKYIEWSEENTKQLNMVIEALNTASNLEERLPEQRLVIKVNTSPSAGYVRYYNETGKKPIMYLNYVFSKAELKFSMLEKLLTTMHKALIKAMDLAMGQEILVYSPIVSMTKIQKTPLPERKALPIRWITWMTYLEDPRIQFHYDKTLPELKHIPDVYTSSQSPVKHPSQYEGVFYTDGSAIKSPDPTKSNNAGMGIVHATYKPEYQVLNQWSIPLGNHTAQMAEIAAVEFACKKALKIPGPVLVITDSFYVAESANKELPYWKSNGFVNNKKKPLKHISKWKSIAECLSMKPDITIQHEKGISLQIPVFILKGNALADKLATQGSYVVNAGKRTADGSEFEKRTADGSEFESPKKKAKVE

SEQ ID NO: 6427 - protein, 2101 aa, synthetic construct
MPAAKRVKLDGGDKKYSIGLDIGTNSVGWAVITDEYKVPSKKFKVLGNTDRHSIKKNLIGALLFDSGETAEATRLKRTARRRYTRRKNRICYLQEIFSNEMAKVDDSFFHRLEESFLVEEDKKHERHPIFGNIVDEVAYHEKYPTIYHLRKKLVDSTDKADLRLIYLALAHMIKFRGHFLIEGDLNPDNSDVDKLFIQLVQTYNQLFEENPINASGVDAKAILSARLSKSRRLENLIAQLPGEKKNGLFGNLIALSLGLTPNFKSNFDLAEDAKLQLSKDTYDDDLDNLLAQIGDQYADLFLAAKNLSDAILLSDILRVNTEITKAPLSASMIKRYDEHHQDLTLLKALVRQQLPEKYKEIFFDQSKNGYAGYIDGGASQEEFYKFIKPILEKMDGTEELLVKLNREDLLRKQRTFDNGSIPHQIHLGELHAILRRQEDFYPFLKDNREKIEKILTFRIPYYVGPLARGNSRFAWMTRKSEETITPWNFEEVVDKGASAQSFIERMTNFDKNLPNEKVLPKHSLLYEYFTVYNELTKVKYVTEGMRKPAFLSGEQKKAIVDLLFKTNRKVTVKQLKEDYFKKIECFDSVEISGVEDRFNASLGTYHDLLKIIKDKDFLDNEENEDILEDIVLTLTLFEDREMIEERLKTYAHLFDDKVMKQLKRRRYTGWGRLSRKLINGIRDKQSGKTILDFLKSDGFANRNFMQLIHDDSLTFKEDIQKAQVSGQGDSLHEHIANLAGSPAIKKGILQTVKVVDELVKVMGRHKPENIVIEMARENQTTQKGQKNSRERMKRIEEGIKELGSQILKEHPVENTQLQNEKLYLYYLQNGRDMYVDQELDINRLSDYDVDHIVPQSFLKDDSIDNKVLTRSDKARGKSDNVPSEEVVKKMKNYWRQLLNAKLITQRKFDNLTKAERGGLSELDKAGFIKRQLVETRQITKHVAQILDSRMNTKYDENDKLIREVKVITLKSKLVSDFRKDFQFYKVREINNYHHAHDAYLNAVVGTALIKKYPKLESEFVYGDYKVYDVRKMIAKSEQEIGKATAKYFFYSNIMNFFKTEITLANGEIRKRPLIETNGETGEIVWDKGRDFATVRKVLSMPQVNIVKKTEVQTGGFSKESILPKRNSDKLIARKKDWDPKKYGGFDSPTVAYSVLVVAKVEKGKSKKLKSVKELLGITIMERSSFEKNPIDFLEAKGYKEVKKDLIIKLPKYSLFELENGRKRMLASAGELQKGNELALPSKYVNFLYLASHYEKLKGSPEDNEQKQLFVEQHKHYLDEIIEQISEFSKRVILADANLDKVLSAYNKHRDKPIREQAENIIHLFTLTNLGAPAAFKYFDTTIDRKRYTSTKEVLDATLIHQSITGLYETRIDLSQLGGDGGEAAAKEAAAKEAAAKEAAAKEAAAKGGVPWLTQQPLQLTILVPLQEYQEKILSKTALPEDQKQQLKTLFVKYDNLWQHWENQVGHRKIRPHNIATGDYPPRPQKQYPINPKAKPSIQIVIDDLLKQGVLTPQNSTMNTPVYPVPKPDGRWRMVLDYREVNKTIPLTAAQNQHSAGILATIVRQKYKTTLDLANGFWAHPITPESYWLTAFTWQGKQYCWTRLPQGFLNSPALFNADVVDLLKEIPNVQVYVDDIYLSHDDPKEHVQQLEKVFQILLQAGYVVSLKKSEIGQKTVEFLGFNITKEGRGLTDTFKTKLLNITPPKDLKQLQSILGKLNFARNFIPNFAELVQPLYNLIAPAKGKYIEWSEENTKQLNMVIEALNTASNLEERLPEQRLVIKVNTSPSAGYVRYYNETGKKPIMYLNYVFSKAELKFSMLEKLLTTMHKALIKAMDLAMGQEILVYSPIVSMTKIQKTPLPERKALPIRWITWMTYLEDPRIQFHYDKTLPELKHIPDVYTSSQSPVKHPSQYEGVFYTDGSAIKSPDPTKSNNAGMGIVHATYKPEYQVLNQWSIPLGNHTAQMAEIAAVEFACKKALKIPGPVLVITDSFYVAESANKELPYWKSNGFVNNKKKPLKHISKWKSIAECLSMKPDITIQHEKGISLQIPVFILKGNALADKLATQGSYVVNAGKRTADGSEFEKRTADGSEFESPKKKAKVE

SEQ ID NO: 6428 - protein, 2190 aa, synthetic construct
MPAAKRVKLDGGDKKYSIGLDIGTNSVGWAVITDEYKVPSKKFKVLGNTDRHSIKKNLIGALLFDSGETAEATRLKRTARRRYTRRKNRICYLQEIFSNEMAKVDDSFFHRLEESFLVEEDKKHERHPIFGNIVDEVAYHEKYPTIYHLRKKLVDSTDKADLRLIYLALAHMIKFRGHFLIEGDLNPDNSDVDKLFIQLVQTYNQLFEENPINASGVDAKAILSARLSKSRRLENLIAQLPGEKKNGLFGNLIALSLGLTPNFKSNFDLAEDAKLQLSKDTYDDDLDNLLAQIGDQYADLFLAAKNLSDAILLSDILRVNTEITKAPLSASMIKRYDEHHQDLTLLKALVRQQLPEKYKEIFFDQSKNGYAGYIDGGASQEEFYKFIKPILEKMDGTEELLVKLNREDLLRKQRTFDNGSIPHQIHLGELHAILRRQEDFYPFLKDNREKIEKILTFRIPYYVGPLARGNSRFAWMTRKSEETITPWNFEEVVDKGASAQSFIERMTNFDKNLPNEKVLPKHSLLYEYFTVYNELTKVKYVTEGMRKPAFLSGEQKKAIVDLLFKTNRKVTVKQLKEDYFKKIECFDSVEISGVEDRFNASLGTYHDLLKIIKDKDFLDNEENEDILEDIVLTLTLFEDREMIEERLKTYAHLFDDKVMKQLKRRRYTGWGRLSRKLINGIRDKQSGKTILDFLKSDGFANRNFMQLIHDDSLTFKEDIQKAQVSGQGDSLHEHIANLAGSPAIKKGILQTVKVVDELVKVMGRHKPENIVIEMARENQTTQKGQKNSRERMKRIEEGIKELGSQILKEHPVENTQLQNEKLYLYYLQNGRDMYVDQELDINRLSDYDVDHIVPQSFLKDDSIDNKVLTRSDKARGKSDNVPSEEVVKKMKNYWRQLLNAKLITQRKFDNLTKAERGGLSELDKAGFIKRQLVETRQITKHVAQILDSRMNTKYDENDKLIREVKVITLKSKLVSDFRKDFQFYKVREINNYHHAHDAYLNAVVGTALIKKYPKLESEFVYGDYKVYDVRKMIAKSEQEIGKATAKYFFYSNIMNFFKTEITLANGEIRKRPLIETNGETGEIVWDKGRDFATVRKVLSMPQVNIVKKTEVQTGGFSKESILPKRNSDKLIARKKDWDPKKYGGFDSPTVAYSVLVVAKVEKGKSKKLKSVKELLGITIMERSSFEKNPIDFLEAKGYKEVKKDLIIKLPKYSLFELENGRKRMLASAGELQKGNELALPSKYVNFLYLASHYEKLKGSPEDNEQKQLFVEQHKHYLDEIIEQISEFSKRVILADANLDKVLSAYNKHRDKPIREQAENIIHLFTLTNLGAPAAFKYFDTTIDRKRYTSTKEVLDATLIHQSITGLYETRIDLSQLGGDGGEAAAKEAAAKEAAAKEAAAKEAAAKGGMNPLQLLQPLPAEIKGTKLLAHWNSGATITCIPESFLEDEQPIKKTLIKTIHGEKQQNVYYVTFKVKGRKVEAEVIASPYEYILLSPTDVPWLTQQPLQLTILVPLQEYQEKILSKTALPEDQKQQLKTLFVKYDNLWQHWENQVGHRKIRPHNIATGDYPPRPQKQYPINPKAKPSIQIVIDDLLKQGVLTPQNSTMNTPVYPVPKPDGRWRMVLDYREVNKTIPLTAAQNQHSAGILATIVRQKYKTTLDLANGFWAHPITPESYWLTAFTWQGKQYCWTRLPQGFLNSPALFNADVVDLLKEIPNVQVYVDDIYLSHDDPKEHVQQLEKVFQILLQAGYVVSLKKSEIGQKTVEFLGFNITKEGRGLTDTFKTKLLNITPPKDLKQLQSILGLLNFARNFIPNFAELVQPLYNLIAPAKGKYIEWSEENTKQLNMVIEALNTASNLEERLPEQRLVIKVNTSPSAGYVRYYNETGKKPIMYLNYVFSKAELKFSMLEKLLTTMHKALIKAMDLAMGQEILVYSPIVSMTKIQKTPLPERKALPIRWITWMTYLEDPRIQFHYDKTLPELKHIPDVYTSSQSPVKHPSQYEGVFYTDGSAIKSPDPTKSNNAGMGIVHATYKPEYQVLNQWSIPLGNHTAQMAEIAAVEFACKKALKIPGPVLVITDSFYVAESANKELPYWKSNGFVNNKKKPLKHISKWKSIAECLSMKPDITIQHEKGISLQIPVFILKGNALADKLATQGSYVVNAGKRTADGSEFEKRTADGSEFESPKKKAKVE

SEQ ID NO: 6429 - protein, 2190 aa, synthetic construct
MPAAKRVKLDGGDKKYSIGLDIGTNSVGWAVITDEYKVPSKKFKVLGNTDRHSIKKNLIGALLFDSGETAEATRLKRTARRRYTRRKNRICYLQEIFSNEMAKVDDSFFHRLEESFLVEEDKKHERHPIFGNIVDEVAYHEKYPTIYHLRKKLVDSTDKADLRLIYLALAHMIKFRGHFLIEGDLNPDNSDVDKLFIQLVQTYNQLFEENPINASGVDAKAILSARLSKSRRLENLIAQLPGEKKNGLFGNLIALSLGLTPNFKSNFDLAEDAKLQLSKDTYDDDLDNLLAQIGDQYADLFLAAKNLSDAILLSDILRVNTEITKAPLSASMIKRYDEHHQDLTLLKALVRQQLPEKYKEIFFDQSKNGYAGYIDGGASQEEFYKFIKPILEKMDGTEELLVKLNREDLLRKQRTFDNGSIPHQIHLGELHAILRRQEDFYPFLKDNREKIEKILTFRIPYYVGPLARGNSRFAWMTRKSEETITPWNFEEVVDKGASAQSFIERMTNFDKNLPNEKVLPKHSLLYEYFTVYNELTKVKYVTEGMRKPAFLSGEQKKAIVDLLFKTNRKVTVKQLKEDYFKKIECFDSVEISGVEDRFNASLGTYHDLLKIIKDKDFLDNEENEDILEDIVLTLTLFEDREMIEERLKTYAHLFDDKVMKQLKRRRYTGWGRLSRKLINGIRDKQSGKTILDFLKSDGFANRNFMQLIHDDSLTFKEDIQKAQVSGQGDSLHEHIANLAGSPAIKKGILQTVKVVDELVKVMGRHKPENIVIEMARENQTTQKGQKNSRERMKRIEEGIKELGSQILKEHPVENTQLQNEKLYLYYLQNGRDMYVDQELDINRLSDYDVDHIVPQSFLKDDSIDNKVLTRSDKARGKSDNVPSEEVVKKMKNYWRQLLNAKLITQRKFDNLTKAERGGLSELDKAGFIKRQLVETRQITKHVAQILDSRMNTKYDENDKLIREVKVITLKSKLVSDFRKDFQFYKVREINNYHHAHDAYLNAVVGTALIKKYPKLESEFVYGDYKVYDVRKMIAKSEQEIGKATAKYFFYSNIMNFFKTEITLANGEIRKRPLIETNGETGEIVWDKGRDFATVRKVLSMPQVNIVKKTEVQTGGFSKESILPKRNSDKLIARKKDWDPKKYGGFDSPTVAYSVLVVAKVEKGKSKKLKSVKELLGITIMERSSFEKNPIDFLEAKGYKEVKKDLIIKLPKYSLFELENGRKRMLASAGELQKGNELALPSKYVNFLYLASHYEKLKGSPEDNEQKQLFVEQHKHYLDEIIEQISEFSKRVILADANLDKVLSAYNKHRDKPIREQAENIIHLFTLTNLGAPAAFKYFDTTIDRKRYTSTKEVLDATLIHQSITGLYETRIDLSQLGGDGGEAAAKEAAAKEAAAKEAAAKEAAAKGGMNPLQLLQPLPAEIKGTKLLAHWNSGATITCIPESFLEDEQPIKKTLIKTIHGEKQQNVYYVTFKVKGRKVEAEVIASPYEYILLSPTDVPWLTQQPLQLTILVPLQEYQEKILSKTALPEDQKQQLKTLFVKYDNLWQHWENQVGHRKIRPHNIATGDYPPRPQKQYPINPKAKPSIQIVIDDLLKQGVLTPQNSTMNTPVYPVPKPDGRWRMVLDYREVNKTIPLTAAQNQHSAGILATIVRQKYKTTLDLANGFWAHPITPESYWLTAFTWQGKQYCWTRLPQGFLNSPALFNADVVDLLKEIPNVQVYVDDIYLSHDDPKEHVQQLEKVFQILLQAGYVVSLKKSEIGQKTVEFLGFNITKEGRGLTDTFKTKLLNITPPKDLKQLQSILGKLNFARNFIPNFAELVQPLYNLIAPAKGKYIEWSEENTKQLNMVIEALNTASNLEERLPEQRLVIKVNTSPSAGYVRYYNETGKKPIMYLNYVFSKAELKFSMLEKLLTTMHKALIKAMDLAMGQEILVYSPIVSMTKIQKTPLPERKALPIRWITWMTYLEDPRIQFHYDKTLPELKHIPDVYTSSQSPVKHPSQYEGVFYTDGSAIKSPDPTKSNNAGMGIVHATYKPEYQVLNQWSIPLGNHTAQMAEIAAVEFACKKALKIPGPVLVITDSFYVAESANKELPYWKSNGFVNNKKKPLKHISKWKSIAECLSMKPDITIQHEKGISLQIPVFILKGNALADKLATQGSYVVNAGKRTADGSEFEKRTADGSEFESPKKKAKVE

SEQ ID NO: 6430 - protein, 2108 aa, synthetic construct
MPAAKRVKLDGGDKKYSIGLDIGTNSVGWAVITDEYKVPSKKFKVLGNTDRHSIKKNLIGALLFDSGETAEATRLKRTARRRYTRRKNRICYLQEIFSNEMAKVDDSFFHRLEESFLVEEDKKHERHPIFGNIVDEVAYHEKYPTIYHLRKKLVDSTDKADLRLIYLALAHMIKFRGHFLIEGDLNPDNSDVDKLFIQLVQTYNQLFEENPINASGVDAKAILSARLSKSRRLENLIAQLPGEKKNGLFGNLIALSLGLTPNFKSNFDLAEDAKLQLSKDTYDDDLDNLLAQIGDQYADLFLAAKNLSDAILLSDILRVNTEITKAPLSASMIKRYDEHHQDLTLLKALVRQQLPEKYKEIFFDQSKNGYAGYIDGGASQEEFYKFIKPILEKMDGTEELLVKLNREDLLRKQRTFDNGSIPHQIHLGELHAILRRQEDFYPFLKDNREKIEKILTFRIPYYVGPLARGNSRFAWMTRKSEETITPWNFEEVVDKGASAQSFIERMTNFDKNLPNEKVLPKHSLLYEYFTVYNELTKVKYVTEGMRKPAFLSGEQKKAIVDLLFKTNRKVTVKQLKEDYFKKIECFDSVEISGVEDRFNASLGTYHDLLKIIKDKDFLDNEENEDILEDIVLTLTLFEDREMIEERLKTYAHLFDDKVMKQLKRRRYTGWGRLSRKLINGIRDKQSGKTILDFLKSDGFANRNFMQLIHDDSLTFKEDIQKAQVSGQGDSLHEHIANLAGSPAIKKGILQTVKVVDELVKVMGRHKPENIVIEMARENQTTQKGQKNSRERMKRIEEGIKELGSQILKEHPVENTQLQNEKLYLYYLQNGRDMYVDQELDINRLSDYDVDHIVPQSFLKDDSIDNKVLTRSDKARGKSDNVPSEEVVKKMKNYWRQLLNAKLITQRKFDNLTKAERGGLSELDKAGFIKRQLVETRQITKHVAQILDSRMNTKYDENDKLIREVKVITLKSKLVSDFRKDFQFYKVREINNYHHAHDAYLNAVVGTALIKKYPKLESEFVYGDYKVYDVRKMIAKSEQEIGKATAKYFFYSNIMNFFKTEITLANGEIRKRPLIETNGETGEIVWDKGRDFATVRKVLSMPQVNIVKKTEVQTGGFSKESILPKRNSDKLIARKKDWDPKKYGGFDSPTVAYSVLVVAKVEKGKSKKLKSVKELLGITIMERSSFEKNPIDFLEAKGYKEVKKDLIIKLPKYSLFELENGRKRMLASAGELQKGNELALPSKYVNFLYLASHYEKLKGSPEDNEQKQLFVEQHKHYLDEIIEQISEFSKRVILADANLDKVLSAYNKHRDKPIREQAENIIHLFTLTNLGAPAAFKYFDTTIDRKRYTSTKEVLDATLIHQSITGLYETRIDLSQLGGDGGEAAAKEAAAKEAAAKEAAAKEAAAKGGVLNLEEEYRLHEKPVPSSIDPSWLQLFPTVWAERAGMGLANQVPPVVVELRSGASPVAVRQYPMSKEAREGIRPHIQKFLDLGVLVPCRSPWNTPLLPVKKPGTNDYRPVQDLREINKRVQDIHPTVPNPYNLLSSLPPSYTWYSVLDLKDAFFCLRLHPNSQPLFAFEWKDPEKGNTGQLTWTRLPQGFKNSPTLFNEALHRDLAPFRALNPQVVLLQYVDDLLVAAPTYEDCKKGTQKLLQELSKLGYRVSAKKAQLCQREVTYLGYLLKEGKRWLTPARKATVMKIPVPTTPRQVREFLGTAGFCRLWIPGFASLAAPLYPLTKPSIPFIWTEEHQQAFDHIKKALLSAPALALPDLTKPFTLYIDERAGVARGVLTQTLGPWRRPVAYLSKKLDPVASGWPTCLKAVAAVALLLKDADKLTLGQNVTVIASHSLESIVRQPPDRWMTNARMTHYQSLLLNERVSFAPPAVLNPATLLPVESEATPVHRCSEILAEETGTRRDLEDQPLPGVPTWYTDGSSFITEGKRRAGAPIVDGKRTVWASSLPEGTSAQKAELVALTQALRLAEGKNINIYTDSRYAFATAHIHGAIYKQRGWLTSAGKDIKNKEEILALLEAIHLPRRVAIIHCPGHQRGSNPVATGNRRADEAAKQAALSTRVLAGTTKPAGKRTADGSEFEKRTADGSEFESPKKKAKVE

SEQ ID NO: 6431 - protein, 2108 aa, synthetic construct
MPAAKRVKLDGGDKKYSIGLDIGTNSVGWAVITDEYKVPSKKFKVLGNTDRHSIKKNLIGALLFDSGETAEATRLKRTARRRYTRRKNRICYLQEIFSNEMAKVDDSFFHRLEESFLVEEDKKHERHPIFGNIVDEVAYHEKYPTIYHLRKKLVDSTDKADLRLIYLALAHMIKFRGHFLIEGDLNPDNSDVDKLFIQLVQTYNQLFEENPINASGVDAKAILSARLSKSRRLENLIAQLPGEKKNGLFGNLIALSLGLTPNFKSNFDLAEDAKLQLSKDTYDDDLDNLLAQIGDQYADLFLAAKNLSDAILLSDILRVNTEITKAPLSASMIKRYDEHHQDLTLLKALVRQQLPEKYKEIFFDQSKNGYAGYIDGGASQEEFYKFIKPILEKMDGTEELLVKLNREDLLRKQRTFDNGSIPHQIHLGELHAILRRQEDFYPFLKDNREKIEKILTFRIPYYVGPLARGNSRFAWMTRKSEETITPWNFEEVVDKGASAQSFIERMTNFDKNLPNEKVLPKHSLLYEYFTVYNELTKVKYVTEGMRKPAFLSGEQKKAIVDLLFKTNRKVTVKQLKEDYFKKIECFDSVEISGVEDRFNASLGTYHDLLKIIKDKDFLDNEENEDILEDIVLTLTLFEDREMIEERLKTYAHLFDDKVMKQLKRRRYTGWGRLSRKLINGIRDKQSGKTILDFLKSDGFANRNFMQLIHDDSLTFKEDIQKAQVSGQGDSLHEHIANLAGSPAIKKGILQTVKVVDELVKVMGRHKPENIVIEMARENQTTQKGQKNSRERMKRIEEGIKELGSQILKEHPVENTQLQNEKLYLYYLQNGRDMYVDQELDINRLSDYDVDHIVPQSFLKDDSIDNKVLTRSDKARGKSDNVPSEEVVKKMKNYWRQLLNAKLITQRKFDNLTKAERGGLSELDKAGFIKRQLVETRQITKHVAQILDSRMNTKYDENDKLIREVKVITLKSKLVSDFRKDFQFYKVREINNYHHAHDAYLNAVVGTALIKKYPKLESEFVYGDYKVYDVRKMIAKSEQEIGKATAKYFFYSNIMNFFKTEITLANGEIRKRPLIETNGETGEIVWDKGRDFATVRKVLSMPQVNIVKKTEVQTGGFSKESILPKRNSDKLIARKKDWDPKKYGGFDSPTVAYSVLVVAKVEKGKSKKLKSVKELLGITIMERSSFEKNPIDFLEAKGYKEVKKDLIIKLPKYSLFELENGRKRMLASAGELQKGNELALPSKYVNFLYLASHYEKLKGSPEDNEQKQLFVEQHKHYLDEIIEQISEFSKRVILADANLDKVLSAYNKHRDKPIREQAENIIHLFTLTNLGAPAAFKYFDTTIDRKRYTSTKEVLDATLIHQSITGLYETRIDLSQLGGDGGEAAAKEAAAKEAAAKEAAAKEAAAKGGVLNLEEEYRLHEKPVPSSIDPSWLQLFPTVWAERAGMGLANQVPPVVVELRSGASPVAVRQYPMSKEAREGIRPHIQKFLDLGVLVPCRSPWNTPLLPVKKPGTNDYRPVQDLREINKRVQDIHPTVPNPYNLLSSLPPSYTWYSVLDLKDAFFCLRLHPNSQPLFAFEWKDPEKGNTGQLTWTRLPQGFKNSPTLFNEALHRDLAPFRALNPQVVLLQYVDDLLVAAPTYEDCKKGTQKLLQELSKLGYRVSAKKAQLCQREVTYLGYLLKEGKRWLTPARKATVMKIPVPTTPRQVREFLGKAGFCRLFIPGFASLAAPLYPLTKPSIPFIWTEEHQQAFDHIKKALLSAPALALPDLTKPFTLYIDERAGVARGVLTQTLGPWRRPVAYLSKKLDPVASGWPTCLKAVAAVALLLKDADKLTLGQNVTVIASHSLESIVRQPPDRWMTNARMTHYQSLLLNERVSFAPPAVLNPATLLPVESEATPVHRCSEILAEETGTRRDLEDQPLPGVPTWYTDGSSFITEGKRRAGAPIVDGKRTVWASSLPEGTSAQKAELVALTQALRLAEGKNINIYTDSRYAFATAHIHGAIYKQRGWLTSAGKDIKNKEEILALLEAIHLPRRVAIIHCPGHQRGSNPVATGNRRADEAAKQAALSTRVLAGTTKPAGKRTADGSEFEKRTADGSEFESPKKKAKVE

SEQ ID NO: 6432 - protein, 2232 aa, synthetic construct
MPAAKRVKLDGGDKKYSIGLDIGTNSVGWAVITDEYKVPSKKFKVLGNTDRHSIKKNLIGALLFDSGETAEATRLKRTARRRYTRRKNRICYLQEIFSNEMAKVDDSFFHRLEESFLVEEDKKHERHPIFGNIVDEVAYHEKYPTIYHLRKKLVDSTDKADLRLIYLALAHMIKFRGHFLIEGDLNPDNSDVDKLFIQLVQTYNQLFEENPINASGVDAKAILSARLSKSRRLENLIAQLPGEKKNGLFGNLIALSLGLTPNFKSNFDLAEDAKLQLSKDTYDDDLDNLLAQIGDQYADLFLAAKNLSDAILLSDILRVNTEITKAPLSASMIKRYDEHHQDLTLLKALVRQQLPEKYKEIFFDQSKNGYAGYIDGGASQEEFYKFIKPILEKMDGTEELLVKLNREDLLRKQRTFDNGSIPHQIHLGELHAILRRQEDFYPFLKDNREKIEKILTFRIPYYVGPLARGNSRFAWMTRKSEETITPWNFEEVVDKGASAQSFIERMTNFDKNLPNEKVLPKHSLLYEYFTVYNELTKVKYVTEGMRKPAFLSGEQKKAIVDLLFKTNRKVTVKQLKEDYFKKIECFDSVEISGVEDRFNASLGTYHDLLKIIKDKDFLDNEENEDILEDIVLTLTLFEDREMIEERLKTYAHLFDDKVMKQLKRRRYTGWGRLSRKLINGIRDKQSGKTILDFLKSDGFANRNFMQLIHDDSLTFKEDIQKAQVSGQGDSLHEHIANLAGSPAIKKGILQTVKVVDELVKVMGRHKPENIVIEMARENQTTQKGQKNSRERMKRIEEGIKELGSQILKEHPVENTQLQNEKLYLYYLQNGRDMYVDQELDINRLSDYDVDHIVPQSFLKDDSIDNKVLTRSDKARGKSDNVPSEEVVKKMKNYWRQLLNAKLITQRKFDNLTKAERGGLSELDKAGFIKRQLVETRQITKHVAQILDSRMNTKYDENDKLIREVKVITLKSKLVSDFRKDFQFYKVREINNYHHAHDAYLNAVVGTALIKKYPKLESEFVYGDYKVYDVRKMIAKSEQEIGKATAKYFFYSNIMNFFKTEITLANGEIRKRPLIETNGETGEIVWDKGRDFATVRKVLSMPQVNIVKKTEVQTGGFSKESILPKRNSDKLIARKKDWDPKKYGGFDSPTVAYSVLVVAKVEKGKSKKLKSVKELLGITIMERSSFEKNPIDFLEAKGYKEVKKDLIIKLPKYSLFELENGRKRMLASAGELQKGNELALPSKYVNFLYLASHYEKLKGSPEDNEQKQLFVEQHKHYLDEIIEQISEFSKRVILADANLDKVLSAYNKHRDKPIREQAENIIHLFTLTNLGAPAAFKYFDTTIDRKRYTSTKEVLDATLIHQSITGLYETRIDLSQLGGDGGEAAAKEAAAKEAAAKEAAAKEAAAKGGTLGDQGSRGSDPLPEPRVTLTVEGIPTEFLVNTGAEHSVLTKPMGKMGSKRTVVAGATGSKVYPWTTKRLLKIGQKQVTHSFLVIPECPAPLLGRDLLTKLKAQIQFSTEGPQVTWEDRPAMCLVLNLEEEYRLHEKPVPPSIDPSWLQLFPMVWAEKAGMGLANQVPPVVVELKSDASPVAVRQYPMSKEAREGIRPHIQRFLDLGILVPCQSPWNTPLLPVKKPGTNDYRPVQDLREVNKRVQDIHPTVPNPYNLLSSLPPSHTWYSVLDLKDAFFCLKLHPNSQPLFAFEWRDPEKGNTGQLTWTRLPQGFKNSPTLFNEALHRDLASFRALNPQVVMLQYVDDLLVAAPTYRDCKEGTRRLLQELSKLGYRVSAKKAQLCREEVTYLGYLLKGGKRWLTPARKATVMKIPTPTTPRQVREFLGTAGFCRLWIPGFASLAAPLYPLTRPKVPFTWTEAHQEAFGRIKEALLSAPALALPDLTKPFALYVDEKEGVARGVLTQTLGPWRRPVAYLSKKLDPVASGWPTCLKAIAAVALLLKDADKLTLGQNVLVIAPHNLESIVRQPPDRWMTNARMTHYQSLLLNERVSFAPPAILNPATLLPVESDDTPIHICSEILAEETGTRPDLRDQPLPGVPAWYTDGSSFIMDGRRQAGAAIVDNKRTVWASNLPEGTSAQKAELIALTQALRLAEGKSINIYTDSRYAFATAHVHGAIYKQRGWLTSAGKDIKNKEEILALLEAIHLPKRVAIIHCPGHQRGTDPVATGNRKADEAAKQAAQSTRILTETTKNAGKRTADGSEFEKRTADGSEFESPKKKAKVE

SEQ ID NO: 6433 - protein, 2110 aa, synthetic construct
MPAAKRVKLDGGDKKYSIGLDIGTNSVGWAVITDEYKVPSKKFKVLGNTDRHSIKKNLIGALLFDSGETAEATRLKRTARRRYTRRKNRICYLQEIFSNEMAKVDDSFFHRLEESFLVEEDKKHERHPIFGNIVDEVAYHEKYPTIYHLRKKLVDSTDKADLRLIYLALAHMIKFRGHFLIEGDLNPDNSDVDKLFIQLVQTYNQLFEENPINASGVDAKAILSARLSKSRRLENLIAQLPGEKKNGLFGNLIALSLGLTPNFKSNFDLAEDAKLQLSKDTYDDDLDNLLAQIGDQYADLFLAAKNLSDAILLSDILRVNTEITKAPLSASMIKRYDEHHQDLTLLKALVRQQLPEKYKEIFFDQSKNGYAGYIDGGASQEEFYKFIKPILEKMDGTEELLVKLNREDLLRKQRTFDNGSIPHQIHLGELHAILRRQEDFYPFLKDNREKIEKILTFRIPYYVGPLARGNSRFAWMTRKSEETITPWNFEEVVDKGASAQSFIERMTNFDKNLPNEKVLPKHSLLYEYFTVYNELTKVKYVTEGMRKPAFLSGEQKKAIVDLLFKTNRKVTVKQLKEDYFKKIECFDSVEISGVEDRFNASLGTYHDLLKIIKDKDFLDNEENEDILEDIVLTLTLFEDREMIEERLKTYAHLFDDKVMKQLKRRRYTGWGRLSRKLINGIRDKQSGKTILDFLKSDGFANRNFMQLIHDDSLTFKEDIQKAQVSGQGDSLHEHIANLAGSPAIKKGILQTVKVVDELVKVMGRHKPENIVIEMARENQTTQKGQKNSRERMKRIEEGIKELGSQILKEHPVENTQLQNEKLYLYYLQNGRDMYVDQELDINRLSDYDVDHIVPQSFLKDDSIDNKVLTRSDKARGKSDNVPSEEVVKKMKNYWRQLLNAKLITQRKFDNLTKAERGGLSELDKAGFIKRQLVETRQITKHVAQILDSRMNTKYDENDKLIREVKVITLKSKLVSDFRKDFQFYKVREINNYHHAHDAYLNAVVGTALIKKYPKLESEFVYGDYKVYDVRKMIAKSEQEIGKATAKYFFYSNIMNFFKTEITLANGEIRKRPLIETNGETGEIVWDKGRDFATVRKVLSMPQVNIVKKTEVQTGGFSKESILPKRNSDKLIARKKDWDPKKYGGFDSPTVAYSVLVVAKVEKGKSKKLKSVKELLGITIMERSSFEKNPIDFLEAKGYKEVKKDLIIKLPKYSLFELENGRKRMLASAGELQKGNELALPSKYVNFLYLASHYEKLKGSPEDNEQKQLFVEQHKHYLDEIIEQISEFSKRVILADANLDKVLSAYNKHRDKPIREQAENIIHLFTLTNLGAPAAFKYFDTTIDRKRYTSTKEVLDATLIHQSITGLYETRIDLSQLGGDGGEAAAKEAAAKEAAAKEAAAKEAAAKGGTLNLEDEYRLYETSAEPEVSPGSTWLSDFPQAWAETGGMGLAVRQAPLIIPLKATSTPVSIKQYPMSQEAKLGIKPHIQRLLDQGILVPCQSPWNTPLLPVKKPGTNDYRPVQDLREVNKRVEDIHPTVPNPYNLLSGLPPSHRWYTVLDLKDAFFCLRLHPTSQPLFAFEWRDPGMGISGQLTWTRLPQGFKNSPTLFNEALHRDLADFRIQHPDLILLQYVDDILLAATSELDCQQGTRALLLTLGNLGYRASAKKAQLCQKQVKYLGYLLKEGQRWLTEARKETVMGQPTPKTPRQLREFLGTAGFCRLWIPGFAEMAAPLYPLTKPGTLFNWGPDQQKAYQEIKQALLTAPALGLPDLTKPFELFVDEKQGYAKGVLTQKLGPWRRPVAYLSKKLDPVAAGWPPCLRMVAAIAVLRKDAGKLTMGQPLVILAPHAVEALVKQPPDRWLSNARMTHYQAMLLDTDRVQFGPVVALNPATLLPLPEEGAPHDCLEILAETHGTRPDLTDQPIPDADHTWYTDGSSFLQEGQRKAGAAVTTETEVIWARALPAGTSAQRAELIALTQALKMAEGKRLNVYTDSRYAFATAHIHGEIYRRRGWLTSEGREIKNKSEILALLKALFLPKRLSIIHCLGHQKGDSAEARGNRLADQAAREAAIKTPPDTSTLLAGKRTADGSEFEKRTADGSEFESPKKKAKVE

SEQ ID NO: 6434 - protein, 2110 aa, synthetic construct; identical to SEQ ID NO: 4507

SEQ ID NO: 6435 - protein, 2110 aa, synthetic construct
MPAAKRVKLDGGDKKYSIGLDIGTNSVGWAVITDEYKVPSKKFKVLGNTDRHSIKKNLIGALLFDSGETAEATRLKRTARRRYTRRKNRICYLQEIFSNEMAKVDDSFFHRLEESFLVEEDKKHERHPIFGNIVDEVAYHEKYPTIYHLRKKLVDSTDKADLRLIYLALAHMIKFRGHFLIEGDLNPDNSDVDKLFIQLVQTYNQLFEENPINASGVDAKAILSARLSKSRRLENLIAQLPGEKKNGLFGNLIALSLGLTPNFKSNFDLAEDAKLQLSKDTYDDDLDNLLAQIGDQYADLFLAAKNLSDAILLSDILRVNTEITKAPLSASMIKRYDEHHQDLTLLKALVRQQLPEKYKEIFFDQSKNGYAGYIDGGASQEEFYKFIKPILEKMDGTEELLVKLNREDLLRKQRTFDNGSIPHQIHLGELHAILRRQEDFYPFLKDNREKIEKILTFRIPYYVGPLARGNSRFAWMTRKSEETITPWNFEEVVDKGASAQSFIERMTNFDKNLPNEKVLPKHSLLYEYFTVYNELTKVKYVTEGMRKPAFLSGEQKKAIVDLLFKTNRKVTVKQLKEDYFKKIECFDSVEISGVEDRFNASLGTYHDLLKIIKDKDFLDNEENEDILEDIVLTLTLFEDREMIEERLKTYAHLFDDKVMKQLKRRRYTGWGRLSRKLINGIRDKQSGKTILDFLKSDGFANRNFMQLIHDDSLTFKEDIQKAQVSGQGDSLHEHIANLAGSPAIKKGILQTVKVVDELVKVMGRHKPENIVIEMARENQTTQKGQKNSRERMKRIEEGIKELGSQILKEHPVENTQLQNEKLYLYYLQNGRDMYVDQELDINRLSDYDVDHIVPQSFLKDDSIDNKVLTRSDKARGKSDNVPSEEVVKKMKNYWRQLLNAKLITQRKFDNLTKAERGGLSELDKAGFIKRQLVETRQITKHVAQILDSRMNTKYDENDKLIREVKVITLKSKLVSDFRKDFQFYKVREINNYHHAHDAYLNAVVGTALIKKYPKLESEFVYGDYKVYDVRKMIAKSEQEIGKATAKYFFYSNIMNFFKTEITLANGEIRKRPLIETNGETGEIVWDKGRDFATVRKVLSMPQVNIVKKTEVQTGGFSKESILPKRNSDKLIARKKDWDPKKYGGFDSPTVAYSVLVVAKVEKGKSKKLKSVKELLGITIMERSSFEKNPIDFLEAKGYKEVKKDLIIKLPKYSLFELENGRKRMLASAGELQKGNELALPSKYVNFLYLASHYEKLKGSPEDNEQKQLFVEQHKHYLDEIIEQISEFSKRVILADANLDKVLSAYNKHRDKPIREQAENIIHLFTLTNLGAPAAFKYFDTTIDRKRYTSTKEVLDATLIHQSITGLYETRIDLSQLGGDGGEAAAKEAAAKEAAAKEAAAKEAAAKGGTLNIEDEYRLHETSKGPDVPLGSTWLSDFPQAWAETGGMGLAVRQAPLIIPLKATSTPVSIKQYPMSQEARLGIKPHIQRLLDQGILVPCQSPWNTPLLPVKKPGTNDYRPVQDLREVNKRVEDIHPTVPNPYNLLSGLPPSHQWYTVLDLKDAFFCLRLHPTSQSLFAFEWRDPEMGISGQLTWTRLPQGFKNSPTLFDEALHRDLADFRIQHPDLILLQYVDDLLLAATSELDCQQGTRALLQTLGDLGYRASAKKAQICQKQVKYLGYLLKEGQRWLTEARKETVMGQPTPKTPRQLREFLGTAGFCRLWIPGFAEMAAPLYPLTKTGTLFEWGPDQQKAYQEIKQALLTAPALGLPDLTKPFELFVDEKQGYAKGVLTQKLGPWRRPVAYLSKKLDPVAAGWPPCLRMVAAIAVLTKDAGKLTMGQPLVILAPHAVEALVKQPPDRWLSNARMTHYQALLLDTDRVQFGPIVALNPATLLPLPEEGLQHDCLDILAEAHGTRPDLTDQPLPDADHTWYTDGSSFLQEGQRKAGAAVTTETEVVWAKALPAGTSAQRAELIALTQALKMAEGKKLNVYTDSRYAFATAHIHGEIYRRRGLLTSEGKEIKNKDEILALLKALFLPKRLSIIHCPGHQKGNRAEARGNRMADQAAREVATRETPETSTLLAGKRTADGSEFEKRTADGSEFESPKKKAKVE

SEQ ID NO: 6436 - protein, 2110 aa, synthetic construct
MPAAKRVKLDGGDKKYSIGLDIGTNSVGWAVITDEYKVPSKKFKVLGNTDRHSIKKNLIGALLFDSGETAEATRLKRTARRRYTRRKNRICYLQEIFSNEMAKVDDSFFHRLEESFLVEEDKKHERHPIFGNIVDEVAYHEKYPTIYHLRKKLVDSTDKADLRLIYLALAHMIKFRGHFLIEGDLNPDNSDVDKLFIQLVQTYNQLFEENPINASGVDAKAILSARLSKSRRLENLIAQLPGEKKNGLFGNLIALSLGLTPNFKSNFDLAEDAKLQLSKDTYDDDLDNLLAQIGDQYADLFLAAKNLSDAILLSDILRVNTEITKAPLSASMIKRYDEHHQDLTLLKALVRQQLPEKYKEIFFDQSKNGYAGYIDGGASQEEFYKFIKPILEKMDGTEELLVKLNREDLLRKQRTFDNGSIPHQIHLGELHAILRRQEDFYPFLKDNREKIEKILTFRIPYYVGPLARGNSRFAWMTRKSEETITPWNFEEVVDKGASAQSFIERMTNFDKNLPNEKVLPKHSLLYEYFTVYNELTKVKYVTEGMRKPAFLSGEQKKAIVDLLFKTNRKVTVKQLKEDYFKKIECFDSVEISGVEDRFNASLGTYHDLLKIIKDKDFLDNEENEDILEDIVLTLTLFEDREMIEERLKTYAHLFDDKVMKQLKRRRYTGWGRLSRKLINGIRDKQSGKTILDFLKSDGFANRNFMQLIHDDSLTFKEDIQKAQVSGQGDSLHEHIANLAGSPAIKKGILQTVKVVDELVKVMGRHKPENIVIEMARENQTTQKGQKNSRERMKRIEEGIKELGSQILKEHPVENTQLQNEKLYLYYLQNGRDMYVDQELDINRLSDYDVDHIVPQSFLKDDSIDNKVLTRSDKARGKSDNVPSEEVVKKMKNYWRQLLNAKLITQRKFDNLTKAERGGLSELDKAGFIKRQLVETRQITKHVAQILDSRMNTKYDENDKLIREVKVITLKSKLVSDFRKDFQFYKVREINNYHHAHDAYLNAVVGTALIKKYPKLESEFVYGDYKVYDVRKMIAKSEQEIGKATAKYFFYSNIMNFFKTEITLANGEIRKRPLIETNGETGEIVWDKGRDFATVRKVLSMPQVNIVKKTEVQTGGFSKESILPKRNSDKLIARKKDWDPKKYGGFDSPTVAYSVLVVAKVEKGKSKKLKSVKELLGITIMERSSFEKNPIDFLEAKGYKEVKKDLIIKLPKYSLFELENGRKRMLASAGELQKGNELALPSKYVNFLYLASHYEKLKGSPEDNEQKQLFVEQHKHYLDEIIEQISEFSKRVILADANLDKVLSAYNKHRDKPIREQAENIIHLFTLTNLGAPAAFKYFDTTIDRKRYTSTKEVLDATLIHQSITGLYETRIDLSQLGGDGGEAAAKEAAAKEAAAKEAAAKEAAAKGGTLNIEDEHRLHETSKEPDVSLGSTWLSDFPQAWAETGGMGLAVRQAPLIIPLKATSTPVSIKQYPMSQEARLGIKPHIQRLLDQGILVPCQSPWNTPLLPVKKPGTNDYRPVQDLREVNKRVEDIHPTVPNPYNLLSGLPPSHQWYTVLDLKDAFFCLRLHPTSQPLFAFEWRDPEMGISGQLTWTRLPQGFKNSPTLFDEALHRDLADFRIQHPDLILLQYVDDLLLAATSELDCQQGTRALLQTLGNLGYRASAKKAQICQKQVKYLGYLLKEGQRWLTEARKETVMGQPTPKTPRQLREFLGTAGFCRLWIPGFAEMAAPLYPLTKTGTLFNWGPDQQKAYQEIKQALLTAPALGLPDLTKPFELFVDEKQGYAKGVLTQKLGPWRRPVAYLSKKLDPVAAGWPPCLRMVAAIAVLTKDAGKLTMGQPLVILAPHAVEALVKQPPDRWLSNARMTHYQALLLDTDRVQFGPVVALNPATLLPLPEEGLQHNCLDILAEAHGTRPDLTDQPLPDADHTWYTDGSSLLQEGQRKAGAAVTTETEVIWAKALPAGTSAQRAELIALTQALKMAEGKKLNVYTDSRYAFATAHIHGEIYRRRGLLTSEGKEIKNKDEILALLKALFLPKRLSIIHCPGHQKGHSAEARGNRMADQAARKAAITETPDTSTLLAGKRTADGSEFEKRTADGSEFESPKKKAKVE

SEQ ID NO: 6437 - protein, 2190 aa, synthetic construct
MPAAKRVKLDGGDKKYSIGLDIGTNSVGWAVITDEYKVPSKKFKVLGNTDRHSIKKNLIGALLFDSGETAEATRLKRTARRRYTRRKNRICYLQEIFSNEMAKVDDSFFHRLEESFLVEEDKKHERHPIFGNIVDEVAYHEKYPTIYHLRKKLVDSTDKADLRLIYLALAHMIKFRGHFLIEGDLNPDNSDVDKLFIQLVQTYNQLFEENPINASGVDAKAILSARLSKSRRLENLIAQLPGEKKNGLFGNLIALSLGLTPNFKSNFDLAEDAKLQLSKDTYDDDLDNLLAQIGDQYADLFLAAKNLSDAILLSDILRVNTEITKAPLSASMIKRYDEHHQDLTLLKALVRQQLPEKYKEIFFDQSKNGYAGYIDGGASQEEFYKFIKPILEKMDGTEELLVKLNREDLLRKQRTFDNGSIPHQIHLGELHAILRRQEDFYPFLKDNREKIEKILTFRIPYYVGPLARGNSRFAWMTRKSEETITPWNFEEVVDKGASAQSFIERMTNFDKNLPNEKVLPKHSLLYEYFTVYNELTKVKYVTEGMRKPAFLSGEQKKAIVDLLFKTNRKVTVKQLKEDYFKKIECFDSVEISGVEDRFNASLGTYHDLLKIIKDKDFLDNEENEDILEDIVLTLTLFEDREMIEERLKTYAHLFDDKVMKQLKRRRYTGWGRLSRKLINGIRDKQSGKTILDFLKSDGFANRNFMQLIHDDSLTFKEDIQKAQVSGQGDSLHEHIANLAGSPAIKKGILQTVKVVDELVKVMGRHKPENIVIEMARENQTTQKGQKNSRERMKRIEEGIKELGSQILKEHPVENTQLQNEKLYLYYLQNGRDMYVDQELDINRLSDYDVDHIVPQSFLKDDSIDNKVLTRSDKARGKSDNVPSEEVVKKMKNYWRQLLNAKLITQRKFDNLTKAERGGLSELDKAGFIKRQLVETRQITKHVAQILDSRMNTKYDENDKLIREVKVITLKSKLVSDFRKDFQFYKVREINNYHHAHDAYLNAVVGTALIKKYPKLESEFVYGDYKVYDVRKMIAKSEQEIGKATAKYFFYSNIMNFFKTEITLANGEIRKRPLIETNGETGEIVWDKGRDFATVRKVLSMPQVNIVKKTEVQTGGFSKESILPKRNSDKLIARKKDWDPKKYGGFDSPTVAYSVLVVAKVEKGKSKKLKSVKELLGITIMERSSFEKNPIDFLEAKGYKEVKKDLIIKLPKYSLFELENGRKRMLASAGELQKGNELALPSKYVNFLYLASHYEKLKGSPEDNEQKQLFVEQHKHYLDEIIEQISEFSKRVILADANLDKVLSAYNKHRDKPIREQAENIIHLFTLTNLGAPAAFKYFDTTIDRKRYTSTKEVLDATLIHQSITGLYETRIDLSQLGGDGGEAAAKEAAAKEAAAKEAAAKEAAAKGGMDPLQLLQPLEAEIKGTKLKAHWNSGATITCVPEAFLEDERPIQTMLIKTIHGEKQQDVYYLTFKVQGRKVEAEVLASPYDYILLNPSDVPWLMKKPLQLTVLVPLHEYQERLLQQTALPKEQKELLQKLFLKYDALWQHWENQVGHRRIKPHNIATGTLAPRPQKQYPINPKAKPSIQIVIDDLLKQGVLIQQNSTMNTPVYPVPKPDGKWRMVLDYREVNKTIPLIAAQNQHSAGILSSIYRGKYKTTLDLTNGFWAHPITPESYWLTAFTWQGKQYCWTRLPQGFLNSPALFTADVVDLLKEIPNVQAYVDDIYISHDDPQEHLEQLEKIFSILLNAGYVVSLKKSEIAQREVEFLGFNITKEGRGLTDTFKQKLLNITPPKDLKQLQSILGLLNFARNFIPNYSELVKPLYTIVANANGKFISWTEDNSNQLQHIISVLNQADNLEERNPETRLIIKVNSSPSAGYIRYYNEGSKRPIMYVNYIFSKAEAKFTQTEKLLTTMHKGLIKAMDLAMGQEILVYSPIVSMTKIQRTPLPERKALPVRWITWMTYLEDPRIQFHYDKSLPELQQIPNVTEDVIAKTKHPSEFAMVFYTDGSAIKHPDVNKSHSAGMGIAQVQFIPEYKIVHQWSIPLGDHTAQLAEIAAVEFACKKALKISGPVLIVTDSFYVAESANKELPYWKSNGFLNNKKKPLRHVSKWKSIAECLQLKPDIIIMHEKGHQQPMTTLHTEGNNLADKLATQGSYVVHAGKRTADGSEFEKRTADGSEFESPKKKAKVE

SEQ ID NO: 6438 - protein, 2110 aa, synthetic construct
MPAAKRVKLDGGDKKYSIGLDIGTNSVGWAVITDEYKVPSKKFKVLGNTDRHSIKKNLIGALLFDSGETAEATRLKRTARRRYTRRKNRICYLQEIFSNEMAKVDDSFFHRLEESFLVEEDKKHERHPIFGNIVDEVAYHEKYPTIYHLRKKLVDSTDKADLRLIYLALAHMIKFRGHFLIEGDLNPDNSDVDKLFIQLVQTYNQLFEENPINASGVDAKAILSARLSKSRRLENLIAQLPGEKKNGLFGNLIALSLGLTPNFKSNFDLAEDAKLQLSKDTYDDDLDNLLAQIGDQYADLFLAAKNLSDAILLSDILRVNTEITKAPLSASMIKRYDEHHQDLTLLKALVRQQLPEKYKEIFFDQSKNGYAGYIDGGASQEEFYKFIKPILEKMDGTEELLVKLNREDLLRKQRTFDNGSIPHQIHLGELHAILRRQEDFYPFLKDNREKIEKILTFRIPYYVGPLARGNSRFAWMTRKSEETITPWNFEEVVDKGASAQSFIERMTNFDKNLPNEKVLPKHSLLYEYFTVYNELTKVKYVTEGMRKPAFLSGEQKKAIVDLLFKTNRKVTVKQLKEDYFKKIECFDSVEISGVEDRFNASLGTYHDLLKIIKDKDFLDNEENEDILEDIVLTLTLFEDREMIEERLKTYAHLFDDKVMKQLKRRRYTGWGRLSRKLINGIRDKQSGKTILDFLKSDGFANRNFMQLIHDDSLTFKEDIQKAQVSGQGDSLHEHIANLAGSPAIKKGILQTVKVVDELVKVMGRHKPENIVIEMARENQTTQKGQKNSRERMKRIEEGIKELGSQILKEHPVENTQLQNEKLYLYYLQNGRDMYVDQELDINRLSDYDVDHIVPQSFLKDDSIDNKVLTRSDKARGKSDNVPSEEVVKKMKNYWRQLLNAKLITQRKFDNLTKAERGGLSELDKAGFIKRQLVETRQITKHVAQILDSRMNTKYDENDKLIREVKVITLKSKLVSDFRKDFQFYKVREINNYHHAHDAYLNAVVGTALIKKYPKLESEFVYGDYKVYDVRKMIAKSEQEIGKATAKYFFYSNIMNFFKTEITLANGEIRKRPLIETNGETGEIVWDKGRDFATVRKVLSMPQVNIVKKTEVQTGGFSKESILPKRNSDKLIARKKDWDPKKYGGFDSPTVAYSVLVVAKVEKGKSKKLKSVKELLGITIMERSSFEKNPIDFLEAKGYKEVKKDLIIKLPKYSLFELENGRKRMLASAGELQKGNELALPSKYVNFLYLASHYEKLKGSPEDNEQKQLFVEQHKHYLDEIIEQISEFSKRVILADANLDKVLSAYNKHRDKPIREQAENIIHLFTLTNLGAPAAFKYFDTTIDRKRYTSTKEVLDATLIHQSITGLYETRIDLSQLGGDGGEAAAKEAAAKEAAAKEAAAKEAAAKGGTLNIEDEYRLHETSKEPDVPLGSTWLSDFPQAWAETGGMGLAVRQAPLIIPLKATSTPVSIKQYPMSQEARLGIKPHIQRLLDQGILVPCQSPWNTPLLPVKKPGTNDYRPVQDLREVNKRVEDIHPTVPNPYNLLSGLPPSHQWYTVLDLKDAFFCLRLHPTSQPLFAFEWRDPEMGISGQLTWTRLPQGFKNSPTLFDEALHRDLADFRIQHPDLILLQYVDDLLLAATSEQDCQRGTRALLQTLGNLGYRASAKKAQICQKQVKYLGYLLKEGQRWLTEARKETVMGQPTPKTPRQLREFLGTAGFCRLWIPGFAEMAAPLYPLTKTGTLFNWGPDQQKAYQEIKQALLTAPALGLPDLTKPFELFVDEKQGYAKGVLTQKLGPWRRPVAYLSKKLDPVAAGWPPCLRMVAAIAVLTKDAGKLTMGQPLVILAPHAVEALVKQPPDRWLSNARMTHYQAMLLDTDRVQFGPVVALNPATLLPLPEKEAPHDCLEILAETHGTRPDLTDQPIPDADYTWYTDGSSFLQEGQRRAGAAVTTETEVIWARALPAGTSAQRAELIALTQALKMAEGKKLNVYTDSRYAFATAHVHGEIYRRRGLLTSEGREIKNKNEILALLKALFLPKRLSIIHCPGHQKGNSAEARGNRMADQAAREAAMKAVLETSTLLAGKRTADGSEFEKRTADGSEFESPKKKAKVE

SEQ ID NO: 6439 - protein, 2110 aa, synthetic construct
MPAAKRVKLDGGDKKYSIGLDIGTNSVGWAVITDEYKVPSKKFKVLGNTDRHSIKKNLIGALLFDSGETAEATRLKRTARRRYTRRKNRICYLQEIFSNEMAKVDDSFFHRLEESFLVEEDKKHERHPIFGNIVDEVAYHEKYPTIYHLRKKLVDSTDKADLRLIYLALAHMIKFRGHFLIEGDLNPDNSDVDKLFIQLVQTYNQLFEENPINASGVDAKAILSARLSKSRRLENLIAQLPGEKKNGLFGNLIALSLGLTPNFKSNFDLAEDAKLQLSKDTYDDDLDNLLAQIGDQYADLFLAAKNLSDAILLSDILRVNTEITKAPLSASMIKRYDEHHQDLTLLKALVRQQLPEKYKEIFFDQSKNGYAGYIDGGASQEEFYKFIKPILEKMDGTEELLVKLNREDLLRKQRTFDNGSIPHQIHLGELHAILRRQEDFYPFLKDNREKIEKILTFRIPYYVGPLARGNSRFAWMTRKSEETITPWNFEEVVDKGASAQSFIERMTNFDKNLPNEKVLPKHSLLYEYFTVYNELTKVKYVTEGMRKPAFLSGEQKKAIVDLLFKTNRKVTVKQLKEDYFKKIECFDSVEISGVEDRFNASLGTYHDLLKIIKDKDFLDNEENEDILEDIVLTLTLFEDREMIEERLKTYAHLFDDKVMKQLKRRRYTGWGRLSRKLINGIRDKQSGKTILDFLKSDGFANRNFMQLIHDDSLTFKEDIQKAQVSGQGDSLHEHIANLAGSPAIKKGILQTVKVVDELVKVMGRHKPENIVIEMARENQTTQKGQKNSRERMKRIEEGIKELGSQILKEHPVENTQLQNEKLYLYYLQNGRDMYVDQELDINRLSDYDVDHIVPQSFLKDDSIDNKVLTRSDKARGKSDNVPSEEVVKKMKNYWRQLLNAKLITQRKFDNLTKAERGGLSELDKAGFIKRQLVETRQITKHVAQILDSRMNTKYDENDKLIREVKVITLKSKLVSDFRKDFQFYKVREINNYHHAHDAYLNAVVGTALIKKYPKLESEFVYGDYKVYDVRKMIAKSEQEIGKATAKYFFYSNIMNFFKTEITLANGEIRKRPLIETNGETGEIVWDKGRDFATVRKVLSMPQVNIVKKTEVQTGGFSKESILPKRNSDKLIARKKDWDPKKYGGFDSPTVAYSVLVVAKVEKGKSKKLKSVKELLGITIMERSSFEKNPIDFLEAKGYKEVKKDLIIKLPKYSLFELENGRKRMLASAGELQKGNELALPSKYVNFLYLASHYEKLKGSPEDNEQKQLFVEQHKHYLDEIIEQISEFSKRVILADANLDKVLSAYNKHRDKPIREQAENIIHLFTLTNLGAPAAFKYFDTTIDRKRYTSTKEVLDATLIHQSITGLYETRIDLSQLGGDGGEAAAKEAAAKEAAAKEAAAKEAAAKGGTLNIEDEYRLHETSKEPDVPLGSTWLSDFPQAWAETGGMGLAVRQAPLIIPLKATSTPVSIKQYPMSQEARLGIKPHIQRLLDQGILVPCQSPWNTPLLPVKKPGTNDYRPVQDLREVNKRVEDIHPTVPNPYNLLSGLPPSHQWYTVLDLKDAFFCLRLHPTSQPLFAFEWRDPEMGISGQLTWTRLPQGFKNSPTLFNEALHRDLADFRIQHPDLILLQYVDDLLLAATSEQDCQRGTRALLQTLGNLGYRASAKKAQICQKQVKYLGYLLKEGQRWLTEARKETVMGQPTPKTPRQLREFLGTAGFCRLWIPGFAEMAAPLYPLTKPGTLFNWGPDQQKAYQEIKQALLTAPALGLPDLTKPFELFVDEKQGYAKGVLTQKLGPWRRPVAYLSKKLDPVAAGWPPCLRMVAAIAVLTKDAGKLTMGQPLVILAPHAVEALVKQPPDRWLSNARMTHYQAMLLDTDRVQFGPVVALNPATLLPLPEKEAPHDCLEILAETHGTRPDLTDQPIPDADYTWYTDGSSFLQEGQRRAGAAVTTETEVIWARALPAGTSAQRAELIALTQALKMAEGKKLNVYTDSRYAFATAHVHGEIYRRRGWLTSEGREIKNKNEILALLKALFLPKRLSIIHCPGHQKGNSAEARGNRMADQAAREAAMKAVLETSTLLAGKRTADGSEFEKRTADGSEFESPKKKAKVE

SEQ ID NO: 6440 - protein, 2117 aa, synthetic construct
MPAAKRVKLDGGDKKYSIGLDIGTNSVGWAVITDEYKVPSKKFKVLGNTDRHSIKKNLIGALLFDSGETAEATRLKRTARRRYTRRKNRICYLQEIFSNEMAKVDDSFFHRLEESFLVEEDKKHERHPIFGNIVDEVAYHEKYPTIYHLRKKLVDSTDKADLRLIYLALAHMIKFRGHFLIEGDLNPDNSDVDKLFIQLVQTYNQLFEENPINASGVDAKAILSARLSKSRRLENLIAQLPGEKKNGLFGNLIALSLGLTPNFKSNFDLAEDAKLQLSKDTYDDDLDNLLAQIGDQYADLFLAAKNLSDAILLSDILRVNTEITKAPLSASMIKRYDEHHQDLTLLKALVRQQLPEKYKEIFFDQSKNGYAGYIDGGASQEEFYKFIKPILEKMDGTEELLVKLNREDLLRKQRTFDNGSIPHQIHLGELHAILRRQEDFYPFLKDNREKIEKILTFRIPYYVGPLARGNSRFAWMTRKSEETITPWNFEEVVDKGASAQSFIERMTNFDKNLPNEKVLPKHSLLYEYFTVYNELTKVKYVTEGMRKPAFLSGEQKKAIVDLLFKTNRKVTVKQLKEDYFKKIECFDSVEISGVEDRFNASLGTYHDLLKIIKDKDFLDNEENEDILEDIVLTLTLFEDREMIEERLKTYAHLFDDKVMKQLKRRRYTGWGRLSRKLINGIRDKQSGKTILDFLKSDGFANRNFMQLIHDDSLTFKEDIQKAQVSGQGDSLHEHIANLAGSPAIKKGILQTVKVVDELVKVMGRHKPENIVIEMARENQTTQKGQKNSRERMKRIEEGIKELGSQILKEHPVENTQLQNEKLYLYYLQNGRDMYVDQELDINRLSDYDVDHIVPQSFLKDDSIDNKVLTRSDKARGKSDNVPSEEVVKKMKNYWRQLLNAKLITQRKFDNLTKAERGGLSELDKAGFIKRQLVETRQITKHVAQILDSRMNTKYDENDKLIREVKVITLKSKLVSDFRKDFQFYKVREINNYHHAHDAYLNAVVGTALIKKYPKLESEFVYGDYKVYDVRKMIAKSEQEIGKATAKYFFYSNIMNFFKTEITLANGEIRKRPLIETNGETGEIVWDKGRDFATVRKVLSMPQVNIVKKTEVQTGGFSKESILPKRNSDKLIARKKDWDPKKYGGFDSPTVAYSVLVVAKVEKGKSKKLKSVKELLGITIMERSSFEKNPIDFLEAKGYKEVKKDLIIKLPKYSLFELENGRKRMLASAGELQKGNELALPSKYVNFLYLASHYEKLKGSPEDNEQKQLFVEQHKHYLDEIIEQISEFSKRVILADANLDKVLSAYNKHRDKPIREQAENIIHLFTLTNLGAPAAFKYFDTTIDRKRYTSTKEVLDATLIHQSITGLYETRIDLSQLGGDGGEAAAKEAAAKEAAAKEAAAKEAAAKEAAAKGGTAPLEEEYRLFLEAPIQNVTLLEQWKREIPKVWAEINPPGLASTQAPIHVQLLSTALPVRVRQYPITLEAKRSLRETIRKFRAAGILRPVHSPWNTPLLPVRKSGTSEYRMVQDLREVNKRVETIHPTVPNPYTLLSLLPPDRIWYSVLDLKDAFFCIPLAPESQLIFAFEWADAEEGESGQLTWTRLPQGFKNSPTLFDEALNRDLQGFRLDHPSVSLLQYVDDLLIAADTQAACLSATRDLLMTLAELGYRVSGKKAQLCQEEVTYLGFKIHKGSRSLSNSRTQAILQIPVPKTKRQVREFLGTIGYCRLWIPGFAELAQPLYAATRGGNDPLVWGEKEEEAFQSLKLALTQPPALALPSLDKPFQLFVEETSGAAKGVLTQALGPWKRPVAYLSKRLDPVAAGWPRCLRAIAAAALLTREASKLTFGQDIEITSSHNLESLLRSPPDKWLTNARITQYQVLLLDPPRVRFKQTAALNPATLLPETDDTLPIHHCLDTLDSLTSTRPDLTDQPLAQAEATLFTDGSSYIRDGKRYAGAAVVTLDSVIWAEPLPIGTSAQKAELIALTKALEWSKDKSVNIYTDSRYAFATLHVHGMIYRERGLLTAGGKAIKNAPEILALLTAVWLPKRVAVMHCKGHQKDDAPTSTGNRRADEVAREVAIRPLSTQATISAGKRTADGSEFEKRTADGSEFESPKKKAKVE

SEQ ID NO: 6441 - protein, 2117 aa, synthetic construct
MPAAKRVKLDGGDKKYSIGLDIGTNSVGWAVITDEYKVPSKKFKVLGNTDRHSIKKNLIGALLFDSGETAEATRLKRTARRRYTRRKNRICYLQEIFSNEMAKVDDSFFHRLEESFLVEEDKKHERHPIFGNIVDEVAYHEKYPTIYHLRKKLVDSTDKADLRLIYLALAHMIKFRGHFLIEGDLNPDNSDVDKLFIQLVQTYNQLFEENPINASGVDAKAILSARLSKSRRLENLIAQLPGEKKNGLFGNLIALSLGLTPNFKSNFDLAEDAKLQLSKDTYDDDLDNLLAQIGDQYADLFLAAKNLSDAILLSDILRVNTEITKAPLSASMIKRYDEHHQDLTLLKALVRQQLPEKYKEIFFDQSKNGYAGYIDGGASQEEFYKFIKPILEKMDGTEELLVKLNREDLLRKQRTFDNGSIPHQIHLGELHAILRRQEDFYPFLKDNREKIEKILTFRIPYYVGPLARGNSRFAWMTRKSEETITPWNFEEVVDKGASAQSFIERMTNFDKNLPNEKVLPKHSLLYEYFTVYNELTKVKYVTEGMRKPAFLSGEQKKAIVDLLFKTNRKVTVKQLKEDYFKKIECFDSVEISGVEDRFNASLGTYHDLLKIIKDKDFLDNEENEDILEDIVLTLTLFEDREMIEERLKTYAHLFDDKVMKQLKRRRYTGWGRLSRKLINGIRDKQSGKTILDFLKSDGFANRNFMQLIHDDSLTFKEDIQKAQVSGQGDSLHEHIANLAGSPAIKKGILQTVKVVDELVKVMGRHKPENIVIEMARENQTTQKGQKNSRERMKRIEEGIKELGSQILKEHPVENTQLQNEKLYLYYLQNGRDMYVDQELDINRLSDYDVDHIVPQSFLKDDSIDNKVLTRSDKARGKSDNVPSEEVVKKMKNYWRQLLNAKLITQRKFDNLTKAERGGLSELDKAGFIKRQLVETRQITKHVAQILDSRMNTKYDENDKLIREVKVITLKSKLVSDFRKDFQFYKVREINNYHHAHDAYLNAVVGTALIKKYPKLESEFVYGDYKVYDVRKMIAKSEQEIGKATAKYFFYSNIMNFFKTEITLANGEIRKRPLIETNGETGEIVWDKGRDFATVRKVLSMPQVNIVKKTEVQTGGFSKESILPKRNSDKLIARKKDWDPKKYGGFDSPTVAYSVLVVAKVEKGKSKKLKSVKELLGITIMERSSFEKNPIDFLEAKGYKEVKKDLIIKLPKYSLFELENGRKRMLASAGELQKGNELALPSKYVNFLYLASHYEKLKGSPEDNEQKQLFVEQHKHYLDEIIEQISEFSKRVILADANLDKVLSAYNKHRDKPIREQAENIIHLFTLTNLGAPAAFKYFDTTIDRKRYTSTKEVLDATLIHQSITGLYETRIDLSQLGGDGGEAAAKEAAAKEAAAKEAAAKEAAAKEAAAKGGTAPLEEEYRLFLEAPIQNVTLLEQWKREIPKVWAEINPPGLASTQAPIHVQLLSTALPVRVRQYPITLEAKRSLRETIRKFRAAGILRPVHSPWNTPLLPVRKSGTSEYRMVQDLREVNKRVETIHPTVPNPYTLLSLLPPDRIWYSVLDLKDAFFCIPLAPESQLIFAFEWADAEEGESGQLTWTRLPQGFKNSPTLFNEALNRDLQGFRLDHPSVSLLQYVDDLLIAADTQAACLSATRDLLMTLAELGYRVSGKKAQLCQEEVTYLGFKIHKGSRSLSNSRTQAILQIPVPKTKRQVREFLGTIGYCRLWIPGFAELAQPLYAATRPGNDPLVWGEKEEEAFQSLKLALTQPPALALPSLDKPFQLFVEETSGAAKGVLTQALGPWKRPVAYLSKRLDPVAAGWPRCLRAIAAAALLTREASKLTFGQDIEITSSHNLESLLRSPPDKWLTNARITQYQVLLLDPPRVRFKQTAALNPATLLPETDDTLPIHHCLDTLDSLTSTRPDLTDQPLAQAEATLFTDGSSYIRDGKRYAGAAVVTLDSVIWAEPLPIGTSAQKAELIALTKALEWSKDKSVNIYTDSRYAFATLHVHGMIYRERGWLTAGGKAIKNAPEILALLTAVWLPKRVAVMHCKGHQKDDAPTSTGNRRADEVAREVAIRPLSTQATISAGKRTADGSEFEKRTADGSEFESPKKKAKVE

SEQ ID NO: 6442 - protein, 2121 aa, synthetic construct
MPAAKRVKLDGGDKKYSIGLDIGTNSVGWAVITDEYKVPSKKFKVLGNTDRHSIKKNLIGALLFDSGETAEATRLKRTARRRYTRRKNRICYLQEIFSNEMAKVDDSFFHRLEESFLVEEDKKHERHPIFGNIVDEVAYHEKYPTIYHLRKKLVDSTDKADLRLIYLALAHMIKFRGHFLIEGDLNPDNSDVDKLFIQLVQTYNQLFEENPINASGVDAKAILSARLSKSRRLENLIAQLPGEKKNGLFGNLIALSLGLTPNFKSNFDLAEDAKLQLSKDTYDDDLDNLLAQIGDQYADLFLAAKNLSDAILLSDILRVNTEITKAPLSASMIKRYDEHHQDLTLLKALVRQQLPEKYKEIFFDQSKNGYAGYIDGGASQEEFYKFIKPILEKMDGTEELLVKLNREDLLRKQRTFDNGSIPHQIHLGELHAILRRQEDFYPFLKDNREKIEKILTFRIPYYVGPLARGNSRFAWMTRKSEETITPWNFEEVVDKGASAQSFIERMTNFDKNLPNEKVLPKHSLLYEYFTVYNELTKVKYVTEGMRKPAFLSGEQKKAIVDLLFKTNRKVTVKQLKEDYFKKIECFDSVEISGVEDRFNASLGTYHDLLKIIKDKDFLDNEENEDILEDIVLTLTLFEDREMIEERLKTYAHLFDDKVMKQLKRRRYTGWGRLSRKLINGIRDKQSGKTILDFLKSDGFANRNFMQLIHDDSLTFKEDIQKAQVSGQGDSLHEHIANLAGSPAIKKGILQTVKVVDELVKVMGRHKPENIVIEMARENQTTQKGQKNSRERMKRIEEGIKELGSQILKEHPVENTQLQNEKLYLYYLQNGRDMYVDQELDINRLSDYDVDHIVPQSFLKDDSIDNKVLTRSDKARGKSDNVPSEEVVKKMKNYWRQLLNAKLITQRKFDNLTKAERGGLSELDKAGFIKRQLVETRQITKHVAQILDSRMNTKYDENDKLIREVKVITLKSKLVSDFRKDFQFYKVREINNYHHAHDAYLNAVVGTALIKKYPKLESEFVYGDYKVYDVRKMIAKSEQEIGKATAKYFFYSNIMNFFKTEITLANGEIRKRPLIETNGETGEIVWDKGRDFATVRKVLSMPQVNIVKKTEVQTGGFSKESILPKRNSDKLIARKKDWDPKKYGGFDSPTVAYSVLVVAKVEKGKSKKLKSVKELLGITIMERSSFEKNPIDFLEAKGYKEVKKDLIIKLPKYSLFELENGRKRMLASAGELQKGNELALPSKYVNFLYLASHYEKLKGSPEDNEQKQLFVEQHKHYLDEIIEQISEFSKRVILADANLDKVLSAYNKHRDKPIREQAENIIHLFTLTNLGAPAAFKYFDTTIDRKRYTSTKEVLDATLIHQSITGLYETRIDLSQLGGDGGEAAAKEAAAKEAAAKEAAAKEAAAKEAAAKGGTVSLQDEHRLFDIPVTTSLPDVWLQDFPQAWAETGGLGRAKCQAPIIIDLKPTAVPVSIKQYPMSLEAHMGIRQHIIKFLELGVLRPCRSPWNTPLLPVKKPGTQDYRPVQDLREINKRTVDIHPTVPNPYNLLSTLKPDYSWYTVLDLKDAFFCLPLAPQSQELFAFEWKDPERGISGQLTWTRLPQGFKNSPTLFDEALHRDLTDFRTQHPEVTLLQYVDDLLLAAPTKKACTQGTRHLLQELGEKGYRASAKKAQICQTKVTYLGYILSEGKRWLTPGRIETVARIPPPRNPREVREFLGTAGFCRLWIPGFAELAAPLYALTKESTPFTWQTEHQLAFEALKKALLSAPALGLPDTSKPFTLFLDERQGIAKGVLTQKLGPWKRPVAYLSKKLDPVAAGWPPCLRIMAATAMLVKDSAKLTLGQPLTVITPHTLEAIVRQPPDRWITNARLTHYQALLLDTDRVQFGPPVTLNPATLLPVPENQPSPHDCRQVLAETHGTREDLKDQELPDADHTWYTDGSSYLDSGTRRAGAAVVDGHNTIWAQSLPPGTSAQKAELIALTKALELSKGKKANIYTDSRYAFATAHTHGSIYERRGLLTSEGKEIKNKAEIIALLKALFLPQEVAIIHCPGHQKGQDPVAVGNRQADRVARQAAMAEVLTLATEPDNTSHITAGKRTADGSEFEKRTADGSEFESPKKKAKVE

SEQ ID NO: 6443 - protein, 2192 aa, synthetic construct
MPAAKRVKLDGGDKKYSIGLDIGTNSVGWAVITDEYKVPSKKFKVLGNTDRHSIKKNLIGALLFDSGETAEATRLKRTARRRYTRRKNRICYLQEIFSNEMAKVDDSFFHRLEESFLVEEDKKHERHPIFGNIVDEVAYHEKYPTIYHLRKKLVDSTDKADLRLIYLALAHMIKFRGHFLIEGDLNPDNSDVDKLFIQLVQTYNQLFEENPINASGVDAKAILSARLSKSRRLENLIAQLPGEKKNGLFGNLIALSLGLTPNFKSNFDLAEDAKLQLSKDTYDDDLDNLLAQIGDQYADLFLAAKNLSDAILLSDILRVNTEITKAPLSASMIKRYDEHHQDLTLLKALVRQQLPEKYKEIFFDQSKNGYAGYIDGGASQEEFYKFIKPILEKMDGTEELLVKLNREDLLRKQRTFDNGSIPHQIHLGELHAILRRQEDFYPFLKDNREKIEKILTFRIPYYVGPLARGNSRFAWMTRKSEETITPWNFEEVVDKGASAQSFIERMTNFDKNLPNEKVLPKHSLLYEYFTVYNELTKVKYVTEGMRKPAFLSGEQKKAIVDLLFKTNRKVTVKQLKEDYFKKIECFDSVEISGVEDRFNASLGTYHDLLKIIKDKDFLDNEENEDILEDIVLTLTLFEDREMIEERLKTYAHLFDDKVMKQLKRRRYTGWGRLSRKLINGIRDKQSGKTILDFLKSDGFANRNFMQLIHDDSLTFKEDIQKAQVSGQGDSLHEHIANLAGSPAIKKGILQTVKVVDELVKVMGRHKPENIVIEMARENQTTQKGQKNSRERMKRIEEGIKELGSQILKEHPVENTQLQNEKLYLYYLQNGRDMYVDQELDINRLSDYDVDHIVPQSFLKDDSIDNKVLTRSDKARGKSDNVPSEEVVKKMKNYWRQLLNAKLITQRKFDNLTKAERGGLSELDKAGFIKRQLVETRQITKHVAQILDSRMNTKYDENDKLIREVKVITLKSKLVSDFRKDFQFYKVREINNYHHAHDAYLNAVVGTALIKKYPKLESEFVYGDYKVYDVRKMIAKSEQEIGKATAKYFFYSNIMNFFKTEITLANGEIRKRPLIETNGETGEIVWDKGRDFATVRKVLSMPQVNIVKKTEVQTGGFSKESILPKRNSDKLIARKKDWDPKKYGGFDSPTVAYSVLVVAKVEKGKSKKLKSVKELLGITIMERSSFEKNPIDFLEAKGYKEVKKDLIIKLPKYSLFELENGRKRMLASAGELQKGNELALPSKYVNFLYLASHYEKLKGSPEDNEQKQLFVEQHKHYLDEIIEQISEFSKRVILADANLDKVLSAYNKHRDKPIREQAENIIHLFTLTNLGAPAAFKYFDTTIDRKRYTSTKEVLDATLIHQSITGLYETRIDLSQLGGDGGEAAAKEAAAKEAAAKEAAAKEAAAKEAAAKGGMDLLKPLTVERKGVKIKGYWNSQADITCVPKDLLQGEEPVRQQNVTTIHGTQEGDVYYVNLKIDGRRINTEVIGTTLDYAIITPGDVPWILKKPLELTIKLDLEEQQGTLLNNSILSKKGKEELKQLFEKYSALWQSWENQVGHRRIRPHKIATGTVKPTPQKQYHINPKAKPDIQIVINDLLKQGVLIQKESTMNTPVYPVPKPNGRWRMVLDYRAVNKVTPLIAVQNQHSYGILGSLFKGRYKTTIDLSNGFWAHPIVPEDYWITAFTWQGKQYCWTVLPQGFLNSPGLFTGDVVDLLQGIPNVEVYVDDVYISHDSEKEHLEYLDILFNRLKEAGYIISLKKSNIANSIVDFLGFQITNEGRGLTDTFKEKLENITAPTTLKQLQSILGLLNFARNFIPDFTELIAPLYALIPKSTKNYVPWQIEHSTTLETLITKLNGAEYLQGRKGDKTLIMKVNASYTTGYIRYYNEGEKKPISYVSIVFSKTELKFTELEKLLTTVHKGLLKALDLSMGQNIHVYSPIVSMQNIQKTPQTAKKALASRWLSWLSYLEDPRIRFFYDPQMPALKDLPAVDTGKDNKKHPSNFQHIFYTDGSAITSPTKEGHLNAGMGIVYFINKDGNLQKQQEWSISLGNHTAQFAEIAAFEFALKKCLPLGGNILVVTDSNYVAKAYNEELDVWASNGFVNNRKKPLKHISKWKSVADLKRLRPDVVVTHEPGHQKLDSSPHAYGNNLADQLATQASFKVHAGKRTADGSEFEKRTADGSEFESPKKKAKVE

SEQ ID NO: 6444 - protein, 2106 aa, synthetic construct
MPAAKRVKLDGGDKKYSIGLDIGTNSVGWAVITDEYKVPSKKFKVLGNTDRHSIKKNLIGALLFDSGETAEATRLKRTARRRYTRRKNRICYLQEIFSNEMAKVDDSFFHRLEESFLVEEDKKHERHPIFGNIVDEVAYHEKYPTIYHLRKKLVDSTDKADLRLIYLALAHMIKFRGHFLIEGDLNPDNSDVDKLFIQLVQTYNQLFEENPINASGVDAKAILSARLSKSRRLENLIAQLPGEKKNGLFGNLIALSLGLTPNFKSNFDLAEDAKLQLSKDTYDDDLDNLLAQIGDQYADLFLAAKNLSDAILLSDILRVNTEITKAPLSASMIKRYDEHHQDLTLLKALVRQQLPEKYKEIFFDQSKNGYAGYIDGGASQEEFYKFIKPILEKMDGTEELLVKLNREDLLRKQRTFDNGSIPHQIHLGELHAILRRQEDFYPFLKDNREKIEKILTFRIPYYVGPLARGNSRFAWMTRKSEETITPWNFEEVVDKGASAQSFIERMTNFDKNLPNEKVLPKHSLLYEYFTVYNELTKVKYVTEGMRKPAFLSGEQKKAIVDLLFKTNRKVTVKQLKEDYFKKIECFDSVEISGVEDRFNASLGTYHDLLKIIKDKDFLDNEENEDILEDIVLTLTLFEDREMIEERLKTYAHLFDDKVMKQLKRRRYTGWGRLSRKLINGIRDKQSGKTILDFLKSDGFANRNFMQLIHDDSLTFKEDIQKAQVSGQGDSLHEHIANLAGSPAIKKGILQTVKVVDELVKVMGRHKPENIVIEMARENQTTQKGQKNSRERMKRIEEGIKELGSQILKEHPVENTQLQNEKLYLYYLQNGRDMYVDQELDINRLSDYDVDHIVPQSFLKDDSIDNKVLTRSDKARGKSDNVPSEEVVKKMKNYWRQLLNAKLITQRKFDNLTKAERGGLSELDKAGFIKRQLVETRQITKHVAQILDSRMNTKYDENDKLIREVKVITLKSKLVSDFRKDFQFYKVREINNYHHAHDAYLNAVVGTALIKKYPKLESEFVYGDYKVYDVRKMIAKSEQEIGKATAKYFFYSNIMNFFKTEITLANGEIRKRPLIETNGETGEIVWDKGRDFATVRKVLSMPQVNIVKKTEVQTGGFSKESILPKRNSDKLIARKKDWDPKKYGGFDSPTVAYSVLVVAKVEKGKSKKLKSVKELLGITIMERSSFEKNPIDFLEAKGYKEVKKDLIIKLPKYSLFELENGRKRMLASAGELQKGNELALPSKYVNFLYLASHYEKLKGSPEDNEQKQLFVEQHKHYLDEIIEQISEFSKRVILADANLDKVLSAYNKHRDKPIREQAENIIHLFTLTNLGAPAAFKYFDTTIDRKRYTSTKEVLDATLIHQSITGLYETRIDLSQLGGDGGEAAAKEAAAKEAAAKEAAAKEAAAKEAAAKGGVPWILKKPLELTIKLDLEEQQGTLLNNSILSKKGKEELKQLFEKYSALWQSWENQVGHRRIRPHKIATGTVKPTPQKQYHINPKAKPDIQIVINDLLKQGVLIQKESTMNTPVYPVPKPNGRWRMVLDYRAVNKVTPLIAVQNQHSYGILGSLFKGRYKTTIDLSNGFWAHPIVPEDYWITAFTWQGKQYCWTVLPQGFLNSPGLFTGDVVDLLQGIPNVEVYVDDVYISHDSEKEHLEYLDILFNRLKEAGYIISLKKSNIANSIVDFLGFQITNEGRGLTDTFKEKLENITAPTTLKQLQSILGLLNFARNFIPDFTELIAPLYALIPKSTKNYVPWQIEHSTTLETLITKLNGAEYLQGRKGDKTLIMKVNASYTTGYIRYYNEGEKKPISYVSIVFSKTELKFTELEKLLTTVHKGLLKALDLSMGQNIHVYSPIVSMQNIQKTPQTAKKALASRWLSWLSYLEDPRIRFFYDPQMPALKDLPAVDTGKDNKKHPSNFQHIFYTDGSAITSPTKEGHLNAGMGIVYFINKDGNLQKQQEWSISLGNHTAQFAEIAAFEFALKKCLPLGGNILVVTDSNYVAKAYNEELDVWASNGFVNNRKKPLKHISKWKSVADLKRLRPDVVVTHEPGHQKLDSSPHAYGNNLADQLATQASFKVHAGKRTADGSEFEKRTADGSEFESPKKKAKVE

SEQ ID NO: 6445 - protein, 2192 aa, synthetic construct
MPAAKRVKLDGGDKKYSIGLDIGTNSVGWAVITDEYKVPSKKFKVLGNTDRHSIKKNLIGALLFDSGETAEATRLKRTARRRYTRRKNRICYLQEIFSNEMAKVDDSFFHRLEESFLVEEDKKHERHPIFGNIVDEVAYHEKYPTIYHLRKKLVDSTDKADLRLIYLALAHMIKFRGHFLIEGDLNPDNSDVDKLFIQLVQTYNQLFEENPINASGVDAKAILSARLSKSRRLENLIAQLPGEKKNGLFGNLIALSLGLTPNFKSNFDLAEDAKLQLSKDTYDDDLDNLLAQIGDQYADLFLAAKNLSDAILLSDILRVNTEITKAPLSASMIKRYDEHHQDLTLLKALVRQQLPEKYKEIFFDQSKNGYAGYIDGGASQEEFYKFIKPILEKMDGTEELLVKLNREDLLRKQRTFDNGSIPHQIHLGELHAILRRQEDFYPFLKDNREKIEKILTFRIPYYVGPLARGNSRFAWMTRKSEETITPWNFEEVVDKGASAQSFIERMTNFDKNLPNEKVLPKHSLLYEYFTVYNELTKVKYVTEGMRKPAFLSGEQKKAIVDLLFKTNRKVTVKQLKEDYFKKIECFDSVEISGVEDRFNASLGTYHDLLKIIKDKDFLDNEENEDILEDIVLTLTLFEDREMIEERLKTYAHLFDDKVMKQLKRRRYTGWGRLSRKLINGIRDKQSGKTILDFLKSDGFANRNFMQLIHDDSLTFKEDIQKAQVSGQGDSLHEHIANLAGSPAIKKGILQTVKVVDELVKVMGRHKPENIVIEMARENQTTQKGQKNSRERMKRIEEGIKELGSQILKEHPVENTQLQNEKLYLYYLQNGRDMYVDQELDINRLSDYDVDHIVPQSFLKDDSIDNKVLTRSDKARGKSDNVPSEEVVKKMKNYWRQLLNAKLITQRKFDNLTKAERGGLSELDKAGFIKRQLVETRQITKHVAQILDSRMNTKYDENDKLIREVKVITLKSKLVSDFRKDFQFYKVREINNYHHAHDAYLNAVVGTALIKKYPKLESEFVYGDYKVYDVRKMIAKSEQEIGKATAKYFFYSNIMNFFKTEITLANGEIRKRPLIETNGETGEIVWDKGRDFATVRKVLSMPQVNIVKKTEVQTGGFSKESILPKRNSDKLIARKKDWDPKKYGGFDSPTVAYSVLVVAKVEKGKSKKLKSVKELLGITIMERSSFEKNPIDFLEAKGYKEVKKDLIIKLPKYSLFELENGRKRMLASAGELQKGNELALPSKYVNFLYLASHYEKLKGSPEDNEQKQLFVEQHKHYLDEIIEQISEFSKRVILADANLDKVLSAYNKHRDKPIREQAENIIHLFTLTNLGAPAAFKYFDTTIDRKRYTSTKEVLDATLIHQSITGLYETRIDLSQLGGDGGEAAAKEAAAKEAAAKEAAAKEAAAKEAAAKGGMDLLKPLTVERKGVKIKGYWNSQADITCVPKDLLQGEEPVRQQNVTTIHGTQEGDVYYVNLKIDGRRINTEVIGTTLDYAIITPGDVPWILKKPLELTIKLDLEEQQGTLLNNSILSKKGKEELKQLFEKYSALWQSWENQVGHRRIRPHKIATGTVKPTPQKQYHINPKAKPDIQIVINDLLKQGVLIQKESTMNTPVYPVPKPNGRWRMVLDYRAVNKVTPLIAVQNQHSYGILGSLFKGRYKTTIDLSNGFWAHPIVPEDYWITAFTWQGKQYCWTVLPQGFLNSPGLFNGDVVDLLQGIPNVEVYVDDVYISHDSEKEHLEYLDILFNRLKEAGYIISLKKSNIANSIVDFLGFQITNEGRGLTDTFKEKLENITAPTTLKQLQSILGLLNFARNFIPDFTELIAPLYALIPKSPKNYVPWQIEHSTTLETLITKLNGAEYLQGRKGDKTLIMKVNASYTTGYIRYYNEGEKKPISYVSIVFSKTELKFTELEKLLTTVHKGLLKALDLSMGQNIHVYSPIVSMQNIQKTPQTAKKALASRWLSWLSYLEDPRIRFFYDPQMPALKDLPAVDTGKDNKKHPSNFQHIFYTDGSAITSPTKEGHLNAGMGIVYFINKDGNLQKQQEWSISLGNHTAQFAEIAAFEFALKKCLPLGGNILVVTDSNYVAKAYNEELDVWASNGFVNNRKKPLKHISKWKSVADLKRLRPDVVVTHEPGHQKLDSSPHAYGNNLADQLATQASFKVHAGKRTADGSEFEKRTADGSEFESPKKKAKVE

SEQ ID NO: 6446 - protein, 2192 aa, synthetic construct
MPAAKRVKLDGGDKKYSIGLDIGTNSVGWAVITDEYKVPSKKFKVLGNTDRHSIKKNLIGALLFDSGETAEATRLKRTARRRYTRRKNRICYLQEIFSNEMAKVDDSFFHRLEESFLVEEDKKHERHPIFGNIVDEVAYHEKYPTIYHLRKKLVDSTDKADLRLIYLALAHMIKFRGHFLIEGDLNPDNSDVDKLFIQLVQTYNQLFEENPINASGVDAKAILSARLSKSRRLENLIAQLPGEKKNGLFGNLIALSLGLTPNFKSNFDLAEDAKLQLSKDTYDDDLDNLLAQIGDQYADLFLAAKNLSDAILLSDILRVNTEITKAPLSASMIKRYDEHHQDLTLLKALVRQQLPEKYKEIFFDQSKNGYAGYIDGGASQEEFYKFIKPILEKMDGTEELLVKLNREDLLRKQRTFDNGSIPHQIHLGELHAILRRQEDFYPFLKDNREKIEKILTFRIPYYVGPLARGNSRFAWMTRKSEETITPWNFEEVVDKGASAQSFIERMTNFDKNLPNEKVLPKHSLLYEYFTVYNELTKVKYVTEGMRKPAFLSGEQKKAIVDLLFKTNRKVTVKQLKEDYFKKIECFDSVEISGVEDRFNASLGTYHDLLKIIKDKDFLDNEENEDILEDIVLTLTLFEDREMIEERLKTYAHLFDDKVMKQLKRRRYTGWGRLSRKLINGIRDKQSGKTILDFLKSDGFANRNFMQLIHDDSLTFKEDIQKAQVSGQGDSLHEHIANLAGSPAIKKGILQTVKVVDELVKVMGRHKPENIVIEMARENQTTQKGQKNSRERMKRIEEGIKELGSQILKEHPVENTQLQNEKLYLYYLQNGRDMYVDQELDINRLSDYDVDHIVPQSFLKDDSIDNKVLTRSDKARGKSDNVPSEEVVKKMKNYWRQLLNAKLITQRKFDNLTKAERGGLSELDKAGFIKRQLVETRQITKHVAQILDSRMNTKYDENDKLIREVKVITLKSKLVSDFRKDFQFYKVREINNYHHAHDAYLNAVVGTALIKKYPKLESEFVYGDYKVYDVRKMIAKSEQEIGKATAKYFFYSNIMNFFKTEITLANGEIRKRPLIETNGETGEIVWDKGRDFATVRKVLSMPQVNIVKKTEVQTGGFSKESILPKRNSDKLIARKKDWDPKKYGGFDSPTVAYSVLVVAKVEKGKSKKLKSVKELLGITIMERSSFEKNPIDFLEAKGYKEVKKDLIIKLPKYSLFELENGRKRMLASAGELQKGNELALPSKYVNFLYLASHYEKLKGSPEDNEQKQLFVEQHKHYLDEIIEQISEFSKRVILADANLDKVLSAYNKHRDKPIREQAENIIHLFTLTNLGAPAAFKYFDTTIDRKRYTSTKEVLDATLIHQSITGLYETRIDLSQLGGDGGEAAAKEAAAKEAAAKEAAAKEAAAKEAAAKGGMDLLKPLTVERKGVKIKGYWNSQADITCVPKDLLQGEEPVRQQNVTTIHGTQEGDVYYVNLKIDGRRINTEVIGTTLDYAIITPGDVPWILKKPLELTIKLDLEEQQGTLLNNSILSKKGKEELKQLFEKYSALWQSWENQVGHRRIRPHKIATGTVKPTPQKQYHINPKAKPDIQIVINDLLKQGVLIQKESTMNTPVYPVPKPNGRWRMVLDYRAVNKVTPLIAVQNQHSYGILGSLFKGRYKTTIDLSNGFWAHPIVPEDYWITAFTWQGKQYCWTVLPQGFLNSPGLFNGDVVDLLQGIPNVEVYVDDVYISHDSEKEHLEYLDILFNRLKEAGYIISLKKSNIANSIVDFLGFQITNEGRGLTDTFKEKLENITAPTTLKQLQSILGKLNFARNFIPDFTELIAPLYALIPKSPKNYVPWQIEHSTTLETLITKLNGAEYLQGRKGDKTLIMKVNASYTTGYIRYYNEGEKKPISYVSIVFSKTELKFTELEKLLTTVHKGLLKALDLSMGQNIHVYSPIVSMQNIQKTPQTAKKALASRWLSWLSYLEDPRIRFFYDPQMPALKDLPAVDTGKDNKKHPSNFQHIFYTDGSAITSPTKEGHLNAGMGIVYFINKDGNLQKQQEWSISLGNHTAQFAEIAAFEFALKKCLPLGGNILVVTDSNYVAKAYNEELDVWASNGFVNNRKKPLKHISKWKSVADLKRLRPDVVVTHEPGHQKLDSSPHAYGNNLADQLATQASFKVHAGKRTADGSEFEKRTADGSEFESPKKKAKVE

SEQ ID NO: 6447 - protein, 2195 aa, synthetic construct
MPAAKRVKLDGGDKKYSIGLDIGTNSVGWAVITDEYKVPSKKFKVLGNTDRHSIKKNLIGALLFDSGETAEATRLKRTARRRYTRRKNRICYLQEIFSNEMAKVDDSFFHRLEESFLVEEDKKHERHPIFGNIVDEVAYHEKYPTIYHLRKKLVDSTDKADLRLIYLALAHMIKFRGHFLIEGDLNPDNSDVDKLFIQLVQTYNQLFEENPINASGVDAKAILSARLSKSRRLENLIAQLPGEKKNGLFGNLIALSLGLTPNFKSNFDLAEDAKLQLSKDTYDDDLDNLLAQIGDQYADLFLAAKNLSDAILLSDILRVNTEITKAPLSASMIKRYDEHHQDLTLLKALVRQQLPEKYKEIFFDQSKNGYAGYIDGGASQEEFYKFIKPILEKMDGTEELLVKLNREDLLRKQRTFDNGSIPHQIHLGELHAILRRQEDFYPFLKDNREKIEKILTFRIPYYVGPLARGNSRFAWMTRKSEETITPWNFEEVVDKGASAQSFIERMTNFDKNLPNEKVLPKHSLLYEYFTVYNELTKVKYVTEGMRKPAFLSGEQKKAIVDLLFKTNRKVTVKQLKEDYFKKIECFDSVEISGVEDRFNASLGTYHDLLKIIKDKDFLDNEENEDILEDIVLTLTLFEDREMIEERLKTYAHLFDDKVMKQLKRRRYTGWGRLSRKLINGIRDKQSGKTILDFLKSDGFANRNFMQLIHDDSLTFKEDIQKAQVSGQGDSLHEHIANLAGSPAIKKGILQTVKVVDELVKVMGRHKPENIVIEMARENQTTQKGQKNSRERMKRIEEGIKELGSQILKEHPVENTQLQNEKLYLYYLQNGRDMYVDQELDINRLSDYDVDHIVPQSFLKDDSIDNKVLTRSDKARGKSDNVPSEEVVKKMKNYWRQLLNAKLITQRKFDNLTKAERGGLSELDKAGFIKRQLVETRQITKHVAQILDSRMNTKYDENDKLIREVKVITLKSKLVSDFRKDFQFYKVREINNYHHAHDAYLNAVVGTALIKKYPKLESEFVYGDYKVYDVRKMIAKSEQEIGKATAKYFFYSNIMNFFKTEITLANGEIRKRPLIETNGETGEIVWDKGRDFATVRKVLSMPQVNIVKKTEVQTGGFSKESILPKRNSDKLIARKKDWDPKKYGGFDSPTVAYSVLVVAKVEKGKSKKLKSVKELLGITIMERSSFEKNPIDFLEAKGYKEVKKDLIIKLPKYSLFELENGRKRMLASAGELQKGNELALPSKYVNFLYLASHYEKLKGSPEDNEQKQLFVEQHKHYLDEIIEQISEFSKRVILADANLDKVLSAYNKHRDKPIREQAENIIHLFTLTNLGAPAAFKYFDTTIDRKRYTSTKEVLDATLIHQSITGLYETRIDLSQLGGDGGEAAAKEAAAKEAAAKEAAAKEAAAKEAAAKGGMNPLQLLQPLPAEIKGTKLLAHWNSGATITCIPESFLEDEQPIKKTLIKTIHGEKQQNVYYVTFKVKGRKVEAEVIASPYEYILLSPTDVPWLTQQPLQLTILVPLQEYQEKILSKTALPEDQKQQLKTLFVKYDNLWQHWENQVGHRKIRPHNIATGDYPPRPQKQYPINPKAKPSIQIVIDDLLKQGVLTPQNSTMNTPVYPVPKPDGRWRMVLDYREVNKTIPLTAAQNQHSAGILATIVRQKYKTTLDLANGFWAHPITPESYWLTAFTWQGKQYCWTRLPQGFLNSPALFTADVVDLLKEIPNVQVYVDDIYLSHDDPKEHVQQLEKVFQILLQAGYVVSLKKSEIGQKTVEFLGFNITKEGRGLTDTFKTKLLNITPPKDLKQLQSILGLLNFARNFIPNFAELVQPLYNLIASAKGKYIEWSEENTKQLNMVIEALNTASNLEERLPEQRLVIKVNTSPSAGYVRYYNETGKKPIMYLNYVFSKAELKFSMLEKLLTTMHKALIKAMDLAMGQEILVYSPIVSMTKIQKTPLPERKALPIRWITWMTYLEDPRIQFHYDKTLPELKHIPDVYTSSQSPVKHPSQYEGVFYTDGSAIKSPDPTKSNNAGMGIVHATYKPEYQVLNQWSIPLGNHTAQMAEIAAVEFACKKALKIPGPVLVITDSFYVAESANKELPYWKSNGFVNNKKKPLKHISKWKSIAECLSMKPDITIQHEKGISLQIPVFILKGNALADKLATQGSYVVNAGKRTADGSEFEKRTADGSEFESPKKKAKVE

SEQ ID NO: 6448 - protein, 2106 aa, synthetic construct
MPAAKRVKLDGGDKKYSIGLDIGTNSVGWAVITDEYKVPSKKFKVLGNTDRHSIKKNLIGALLFDSGETAEATRLKRTARRRYTRRKNRICYLQEIFSNEMAKVDDSFFHRLEESFLVEEDKKHERHPIFGNIVDEVAYHEKYPTIYHLRKKLVDSTDKADLRLIYLALAHMIKFRGHFLIEGDLNPDNSDVDKLFIQLVQTYNQLFEENPINASGVDAKAILSARLSKSRRLENLIAQLPGEKKNGLFGNLIALSLGLTPNFKSNFDLAEDAKLQLSKDTYDDDLDNLLAQIGDQYADLFLAAKNLSDAILLSDILRVNTEITKAPLSASMIKRYDEHHQDLTLLKALVRQQLPEKYKEIFFDQSKNGYAGYIDGGASQEEFYKFIKPILEKMDGTEELLVKLNREDLLRKQRTFDNGSIPHQIHLGELHAILRRQEDFYPFLKDNREKIEKILTFRIPYYVGPLARGNSRFAWMTRKSEETITPWNFEEVVDKGASAQSFIERMTNFDKNLPNEKVLPKHSLLYEYFTVYNELTKVKYVTEGMRKPAFLSGEQKKAIVDLLFKTNRKVTVKQLKEDYFKKIECFDSVEISGVEDRFNASLGTYHDLLKIIKDKDFLDNEENEDILEDIVLTLTLFEDREMIEERLKTYAHLFDDKVMKQLKRRRYTGWGRLSRKLINGIRDKQSGKTILDFLKSDGFANRNFMQLIHDDSLTFKEDIQKAQVSGQGDSLHEHIANLAGSPAIKKGILQTVKVVDELVKVMGRHKPENIVIEMARENQTTQKGQKNSRERMKRIEEGIKELGSQILKEHPVENTQLQNEKLYLYYLQNGRDMYVDQELDINRLSDYDVDHIVPQSFLKDDSIDNKVLTRSDKARGKSDNVPSEEVVKKMKNYWRQLLNAKLITQRKFDNLTKAERGGLSELDKAGFIKRQLVETRQITKHVAQILDSRMNTKYDENDKLIREVKVITLKSKLVSDFRKDFQFYKVREINNYHHAHDAYLNAVVGTALIKKYPKLESEFVYGDYKVYDVRKMIAKSEQEIGKATAKYFFYSNIMNFFKTEITLANGEIRKRPLIETNGETGEIVWDKGRDFATVRKVLSMPQVNIVKKTEVQTGGFSKESILPKRNSDKLIARKKDWDPKKYGGFDSPTVAYSVLVVAKVEKGKSKKLKSVKELLGITIMERSSFEKNPIDFLEAKGYKEVKKDLIIKLPKYSLFELENGRKRMLASAGELQKGNELALPSKYVNFLYLASHYEKLKGSPEDNEQKQLFVEQHKHYLDEIIEQISEFSKRVILADANLDKVLSAYNKHRDKPIREQAENIIHLFTLTNLGAPAAFKYFDTTIDRKRYTSTKEVLDATLIHQSITGLYETRIDLSQLGGDGGEAAAKEAAAKEAAAKEAAAKEAAAKEAAAKGGVPWLTQQPLQLTILVPLQEYQEKILSKTALPEDQKQQLKTLFVKYDNLWQHWENQVGHRKIRPHNIATGDYPPRPQKQYPINPKAKPSIQIVIDDLLKQGVLTPQNSTMNTPVYPVPKPDGRWRMVLDYREVNKTIPLTAAQNQHSAGILATIVRQKYKTTLDLANGFWAHPITPESYWLTAFTWQGKQYCWTRLPQGFLNSPALFNADVVDLLKEIPNVQVYVDDIYLSHDDPKEHVQQLEKVFQILLQAGYVVSLKKSEIGQKTVEFLGFNITKEGRGLTDTFKTKLLNITPPKDLKQLQSILGKLNFARNFIPNFAELVQPLYNLIAPAKGKYIEWSEENTKQLNMVIEALNTASNLEERLPEQRLVIKVNTSPSAGYVRYYNETGKKPIMYLNYVFSKAELKFSMLEKLLTTMHKALIKAMDLAMGQEILVYSPIVSMTKIQKTPLPERKALPIRWITWMTYLEDPRIQFHYDKTLPELKHIPDVYTSSQSPVKHPSQYEGVFYTDGSAIKSPDPTKSNNAGMGIVHATYKPEYQVLNQWSIPLGNHTAQMAEIAAVEFACKKALKIPGPVLVITDSFYVAESANKELPYWKSNGFVNNKKKPLKHISKWKSIAECLSMKPDITIQHEKGISLQIPVFILKGNALADKLATQGSYVVNAGKRTADGSEFEKRTADGSEFESPKKKAKVE

SEQ ID NO: 6449 - protein, 2195 aa, synthetic construct
MPAAKRVKLDGGDKKYSIGLDIGTNSVGWAVITDEYKVPSKKFKVLGNTDRHSIKKNLIGALLFDSGETAEATRLKRTARRRYTRRKNRICYLQEIFSNEMAKVDDSFFHRLEESFLVEEDKKHERHPIFGNIVDEVAYHEKYPTIYHLRKKLVDSTDKADLRLIYLALAHMIKFRGHFLIEGDLNPDNSDVDKLFIQLVQTYNQLFEENPINASGVDAKAILSARLSKSRRLENLIAQLPGEKKNGLFGNLIALSLGLTPNFKSNFDLAEDAKLQLSKDTYDDDLDNLLAQIGDQYADLFLAAKNLSDAILLSDILRVNTEITKAPLSASMIKRYDEHHQDLTLLKALVRQQLPEKYKEIFFDQSKNGYAGYIDGGASQEEFYKFIKPILEKMDGTEELLVKLNREDLLRKQRTFDNGSIPHQIHLGELHAILRRQEDFYPFLKDNREKIEKILTFRIPYYVGPLARGNSRFAWMTRKSEETITPWNFEEVVDKGASAQSFIERMTNFDKNLPNEKVLPKHSLLYEYFTVYNELTKVKYVTEGMRKPAFLSGEQKKAIVDLLFKTNRKVTVKQLKEDYFKKIECFDSVEISGVEDRFNASLGTYHDLLKIIKDKDFLDNEENEDILEDIVLTLTLFEDREMIEERLKTYAHLFDDKVMKQLKRRRYTGWGRLSRKLINGIRDKQSGKTILDFLKSDGFANRNFMQLIHDDSLTFKEDIQKAQVSGQGDSLHEHIANLAGSPAIKKGILQTVKVVDELVKVMGRHKPENIVIEMARENQTTQKGQKNSRERMKRIEEGIKELGSQILKEHPVENTQLQNEKLYLYYLQNGRDMYVDQELDINRLSDYDVDHIVPQSFLKDDSIDNKVLTRSDKARGKSDNVPSEEVVKKMKNYWRQLLNAKLITQRKFDNLTKAERGGLSELDKAGFIKRQLVETRQITKHVAQILDSRMNTKYDENDKLIREVKVITLKSKLVSDFRKDFQFYKVREINNYHHAHDAYLNAVVGTALIKKYPKLESEFVYGDYKVYDVRKMIAKSEQEIGKATAKYFFYSNIMNFFKTEITLANGEIRKRPLIETNGETGEIVWDKGRDFATVRKVLSMPQVNIVKKTEVQTGGFSKESILPKRNSDKLIARKKDWDPKKYGGFDSPTVAYSVLVVAKVEKGKSKKLKSVKELLGITIMERSSFEKNPIDFLEAKGYKEVKKDLIIKLPKYSLFELENGRKRMLASAGELQKGNELALPSKYVNFLYLASHYEKLKGSPEDNEQKQLFVEQHKHYLDEIIEQISEFSKRVILADANLDKVLSAYNKHRDKPIREQAENIIHLFTLTNLGAPAAFKYFDTTIDRKRYTSTKEVLDATLIHQSITGLYETRIDLSQLGGDGGEAAAKEAAAKEAAAKEAAAKEAAAKEAAAKGGMNPLQLLQPLPAEIKGTKLLAHWNSGATITCIPESFLEDEQPIKKTLIKTIHGEKQQNVYYVTFKVKGRKVEAEVIASPYEYILLSPTDVPWLTQQPLQLTILVPLQEYQEKILSKTALPEDQKQQLKTLFVKYDNLWQHWENQVGHRKIRPHNIATGDYPPRPQKQYPINPKAKPSIQIVIDDLLKQGVLTPQNSTMNTPVYPVPKPDGRWRMVLDYREVNKTIPLTAAQNQHSAGILATIVRQKYKTTLDLANGFWAHPITPESYWLTAFTWQGKQYCWTRLPQGFLNSPALFNADVVDLLKEIPNVQVYVDDIYLSHDDPKEHVQQLEKVFQILLQAGYVVSLKKSEIGQKTVEFLGFNITKEGRGLTDTFKTKLLNITPPKDLKQLQSILGLLNFARNFIPNFAELVQPLYNLIAPAKGKYIEWSEENTKQLNMVIEALNTASNLEERLPEQRLVIKVNTSPSAGYVRYYNETGKKPIMYLNYVFSKAELKFSMLEKLLTTMHKALIKAMDLAMGQEILVYSPIVSMTKIQKTPLPERKALPIRWITWMTYLEDPRIQFHYDKTLPELKHIPDVYTSSQSPVKHPSQYEGVFYTDGSAIKSPDPTKSNNAGMGIVHATYKPEYQVLNQWSIPLGNHTAQMAEIAAVEFACKKALKIPGPVLVITDSFYVAESANKELPYWKSNGFVNNKKKPLKHISKWKSIAECLSMKPDITIQHEKGISLQIPVFILKGNALADKLATQGSYVVNAGKRTADGSEFEKRTADGSEFESPKKKAKVE

SEQ ID NO: 6450 - protein, 2113 aa, synthetic construct
MPAAKRVKLDGGDKKYSIGLDIGTNSVGWAVITDEYKVPSKKFKVLGNTDRHSIKKNLIGALLFDSGETAEATRLKRTARRRYTRRKNRICYLQEIFSNEMAKVDDSFFHRLEESFLVEEDKKHERHPIFGNIVDEVAYHEKYPTIYHLRKKLVDSTDKADLRLIYLALAHMIKFRGHFLIEGDLNPDNSDVDKLFIQLVQTYNQLFEENPINASGVDAKAILSARLSKSRRLENLIAQLPGEKKNGLFGNLIALSLGLTPNFKSNFDLAEDAKLQLSKDTYDDDLDNLLAQIGDQYADLFLAAKNLSDAILLSDILRVNTEITKAPLSASMIKRYDEHHQDLTLLKALVRQQLPEKYKEIFFDQSKNGYAGYIDGGASQEEFYKFIKPILEKMDGTEELLVKLNREDLLRKQRTFDNGSIPHQIHLGELHAILRRQEDFYPFLKDNREKIEKILTFRIPYYVGPLARGNSRFAWMTRKSEETITPWNFEEVVDKGASAQSFIERMTNFDKNLPNEKVLPKHSLLYEYFTVYNELTKVKYVTEGMRKPAFLSGEQKKAIVDLLFKTNRKVTVKQLKEDYFKKIECFDSVEISGVEDRFNASLGTYHDLLKIIKDKDFLDNEENEDILEDIVLTLTLFEDREMIEERLKTYAHLFDDKVMKQLKRRRYTGWGRLSRKLINGIRDKQSGKTILDFLKSDGFANRNFMQLIHDDSLTFKEDIQKAQVSGQGDSLHEHIANLAGSPAIKKGILQTVKVVDELVKVMGRHKPENIVIEMARENQTTQKGQKNSRERMKRIEEGIKELGSQILKEHPVENTQLQNEKLYLYYLQNGRDMYVDQELDINRLSDYDVDHIVPQSFLKDDSIDNKVLTRSDKARGKSDNVPSEEVVKKMKNYWRQLLNAKLITQRKFDNLTKAERGGLSELDKAGFIKRQLVETRQITKHVAQILDSRMNTKYDENDKLIREVKVITLKSKLVSDFRKDFQFYKVREINNYHHAHDAYLNAVVGTALIKKYPKLESEFVYGDYKVYDVRKMIAKSEQEIGKATAKYFFYSNIMNFFKTEITLANGEIRKRPLIETNGETGEIVWDKGRDFATVRKVLSMPQVNIVKKTEVQTGGFSKESILPKRNSDKLIARKKDWDPKKYGGFDSPTVAYSVLVVAKVEKGKSKKLKSVKELLGITIMERSSFEKNPIDFLEAKGYKEVKKDLIIKLPKYSLFELENGRKRMLASAGELQKGNELALPSKYVNFLYLASHYEKLKGSPEDNEQKQLFVEQHKHYLDEIIEQISEFSKRVILADANLDKVLSAYNKHRDKPIREQAENIIHLFTLTNLGAPAAFKYFDTTIDRKRYTSTKEVLDATLIHQSITGLYETRIDLSQLGGDGGEAAAKEAAAKEAAAKEAAAKEAAAKEAAAKGGVLNLEEEYRLHEKPVPSSIDPSWLQLFPTVWAERAGMGLANQVPPVVVELRSGASPVAVRQYPMSKEAREGIRPHIQKFLDLGVLVPCRSPWNTPLLPVKKPGTNDYRPVQDLREINKRVQDIHPTVPNPYNLLSSLPPSYTWYSVLDLKDAFFCLRLHPNSQPLFAFEWKDPEKGNTGQLTWTRLPQGFKNSPTLFDEALHRDLAPFRALNPQVVLLQYVDDLLVAAPTYEDCKKGTQKLLQELSKLGYRVSAKKAQLCQREVTYLGYLLKEGKRWLTPARKATVMKIPVPTTPRQVREFLGTAGFCRLWIPGFASLAAPLYPLTKESIPFIWTEEHQQAFDHIKKALLSAPALALPDLTKPFTLYIDERAGVARGVLTQTLGPWRRPVAYLSKKLDPVASGWPTCLKAVAAVALLLKDADKLTLGQNVTVIASHSLESIVRQPPDRWMTNARMTHYQSLLLNERVSFAPPAVLNPATLLPVESEATPVHRCSEILAEETGTRRDLEDQPLPGVPTWYTDGSSFITEGKRRAGAPIVDGKRTVWASSLPEGTSAQKAELVALTQALRLAEGKNINIYTDSRYAFATAHIHGAIYKQRGLLTSAGKDIKNKEEILALLEAIHLPRRVAIIHCPGHQRGSNPVATGNRRADEAAKQAALSTRVLAGTTKPAGKRTADGSEFEKRTADGSEFESPKKKAKVE

SEQ ID NO: 6451 - protein, 2113 aa, synthetic construct
MPAAKRVKLDGGDKKYSIGLDIGTNSVGWAVITDEYKVPSKKFKVLGNTDRHSIKKNLIGALLFDSGETAEATRLKRTARRRYTRRKNRICYLQEIFSNEMAKVDDSFFHRLEESFLVEEDKKHERHPIFGNIVDEVAYHEKYPTIYHLRKKLVDSTDKADLRLIYLALAHMIKFRGHFLIEGDLNPDNSDVDKLFIQLVQTYNQLFEENPINASGVDAKAILSARLSKSRRLENLIAQLPGEKKNGLFGNLIALSLGLTPNFKSNFDLAEDAKLQLSKDTYDDDLDNLLAQIGDQYADLFLAAKNLSDAILLSDILRVNTEITKAPLSASMIKRYDEHHQDLTLLKALVRQQLPEKYKEIFFDQSKNGYAGYIDGGASQEEFYKFIKPILEKMDGTEELLVKLNREDLLRKQRTFDNGSIPHQIHLGELHAILRRQEDFYPFLKDNREKIEKILTFRIPYYVGPLARGNSRFAWMTRKSEETITPWNFEEVVDKGASAQSFIERMTNFDKNLPNEKVLPKHSLLYEYFTVYNELTKVKYVTEGMRKPAFLSGEQKKAIVDLLFKTNRKVTVKQLKEDYFKKIECFDSVEISGVEDRFNASLGTYHDLLKIIKDKDFLDNEENEDILEDIVLTLTLFEDREMIEERLKTYAHLFDDKVMKQLKRRRYTGWGRLSRKLINGIRDKQSGKTILDFLKSDGFANRNFMQLIHDDSLTFKEDIQKAQVSGQGDSLHEHIANLAGSPAIKKGILQTVKVVDELVKVMGRHKPENIVIEMARENQTTQKGQKNSRERMKRIEEGIKELGSQILKEHPVENTQLQNEKLYLYYLQNGRDMYVDQELDINRLSDYDVDHIVPQSFLKDDSIDNKVLTRSDKARGKSDNVPSEEVVKKMKNYWRQLLNAKLITQRKFDNLTKAERGGLSELDKAGFIKRQLVETRQITKHVAQILDSRMNTKYDENDKLIREVKVITLKSKLVSDFRKDFQFYKVREINNYHHAHDAYLNAVVGTALIKKYPKLESEFVYGDYKVYDVRKMIAKSEQEIGKATAKYFFYSNIMNFFKTEITLANGEIRKRPLIETNGETGEIVWDKGRDFATVRKVLSMPQVNIVKKTEVQTGGFSKESILPKRNSDKLIARKKDWDPKKYGGFDSPTVAYSVLVVAKVEKGKSKKLKSVKELLGITIMERSSFEKNPIDFLEAKGYKEVKKDLIIKLPKYSLFELENGRKRMLASAGELQKGNELALPSKYVNFLYLASHYEKLKGSPEDNEQKQLFVEQHKHYLDEIIEQISEFSKRVILADANLDKVLSAYNKHRDKPIREQAENIIHLFTLTNLGAPAAFKYFDTTIDRKRYTSTKEVLDATLIHQSITGLYETRIDLSQLGGDGGEAAAKEAAAKEAAAKEAAAKEAAAKEAAAKGGVLNLEEEYRLHEKPVPSSIDPSWLQLFPTVWAERAGMGLANQVPPVVVELRSGASPVAVRQYPMSKEAREGIRPHIQKFLDLGVLVPCRSPWNTPLLPVKKPGTNDYRPVQDLREINKRVQDIHPTVPNPYNLLSSLPPSYTWYSVLDLKDAFFCLRLHPNSQPLFAFEWKDPEKGNTGQLTWTRLPQGFKNSPTLFNEALHRDLAPFRALNPQVVLLQYVDDLLVAAPTYEDCKKGTQKLLQELSKLGYRVSAKKAQLCQREVTYLGYLLKEGKRWLTPARKATVMKIPVPTTPRQVREFLGTAGFCRLWIPGFASLAAPLYPLTKPSIPFIWTEEHQQAFDHIKKALLSAPALALPDLTKPFTLYIDERAGVARGVLTQTLGPWRRPVAYLSKKLDPVASGWPTCLKAVAAVALLLKDADKLTLGQNVTVIASHSLESIVRQPPDRWMTNARMTHYQSLLLNERVSFAPPAVLNPATLLPVESEATPVHRCSEILAEETGTRRDLEDQPLPGVPTWYTDGSSFITEGKRRAGAPIVDGKRTVWASSLPEGTSAQKAELVALTQALRLAEGKNINIYTDSRYAFATAHIHGAIYKQRGWLTSAGKDIKNKEEILALLEAIHLPRRVAIIHCPGHQRGSNPVATGNRRADEAAKQAALSTRVLAGTTKPAGKRTADGSEFEKRTADGSEFESPKKKAKVE

SEQ ID NO: 6452 - protein, 2237 aa, synthetic construct
MPAAKRVKLDGGDKKYSIGLDIGTNSVGWAVITDEYKVPSKKFKVLGNTDRHSIKKNLIGALLFDSGETAEATRLKRTARRRYTRRKNRICYLQEIFSNEMAKVDDSFFHRLEESFLVEEDKKHERHPIFGNIVDEVAYHEKYPTIYHLRKKLVDSTDKADLRLIYLALAHMIKFRGHFLIEGDLNPDNSDVDKLFIQLVQTYNQLFEENPINASGVDAKAILSARLSKSRRLENLIAQLPGEKKNGLFGNLIALSLGLTPNFKSNFDLAEDAKLQLSKDTYDDDLDNLLAQIGDQYADLFLAAKNLSDAILLSDILRVNTEITKAPLSASMIKRYDEHHQDLTLLKALVRQQLPEKYKEIFFDQSKNGYAGYIDGGASQEEFYKFIKPILEKMDGTEELLVKLNREDLLRKQRTFDNGSIPHQIHLGELHAILRRQEDFYPFLKDNREKIEKILTFRIPYYVGPLARGNSRFAWMTRKSEETITPWNFEEVVDKGASAQSFIERMTNFDKNLPNEKVLPKHSLLYEYFTVYNELTKVKYVTEGMRKPAFLSGEQKKAIVDLLFKTNRKVTVKQLKEDYFKKIECFDSVEISGVEDRFNASLGTYHDLLKIIKDKDFLDNEENEDILEDIVLTLTLFEDREMIEERLKTYAHLFDDKVMKQLKRRRYTGWGRLSRKLINGIRDKQSGKTILDFLKSDGFANRNFMQLIHDDSLTFKEDIQKAQVSGQGDSLHEHIANLAGSPAIKKGILQTVKVVDELVKVMGRHKPENIVIEMARENQTTQKGQKNSRERMKRIEEGIKELGSQILKEHPVENTQLQNEKLYLYYLQNGRDMYVDQELDINRLSDYDVDHIVPQSFLKDDSIDNKVLTRSDKARGKSDNVPSEEVVKKMKNYWRQLLNAKLITQRKFDNLTKAERGGLSELDKAGFIKRQLVETRQITKHVAQILDSRMNTKYDENDKLIREVKVITLKSKLVSDFRKDFQFYKVREINNYHHAHDAYLNAVVGTALIKKYPKLESEFVYGDYKVYDVRKMIAKSEQEIGKATAKYFFYSNIMNFFKTEITLANGEIRKRPLIETNGETGEIVWDKGRDFATVRKVLSMPQVNIVKKTEVQTGGFSKESILPKRNSDKLIARKKDWDPKKYGGFDSPTVAYSVLVVAKVEKGKSKKLKSVKELLGITIMERSSFEKNPIDFLEAKGYKEVKKDLIIKLPKYSLFELENGRKRMLASAGELQKGNELALPSKYVNFLYLASHYEKLKGSPEDNEQKQLFVEQHKHYLDEIIEQISEFSKRVILADANLDKVLSAYNKHRDKPIREQAENIIHLFTLTNLGAPAAFKYFDTTIDRKRYTSTKEVLDATLIHQSITGLYETRIDLSQLGGDGGEAAAKEAAAKEAAAKEAAAKEAAAKEAAAKGGTLGDQGSRGSDPLPEPRVTLTVEGIPTEFLVNTGAEHSVLTKPMGKMGSKRTVVAGATGSKVYPWTTKRLLKIGQKQVTHSFLVIPECPAPLLGRDLLTKLKAQIQFSTEGPQVTWEDRPAMCLVLNLEEEYRLHEKPVPPSIDPSWLQLFPMVWAEKAGMGLANQVPPVVVELKSDASPVAVRQYPMSKEAREGIRPHIQRFLDLGILVPCQSPWNTPLLPVKKPGTNDYRPVQDLREVNKRVQDIHPTVPNPYNLLSSLPPSHTWYSVLDLKDAFFCLKLHPNSQPLFAFEWRDPEKGNTGQLTWTRLPQGFKNSPTLFDEALHRDLASFRALNPQVVMLQYVDDLLVAAPTYRDCKEGTRRLLQELSKLGYRVSAKKAQLCREEVTYLGYLLKGGKRWLTPARKATVMKIPTPTTPRQVREFLGTAGFCRLWIPGFASLAAPLYPLTREKVPFTWTEAHQEAFGRIKEALLSAPALALPDLTKPFALYVDEKEGVARGVLTQTLGPWRRPVAYLSKKLDPVASGWPTCLKAIAAVALLLKDADKLTLGQNVLVIAPHNLESIVRQPPDRWMTNARMTHYQSLLLNERVSFAPPAILNPATLLPVESDDTPIHICSEILAEETGTRPDLRDQPLPGVPAWYTDGSSFIMDGRRQAGAAIVDNKRTVWASNLPEGTSAQKAELIALTQALRLAEGKSINIYTDSRYAFATAHVHGAIYKQRGLLTSAGKDIKNKEEILALLEAIHLPKRVAIIHCPGHQRGTDPVATGNRKADEAAKQAAQSTRILTETTKNAGKRTADGSEFEKRTADGSEFESPKKKAKVE

SEQ ID NO: 6453 - protein, 2237 aa, synthetic construct
MPAAKRVKLDGGDKKYSIGLDIGTNSVGWAVITDEYKVPSKKFKVLGNTDRHSIKKNLIGALLFDSGETAEATRLKRTARRRYTRRKNRICYLQEIFSNEMAKVDDSFFHRLEESFLVEEDKKHERHPIFGNIVDEVAYHEKYPTIYHLRKKLVDSTDKADLRLIYLALAHMIKFRGHFLIEGDLNPDNSDVDKLFIQLVQTYNQLFEENPINASGVDAKAILSARLSKSRRLENLIAQLPGEKKNGLFGNLIALSLGLTPNFKSNFDLAEDAKLQLSKDTYDDDLDNLLAQIGDQYADLFLAAKNLSDAILLSDILRVNTEITKAPLSASMIKRYDEHHQDLTLLKALVRQQLPEKYKEIFFDQSKNGYAGYIDGGASQEEFYKFIKPILEKMDGTEELLVKLNREDLLRKQRTFDNGSIPHQIHLGELHAILRRQEDFYPFLKDNREKIEKILTFRIPYYVGPLARGNSRFAWMTRKSEETITPWNFEEVVDKGASAQSFIERMTNFDKNLPNEKVLPKHSLLYEYFTVYNELTKVKYVTEGMRKPAFLSGEQKKAIVDLLFKTNRKVTVKQLKEDYFKKIECFDSVEISGVEDRFNASLGTYHDLLKIIKDKDFLDNEENEDILEDIVLTLTLFEDREMIEERLKTYAHLFDDKVMKQLKRRRYTGWGRLSRKLINGIRDKQSGKTILDFLKSDGFANRNFMQLIHDDSLTFKEDIQKAQVSGQGDSLHEHIANLAGSPAIKKGILQTVKVVDELVKVMGRHKPENIVIEMARENQTTQKGQKNSRERMKRIEEGIKELGSQILKEHPVENTQLQNEKLYLYYLQNGRDMYVDQELDINRLSDYDVDHIVPQSFLKDDSIDNKVLTRSDKARGKSDNVPSEEVVKKMKNYWRQLLNAKLITQRKFDNLTKAERGGLSELDKAGFIKRQLVETRQITKHVAQILDSRMNTKYDENDKLIREVKVITLKSKLVSDFRKDFQFYKVREINNYHHAHDAYLNAVVGTALIKKYPKLESEFVYGDYKVYDVRKMIAKSEQEIGKATAKYFFYSNIMNFFKTEITLANGEIRKRPLIETNGETGEIVWDKGRDFATVRKVLSMPQVNIVKKTEVQTGGFSKESILPKRNSDKLIARKKDWDPKKYGGFDSPTVAYSVLVVAKVEKGKSKKLKSVKELLGITIMERSSFEKNPIDFLEAKGYKEVKKDLIIKLPKYSLFELENGRKRMLASAGELQKGNELALPSKYVNFLYLASHYEKLKGSPEDNEQKQLFVEQHKHYLDEIIEQISEFSKRVILADANLDKVLSAYNKHRDKPIREQAENIIHLFTLTNLGAPAAFKYFDTTIDRKRYTSTKEVLDATLIHQSITGLYETRIDLSQLGGDGGEAAAKEAAAKEAAAKEAAAKEAAAKEAAAKGGTLGDQGSRGSDPLPEPRVTLTVEGIPTEFLVNTGAEHSVLTKPMGKMGSKRTVVAGATGSKVYPWTTKRLLKIGQKQVTHSFLVIPECPAPLLGRDLLTKLKAQIQFSTEGPQVTWEDRPAMCLVLNLEEEYRLHEKPVPPSIDPSWLQLFPMVWAEKAGMGLANQVPPVVVELKSDASPVAVRQYPMSKEAREGIRPHIQRFLDLGILVPCQSPWNTPLLPVKKPGTNDYRPVQDLREVNKRVQDIHPTVPNPYNLLSSLPPSHTWYSVLDLKDAFFCLKLHPNSQPLFAFEWRDPEKGNTGQLTWTRLPQGFKNSPTLFNEALHRDLASFRALNPQVVMLQYVDDLLVAAPTYRDCKEGTRRLLQELSKLGYRVSAKKAQLCREEVTYLGYLLKGGKRWLTPARKATVMKIPTPTTPRQVREFLGTAGFCRLWIPGFASLAAPLYPLTRPKVPFTWTEAHQEAFGRIKEALLSAPALALPDLTKPFALYVDEKEGVARGVLTQTLGPWRRPVAYLSKKLDPVASGWPTCLKAIAAVALLLKDADKLTLGQNVLVIAPHNLESIVRQPPDRWMTNARMTHYQSLLLNERVSFAPPAILNPATLLPVESDDTPIHICSEILAEETGTRPDLRDQPLPGVPAWYTDGSSFIMDGRRQAGAAIVDNKRTVWASNLPEGTSAQKAELIALTQALRLAEGKSINIYTDSRYAFATAHVHGAIYKQRGWLTSAGKDIKNKEEILALLEAIHLPKRVAIIHCPGHQRGTDPVATGNRKADEAAKQAAQSTRILTETTKNAGKRTADGSEFEKRTADGSEFESPKKKAKVE

SEQ ID NO: 6454 - protein, 2115 aa, synthetic construct
MPAAKRVKLDGGDKKYSIGLDIGTNSVGWAVITDEYKVPSKKFKVLGNTDRHSIKKNLIGALLFDSGETAEATRLKRTARRRYTRRKNRICYLQEIFSNEMAKVDDSFFHRLEESFLVEEDKKHERHPIFGNIVDEVAYHEKYPTIYHLRKKLVDSTDKADLRLIYLALAHMIKFRGHFLIEGDLNPDNSDVDKLFIQLVQTYNQLFEENPINASGVDAKAILSARLSKSRRLENLIAQLPGEKKNGLFGNLIALSLGLTPNFKSNFDLAEDAKLQLSKDTYDDDLDNLLAQIGDQYADLFLAAKNLSDAILLSDILRVNTEITKAPLSASMIKRYDEHHQDLTLLKALVRQQLPEKYKEIFFDQSKNGYAGYIDGGASQEEFYKFIKPILEKMDGTEELLVKLNREDLLRKQRTFDNGSIPHQIHLGELHAILRRQEDFYPFLKDNREKIEKILTFRIPYYVGPLARGNSRFAWMTRKSEETITPWNFEEVVDKGASAQSFIERMTNFDKNLPNEKVLPKHSLLYEYFTVYNELTKVKYVTEGMRKPAFLSGEQKKAIVDLLFKTNRKVTVKQLKEDYFKKIECFDSVEISGVEDRFNASLGTYHDLLKIIKDKDFLDNEENEDILEDIVLTLTLFEDREMIEERLKTYAHLFDDKVMKQLKRRRYTGWGRLSRKLINGIRDKQSGKTILDFLKSDGFANRNFMQLIHDDSLTFKEDIQKAQVSGQGDSLHEHIANLAGSPAIKKGILQTVKVVDELVKVMGRHKPENIVIEMARENQTTQKGQKNSRERMKRIEEGIKELGSQILKEHPVENTQLQNEKLYLYYLQNGRDMYVDQELDINRLSDYDVDHIVPQSFLKDDSIDNKVLTRSDKARGKSDNVPSEEVVKKMKNYWRQLLNAKLITQRKFDNLTKAERGGLSELDKAGFIKRQLVETRQITKHVAQILDSRMNTKYDENDKLIREVKVITLKSKLVSDFRKDFQFYKVREINNYHHAHDAYLNAVVGTALIKKYPKLESEFVYGDYKVYDVRKMIAKSEQEIGKATAKYFFYSNIMNFFKTEITLANGEIRKRPLIETNGETGEIVWDKGRDFATVRKVLSMPQVNIVKKTEVQTGGFSKESILPKRNSDKLIARKKDWDPKKYGGFDSPTVAYSVLVVAKVEKGKSKKLKSVKELLGITIMERSSFEKNPIDFLEAKGYKEVKKDLIIKLPKYSLFELENGRKRMLASAGELQKGNELALPSKYVNFLYLASHYEKLKGSPEDNEQKQLFVEQHKHYLDEIIEQISEFSKRVILADANLDKVLSAYNKHRDKPIREQAENIIHLFTLTNLGAPAAFKYFDTTIDRKRYTSTKEVLDATLIHQSITGLYETRIDLSQLGGDGGEAAAKEAAAKEAAAKEAAAKEAAAKEAAAKGGTLNLEDEYRLYETSAEPEVSPGSTWLSDFPQAWAETGGMGLAVRQAPLIIPLKATSTPVSIKQYPMSQEAKLGIKPHIQRLLDQGILVPCQSPWNTPLLPVKKPGTNDYRPVQDLREVNKRVEDIHPTVPNPYNLLSGLPPSHRWYTVLDLKDAFFCLRLHPTSQPLFAFEWRDPGMGISGQLTWTRLPQGFKNSPTLFNEALHRDLADFRIQHPDLILLQYVDDILLAATSELDCQQGTRALLLTLGNLGYRASAKKAQLCQKQVKYLGYLLKEGQRWLTEARKETVMGQPTPKTPRQLREFLGTAGFCRLWIPGFAEMAAPLYPLTKPGTLFNWGPDQQKAYQEIKQALLTAPALGLPDLTKPFELFVDEKQGYAKGVLTQKLGPWRRPVAYLSKKLDPVAAGWPPCLRMVAAIAVLRKDAGKLTMGQPLVILAPHAVEALVKQPPDRWLSNARMTHYQAMLLDTDRVQFGPVVALNPATLLPLPEEGAPHDCLEILAETHGTRPDLTDQPIPDADHTWYTDGSSFLQEGQRKAGAAVTTETEVIWARALPAGTSAQRAELIALTQALKMAEGKRLNVYTDSRYAFATAHIHGEIYRRRGWLTSEGREIKNKSEILALLKALFLPKRLSIIHCLGHQKGDSAEARGNRLADQAAREAAIKTPPDTSTLLAGKRTADGSEFEKRTADGSEFESPKKKAKVE

SEQ ID NO: 6455 - protein, 2115 aa, synthetic construct
MPAAKRVKLDGGDKKYSIGLDIGTNSVGWAVITDEYKVPSKKFKVLGNTDRHSIKKNLIGALLFDSGETAEATRLKRTARRRYTRRKNRICYLQEIFSNEMAKVDDSFFHRLEESFLVEEDKKHERHPIFGNIVDEVAYHEKYPTIYHLRKKLVDSTDKADLRLIYLALAHMIKFRGHFLIEGDLNPDNSDVDKLFIQLVQTYNQLFEENPINASGVDAKAILSARLSKSRRLENLIAQLPGEKKNGLFGNLIALSLGLTPNFKSNFDLAEDAKLQLSKDTYDDDLDNLLAQIGDQYADLFLAAKNLSDAILLSDILRVNTEITKAPLSASMIKRYDEHHQDLTLLKALVRQQLPEKYKEIFFDQSKNGYAGYIDGGASQEEFYKFIKPILEKMDGTEELLVKLNREDLLRKQRTFDNGSIPHQIHLGELHAILRRQEDFYPFLKDNREKIEKILTFRIPYYVGPLARGNSRFAWMTRKSEETITPWNFEEVVDKGASAQSFIERMTNFDKNLPNEKVLPKHSLLYEYFTVYNELTKVKYVTEGMRKPAFLSGEQKKAIVDLLFKTNRKVTVKQLKEDYFKKIECFDSVEISGVEDRFNASLGTYHDLLKIIKDKDFLDNEENEDILEDIVLTLTLFEDREMIEERLKTYAHLFDDKVMKQLKRRRYTGWGRLSRKLINGIRDKQSGKTILDFLKSDGFANRNFMQLIHDDSLTFKEDIQKAQVSGQGDSLHEHIANLAGSPAIKKGILQTVKVVDELVKVMGRHKPENIVIEMARENQTTQKGQKNSRERMKRIEEGIKELGSQILKEHPVENTQLQNEKLYLYYLQNGRDMYVDQELDINRLSDYDVDHIVPQSFLKDDSIDNKVLTRSDKARGKSDNVPSEEVVKKMKNYWRQLLNAKLITQRKFDNLTKAERGGLSELDKAGFIKRQLVETRQITKHVAQILDSRMNTKYDENDKLIREVKVITLKSKLVSDFRKDFQFYKVREINNYHHAHDAYLNAVVGTALIKKYPKLESEFVYGDYKVYDVRKMIAKSEQEIGKATAKYFFYSNIMNFFKTEITLANGEIRKRPLIETNGETGEIVWDKGRDFATVRKVLSMPQVNIVKKTEVQTGGFSKESILPKRNSDKLIARKKDWDPKKYGGFDSPTVAYSVLVVAKVEKGKSKKLKSVKELLGITIMERSSFEKNPIDFLEAKGYKEVKKDLIIKLPKYSLFELENGRKRMLASAGELQKGNELALPSKYVNFLYLASHYEKLKGSPEDNEQKQLFVEQHKHYLDEIIEQISEFSKRVILADANLDKVLSAYNKHRDKPIREQAENIIHLFTLTNLGAPAAFKYFDTTIDRKRYTSTKEVLDATLIHQSITGLYETRIDLSQLGGDGGEAAAKEAAAKEAAAKEAAAKEAAAKEAAAKGGTLGIEDEYRLHETSTEPDVSLGSTWLSDFPQAWAETGGMGLAVRQAPLIIPLKATSTPVSIQQYPMSHEARLGIKPHIQRLLDQGILVPCQSPWNTPLLPVKKPGTNDYRPVQDLREVNKRVEDIHPTVPNPYNLLSGLPPSHQWYTVLDLKDAFFCLRLHPTSQPLFAFEWRDPGMGISGQLTWTRLPQGFKNSPTLFDEALHRDLADFRIQHPDLILLQYVDDILLAATSELDCQQGTRALLQTLGDLGYRASAKKAQICQKQVKYLGYLLREGQRWLTEARKETVMGQPVPKTPRQLREFLGTAGFCRLWIPGFAEMAAPLYPLTKTGTLFSWGPDQQKAYQEIKQALLTAPALGLPDLTKPFELFVDEKQGYAKGVLTQKLGPWRRPVAYLSKKLDPVAAGWPPCLRMVAAIAVLTKDAGKLTMGQPLVILAPHAVEALVKQPPDRWLSNARMTHYQAMLLDTDRVQFGPVVALNPATLLPLPEEGAPHDCLEILAETHGTRPDLTDQPIPDADHTWYTDGSSFLQEGQRKAGAAVTTETEVIWAGALPAGTSAQRAELIALTQALKMAEGKRLNVYTDSRYAFATAHIHGEIYRRRGLLTSEGREIKNKSEILALLKALFLPKRLSIIHCLGHQKGDSAEARGNRLADQAAREAAIKTPPDTSTLLAGKRTADGSEFEKRTADGSEFESPKKKAKVE

SEQ ID NO: 6456 - protein, 2115 aa, synthetic construct; identical to SEQ ID NO: 6455

SEQ ID NO: 6457 - protein, 2115 aa, synthetic construct
MPAAKRVKLDGGDKKYSIGLDIGTNSVGWAVITDEYKVPSKKFKVLGNTDRHSIKKNLIGALLFDSGETAEATRLKRTARRRYTRRKNRICYLQEIFSNEMAKVDDSFFHRLEESFLVEEDKKHERHPIFGNIVDEVAYHEKYPTIYHLRKKLVDSTDKADLRLIYLALAHMIKFRGHFLIEGDLNPDNSDVDKLFIQLVQTYNQLFEENPINASGVDAKAILSARLSKSRRLENLIAQLPGEKKNGLFGNLIALSLGLTPNFKSNFDLAEDAKLQLSKDTYDDDLDNLLAQIGDQYADLFLAAKNLSDAILLSDILRVNTEITKAPLSASMIKRYDEHHQDLTLLKALVRQQLPEKYKEIFFDQSKNGYAGYIDGGASQEEFYKFIKPILEKMDGTEELLVKLNREDLLRKQRTFDNGSIPHQIHLGELHAILRRQEDFYPFLKDNREKIEKILTFRIPYYVGPLARGNSRFAWMTRKSEETITPWNFEEVVDKGASAQSFIERMTNFDKNLPNEKVLPKHSLLYEYFTVYNELTKVKYVTEGMRKPAFLSGEQKKAIVDLLFKTNRKVTVKQLKEDYFKKIECFDSVEISGVEDRFNASLGTYHDLLKIIKDKDFLDNEENEDILEDIVLTLTLFEDREMIEERLKTYAHLFDDKVMKQLKRRRYTGWGRLSRKLINGIRDKQSGKTILDFLKSDGFANRNFMQLIHDDSLTFKEDIQKAQVSGQGDSLHEHIANLAGSPAIKKGILQTVKVVDELVKVMGRHKPENIVIEMARENQTTQKGQKNSRERMKRIEEGIKELGSQILKEHPVENTQLQNEKLYLYYLQNGRDMYVDQELDINRLSDYDVDHIVPQSFLKDDSIDNKVLTRSDKARGKSDNVPSEEVVKKMKNYWRQLLNAKLITQRKFDNLTKAERGGLSELDKAGFIKRQLVETRQITKHVAQILDSRMNTKYDENDKLIREVKVITLKSKLVSDFRKDFQFYKVREINNYHHAHDAYLNAVVGTALIKKYPKLESEFVYGDYKVYDVRKMIAKSEQEIGKATAKYFFYSNIMNFFKTEITLANGEIRKRPLIETNGETGEIVWDKGRDFATVRKVLSMPQVNIVKKTEVQTGGFSKESILPKRNSDKLIARKKDWDPKKYGGFDSPTVAYSVLVVAKVEKGKSKKLKSVKELLGITIMERSSFEKNPIDFLEAKGYKEVKKDLIIKLPKYSLFELENGRKRMLASAGELQKGNELALPSKYVNFLYLASHYEKLKGSPEDNEQKQLFVEQHKHYLDEIIEQISEFSKRVILADANLDKVLSAYNKHRDKPIREQAENIIHLFTLTNLGAPAAFKYFDTTIDRKRYTSTKEVLDATLIHQSITGLYETRIDLSQLGGDGGEAAAKEAAAKEAAAKEAAAKEAAAKEAAAKGGTLNIEDEYRLHETSKEPDVSLGSTWLSDFPQAWAETGGMGLAVRQAPLIIPLKATSTPVSIKQYPMSQEARLGIKPHIQRLLDQGILVPCQSPWNTPLLPVKKPGTNDYRPVQDLREVNKRVEDIHPTVPNPYNLLSGLPPSHQWYTVLDLKDAFFCLRLHPTSQPLFAFEWRDPEMGISGQLTWTRLPQGFKNSPTLFDEALHRDLAGFRIQHPDLILLQYVDDLLLAATSELDCQQGTRALLQTLGDLGYRASAKKAQICQKQVKYLGYLLKEGQRWLTEARKETVMGQPIPKTPRQLREFLGTAGFCRLWIPGFAEMAAPLYPLTKTGTLFNWGPDQQKAFQEIKQALLTAPALGLPDLTKPFELFVDEKQGYAKGVLTQKLGPWRRPVAYLSKKLDPVAAGWPPCLRMVAAIAVLTKDAGKLTMGQPLVILAPHAVEALVKQPPDRWLSNARMTHYQALLLDTDRVQFGPVVALNPATLLPLPEEGLQHDCLDILAEAHGTRSDLMDQPLPDADHTWYTDGSSFLQEGQRKAGAAVTTETEVIWARALPAGTSAQRAELIALTQALKMAEGKKLNVYTDSRYAFATAHIHGEIYRRRGLLTSEGKEIKNKDEILALLKALFLPKRLSIIHCPGHQKGNSAEARGNRMADQAAREVATRETPETSTLLAGKRTADGSEFEKRTADGSEFESPKKKAKVE

SEQ ID NO: 6458 - protein, 2115 aa, synthetic construct
MPAAKRVKLDGGDKKYSIGLDIGTNSVGWAVITDEYKVPSKKFKVLGNTDRHSIKKNLIGALLFDSGETAEATRLKRTARRRYTRRKNRICYLQEIFSNEMAKVDDSFFHRLEESFLVEEDKKHERHPIFGNIVDEVAYHEKYPTIYHLRKKLVDSTDKADLRLIYLALAHMIKFRGHFLIEGDLNPDNSDVDKLFIQLVQTYNQLFEENPINASGVDAKAILSARLSKSRRLENLIAQLPGEKKNGLFGNLIALSLGLTPNFKSNFDLAEDAKLQLSKDTYDDDLDNLLAQIGDQYADLFLAAKNLSDAILLSDILRVNTEITKAPLSASMIKRYDEHHQDLTLLKALVRQQLPEKYKEIFFDQSKNGYAGYIDGGASQEEFYKFIKPILEKMDGTEELLVKLNREDLLRKQRTFDNGSIPHQIHLGELHAILRRQEDFYPFLKDNREKIEKILTFRIPYYVGPLARGNSRFAWMTRKSEETITPWNFEEVVDKGASAQSFIERMTNFDKNLPNEKVLPKHSLLYEYFTVYNELTKVKYVTEGMRKPAFLSGEQKKAIVDLLFKTNRKVTVKQLKEDYFKKIECFDSVEISGVEDRFNASLGTYHDLLKIIKDKDFLDNEENEDILEDIVLTLTLFEDREMIEERLKTYAHLFDDKVMKQLKRRRYTGWGRLSRKLINGIRDKQSGKTILDFLKSDGFANRNFMQLIHDDSLTFKEDIQKAQVSGQGDSLHEHIANLAGSPAIKKGILQTVKVVDELVKVMGRHKPENIVIEMARENQTTQKGQKNSRERMKRIEEGIKELGSQILKEHPVENTQLQNEKLYLYYLQNGRDMYVDQELDINRLSDYDVDHIVPQSFLKDDSIDNKVLTRSDKARGKSDNVPSEEVVKKMKNYWRQLLNAKLITQRKFDNLTKAERGGLSELDKAGFIKRQLVETRQITKHVAQILDSRMNTKYDENDKLIREVKVITLKSKLVSDFRKDFQFYKVREINNYHHAHDAYLNAVVGTALIKKYPKLESEFVYGDYKVYDVRKMIAKSEQEIGKATAKYFFYSNIMNFFKTEITLANGEIRKRPLIETNGETGEIVWDKGRDFATVRKVLSMPQVNIVKKTEVQTGGFSKESILPKRNSDKLIARKKDWDPKKYGGFDSPTVAYSVLVVAKVEKGKSKKLKSVKELLGITIMERSSFEKNPIDFLEAKGYKEVKKDLIIKLPKYSLFELENGRKRMLASAGELQKGNELALPSKYVNFLYLASHYEKLKGSPEDNEQKQLFVEQHKHYLDEIIEQISEFSKRVILADANLDKVLSAYNKHRDKPIREQAENIIHLFTLTNLGAPAAFKYFDTTIDRKRYTSTKEVLDATLIHQSITGLYETRIDLSQLGGDGGEAAAKEAAAKEAAAKEAAAKEAAAKEAAAKGGTLNIEDEHRLHETSKEPDVSLGSTWLSDFPQAWAETGGMGLAVRQAPLIIPLKATSTPVSIKQYPMSQEARLGIKPHIQRLLDQGILVPCQSPWNTPLLPVKKPGTNDYRPVQDLREVNKRVEDIHPTVPNPYNLLSGLPPSHQWYTVLDLKDAFFCLRLHPTSQPLFAFEWRDPEMGISGQLTWTRLPQGFKNSPTLFDEALHRDLADFRIQHPDLILLQYVDDLLLAATSELDCQQGTRALLQTLGNLGYRASAKKAQICQKQVKYLGYLLKEGQRWLTEARKETVMGQPTPKTPRQLREFLGTAGFCRLWIPGFAEMAAPLYPLTKTGTLFNWGPDQQKAYQEIKQALLTAPALGLPDLTKPFELFVDEKQGYAKGVLTQKLGPWRRPVAYLSKKLDPVAAGWPPCLRMVAAIAVLTKDAGKLTMGQPLVILAPHAVEALVKQPPDRWLSNARMTHYQALLLDTDRVQFGPVVALNPATLLPLPEEGLQHNCLDILAEAHGTRPDLTDQPLPDADHTWYTDGSSLLQEGQRKAGAAVTTETEVIWAKALPAGTSAQRAELIALTQALKMAEGKKLNVYTDSRYAFATAHIHGEIYRRRGLLTSEGKEIKNKDEILALLKALFLPKRLSIIHCPGHQKGHSAEARGNRMADQAARKAAITETPDTSTLLAGKRTADGSEFEKRTADGSEFESPKKKAKVE

SEQ ID NO: 6459 - protein, 2115 aa, synthetic construct; identical to SEQ ID NO: 6458

SEQ ID NO: 6460 - protein, 2115 aa, synthetic construct
MPAAKRVKLDGGDKKYSIGLDIGTNSVGWAVITDEYKVPSKKFKVLGNTDRHSIKKNLIGALLFDSGETAEATRLKRTARRRYTRRKNRICYLQEIFSNEMAKVDDSFFHRLEESFLVEEDKKHERHPIFGNIVDEVAYHEKYPTIYHLRKKLVDSTDKADLRLIYLALAHMIKFRGHFLIEGDLNPDNSDVDKLFIQLVQTYNQLFEENPINASGVDAKAILSARLSKSRRLENLIAQLPGEKKNGLFGNLIALSLGLTPNFKSNFDLAEDAKLQLSKDTYDDDLDNLLAQIGDQYADLFLAAKNLSDAILLSDILRVNTEITKAPLSASMIKRYDEHHQDLTLLKALVRQQLPEKYKEIFFDQSKNGYAGYIDGGASQEEFYKFIKPILEKMDGTEELLVKLNREDLLRKQRTFDNGSIPHQIHLGELHAILRRQEDFYPFLKDNREKIEKILTFRIPYYVGPLARGNSRFAWMTRKSEETITPWNFEEVVDKGASAQSFIERMTNFDKNLPNEKVLPKHSLLYEYFTVYNELTKVKYVTEGMRKPAFLSGEQKKAIVDLLFKTNRKVTVKQLKEDYFKKIECFDSVEISGVEDRFNASLGTYHDLLKIIKDKDFLDNEENEDILEDIVLTLTLFEDREMIEERLKTYAHLFDDKVMKQLKRRRYTGWGRLSRKLINGIRDKQSGKTILDFLKSDGFANRNFMQLIHDDSLTFKEDIQKAQVSGQGDSLHEHIANLAGSPAIKKGILQTVKVVDELVKVMGRHKPENIVIEMARENQTTQKGQKNSRERMKRIEEGIKELGSQILKEHPVENTQLQNEKLYLYYLQNGRDMYVDQELDINRLSDYDVDHIVPQSFLKDDSIDNKVLTRSDKARGKSDNVPSEEVVKKMKNYWRQLLNAKLITQRKFDNLTKAERGGLSELDKAGFIKRQLVETRQITKHVAQILDSRMNTKYDENDKLIREVKVITLKSKLVSDFRKDFQFYKVREINNYHHAHDAYLNAVVGTALIKKYPKLESEFVYGDYKVYDVRKMIAKSEQEIGKATAKYFFYSNIMNFFKTEITLANGEIRKRPLIETNGETGEIVWDKGRDFATVRKVLSMPQVNIVKKTEVQTGGFSKESILPKRNSDKLIARKKDWDPKKYGGFDSPTVAYSVLVVAKVEKGKSKKLKSVKELLGITIMERSSFEKNPIDFLEAKGYKEVKKDLIIKLPKYSLFELENGRKRMLASAGELQKGNELALPSKYVNFLYLASHYEKLKGSPEDNEQKQLFVEQHKHYLDEIIEQISEFSKRVILADANLDKVLSAYNKHRDKPIREQAENIIHLFTLTNLGAPAAFKYFDTTIDRKRYTSTKEVLDATLIHQSITGLYETRIDLSQLGGDGGEAAAKEAAAKEAAAKEAAAKEAAAKEAAAKGGTLNIEDEYRLHEISTEPDVSPGSTWLSDFPQAWAETGGMGLAVRQAPLIIPLKATSTPVSIKQYPMSQEAKLGIKPHIQRLLDQGILVPCQSPWNTPLLPVKKPGTNDYRPVQGLREVNKRVEDIHPTVPNPYNLLSGLPTSHRWYTVLDLKDAFFCLRLHPTSQPLFASEWRDPGMGISGQLTWTRLPQGFKNSPTLFDEALHRGLADFRIQHPDLILLQYVDDLLLAATSELDCQQGTRALLKTLGNLGYRASAKKAQICQKQVKYLGYLLREGQRWLTEARKETVMGQPTPKTPRQLREFLGTAGFCRLWIPRFAEMAAPLYPLTKTGTLFNWGPDQQKAYHEIKQALLTAPALGLPDLTKPFELFVDEKQGYAKGVLTQKLGPWRRPVAYLSKKLDPVAAGWPPCLRMVAAIAVLTKDAGKLTMGQPLVILAPHAVEALVKQPPDRWLSNARMTHYQAMLLDTDRVQFGPVVALNPATLLPLPEEGAPHDCLEILAETHGTEPDLTDQPIPDADHTWYTDGSSFLQEGQRKAGAAVTTETEVIWARALPAGTSAQRAELIALTQALKMAEGKRLNVYTDSRYAFATAHIHGEIYKRRGLLTSEGREIKNKSEILALLKALFLPKRLSIIHCLGHQKGDSAEARGNRLADQAAREAAIKTPPDTSTLLAGKRTADGSEFEKRTADGSEFESPKKKAKVE

SEQ ID NO: 6461 - protein, 2115 aa, synthetic construct
MPAAKRVKLDGGDKKYSIGLDIGTNSVGWAVITDEYKVPSKKFKVLGNTDRHSIKKNLIGALLFDSGETAEATRLKRTARRRYTRRKNRICYLQEIFSNEMAKVDDSFFHRLEESFLVEEDKKHERHPIFGNIVDEVAYHEKYPTIYHLRKKLVDSTDKADLRLIYLALAHMIKFRGHFLIEGDLNPDNSDVDKLFIQLVQTYNQLFEENPINASGVDAKAILSARLSKSRRLENLIAQLPGEKKNGLFGNLIALSLGLTPNFKSNFDLAEDAKLQLSKDTYDDDLDNLLAQIGDQYADLFLAAKNLSDAILLSDILRVNTEITKAPLSASMIKRYDEHHQDLTLLKALVRQQLPEKYKEIFFDQSKNGYAGYIDGGASQEEFYKFIKPILEKMDGTEELLVKLNREDLLRKQRTFDNGSIPHQIHLGELHAILRRQEDFYPFLKDNREKIEKILTFRIPYYVGPLARGNSRFAWMTRKSEETITPWNFEEVVDKGASAQSFIERMTNFDKNLPNEKVLPKHSLLYEYFTVYNELTKVKYVTEGMRKPAFLSGEQKKAIVDLLFKTNRKVTVKQLKEDYFKKIECFDSVEISGVEDRFNASLGTYHDLLKIIKDKDFLDNEENEDILEDIVLTLTLFEDREMIEERLKTYAHLFDDKVMKQLKRRRYTGWGRLSRKLINGIRDKQSGKTILDFLKSDGFANRNFMQLIHDDSLTFKEDIQKAQVSGQGDSLHEHIANLAGSPAIKKGILQTVKVVDELVKVMGRHKPENIVIEMARENQTTQKGQKNSRERMKRIEEGIKELGSQILKEHPVENTQLQNEKLYLYYLQNGRDMYVDQELDINRLSDYDVDHIVPQSFLKDDSIDNKVLTRSDKARGKSDNVPSEEVVKKMKNYWRQLLNAKLITQRKFDNLTKAERGGLSELDKAGFIKRQLVETRQITKHVAQILDSRMNTKYDENDKLIREVKVITLKSKLVSDFRKDFQFYKVREINNYHHAHDAYLNAVVGTALIKKYPKLESEFVYGDYKVYDVRKMIAKSEQEIGKATAKYFFYSNIMNFFKTEITLANGEIRKRPLIETNGETGEIVWDKGRDFATVRKVLSMPQVNIVKKTEVQTGGFSKESILPKRNSDKLIARKKDWDPKKYGGFDSPTVAYSVLVVAKVEKGKSKKLKSVKELLGITIMERSSFEKNPIDFLEAKGYKEVKKDLIIKLPKYSLFELENGRKRMLASAGELQKGNELALPSKYVNFLYLASHYEKLKGSPEDNEQKQLFVEQHKHYLDEIIEQISEFSKRVILADANLDKVLSAYNKHRDKPIREQAENIIHLFTLTNLGAPAAFKYFDTTIDRKRYTSTKEVLDATLIHQSITGLYETRIDLSQLGGDGGEAAAKEAAAKEAAAKEAAAKEAAAKEAAAKGGTLNIEDEYRLHEISTEPDVSPGSTWLSDFPQAWAETGGMGLAVRQAPLIIPLKATSTPVSIKQYPMSQEAKLGIKPHIQRLLDQGILVPCQSPWNTPLLPVKKPGTNDYRPVQGLREVNKRVEDIHPTVPNPYNLLSGLPTSHRWYTVLDLKDAFFCLRLHPTSQPLFASEWRDPGMGISGQLTWTRLPQGFKNSPTLFNEALHRGLADFRIQHPDLILLQYVDDLLLAATSELDCQQGTRALLKTLGNLGYRASAKKAQICQKQVKYLGYLLREGQRWLTEARKETVMGQPTPKTPRQLREFLGKAGFCRLFIPRFAEMAAPLYPLTKPGTLFNWGPDQQKAYHEIKQALLTAPALGLPDLTKPFELFVDEKQGYAKGVLTQKLGPWRRPVAYLSKKLDPVAAGWPPCLRMVAAIAVLTKDAGKLTMGQPLVILAPHAVEALVKQPPDRWLSNARMTHYQAMLLDTDRVQFGPVVALNPATLLPLPEEGAPHDCLEILAETHGTEPDLTDQPIPDADHTWYTDGSSFLQEGQRKAGAAVTTETEVIWARALPAGTSAQRAELIALTQALKMAEGKRLNVYTDSRYAFATAHIHGEIYKRRGWLTSEGREIKNKSEILALLKALFLPKRLSIIHCLGHQKGDSAEARGNRLADQAAREAAIKTPPDTSTLLAGKRTADGSEFEKRTADGSEFESPKKKAKVE

SEQ ID NO: 6462 - protein, 2195 aa, synthetic construct
MPAAKRVKLDGGDKKYSIGLDIGTNSVGWAVITDEYKVPSKKFKVLGNTDRHSIKKNLIGALLFDSGETAEATRLKRTARRRYTRRKNRICYLQEIFSNEMAKVDDSFFHRLEESFLVEEDKKHERHPIFGNIVDEVAYHEKYPTIYHLRKKLVDSTDKADLRLIYLALAHMIKFRGHFLIEGDLNPDNSDVDKLFIQLVQTYNQLFEENPINASGVDAKAILSARLSKSRRLENLIAQLPGEKKNGLFGNLIALSLGLTPNFKSNFDLAEDAKLQLSKDTYDDDLDNLLAQIGDQYADLFLAAKNLSDAILLSDILRVNTEITKAPLSASMIKRYDEHHQDLTLLKALVRQQLPEKYKEIFFDQSKNGYAGYIDGGASQEEFYKFIKPILEKMDGTEELLVKLNREDLLRKQRTFDNGSIPHQIHLGELHAILRRQEDFYPFLKDNREKIEKILTFRIPYYVGPLARGNSRFAWMTRKSEETITPWNFEEVVDKGASAQSFIERMTNFDKNLPNEKVLPKHSLLYEYFTVYNELTKVKYVTEGMRKPAFLSGEQKKAIVDLLFKTNRKVTVKQLKEDYFKKIECFDSVEISGVEDRFNASLGTYHDLLKIIKDKDFLDNEENEDILEDIVLTLTLFEDREMIEERLKTYAHLFDDKVMKQLKRRRYTGWGRLSRKLINGIRDKQSGKTILDFLKSDGFANRNFMQLIHDDSLTFKEDIQKAQVSGQGDSLHEHIANLAGSPAIKKGILQTVKVVDELVKVMGRHKPENIVIEMARENQTTQKGQKNSRERMKRIEEGIKELGSQILKEHPVENTQLQNEKLYLYYLQNGRDMYVDQELDINRLSDYDVDHIVPQSFLKDDSIDNKVLTRSDKARGKSDNVPSEEVVKKMKNYWRQLLNAKLITQRKFDNLTKAERGGLSELDKAGFIKRQLVETRQITKHVAQILDSRMNTKYDENDKLIREVKVITLKSKLVSDFRKDFQFYKVREINNYHHAHDAYLNAVVGTALIKKYPKLESEFVYGDYKVYDVRKMIAKSEQEIGKATAKYFFYSNIMNFFKTEITLANGEIRKRPLIETNGETGEIVWDKGRDFATVRKVLSMPQVNIVKKTEVQTGGFSKESILPKRNSDKLIARKKDWDPKKYGGFDSPTVAYSVLVVAKVEKGKSKKLKSVKELLGITIMERSSFEKNPIDFLEAKGYKEVKKDLIIKLPKYSLFELENGRKRMLASAGELQKGNELALPSKYVNFLYLASHYEKLKGSPEDNEQKQLFVEQHKHYLDEIIEQISEFSKRVILADANLDKVLSAYNKHRDKPIREQAENIIHLFTLTNLGAPAAFKYFDTTIDRKRYTSTKEVLDATLIHQSITGLYETRIDLSQLGGDGGEAAAKEAAAKEAAAKEAAAKEAAAKEAAAKGGMDPLQLLQPLEAEIKGTKLKAHWNSGATITCVPEAFLEDERPIQTMLIKTIHGEKQQDVYYLTFKVQGRKVEAEVLASPYDYILLNPSDVPWLMKKPLQLTVLVPLHEYQERLLQQTALPKEQKELLQKLFLKYDALWQHWENQVGHRRIKPHNIATGTLAPRPQKQYPINPKAKPSIQIVIDDLLKQGVLIQQNSTMNTPVYPVPKPDGKWRMVLDYREVNKTIPLIAAQNQHSAGILSSIYRGKYKTTLDLTNGFWAHPITPESYWLTAFTWQGKQYCWTRLPQGFLNSPALFTADVVDLLKEIPNVQAYVDDIYISHDDPQEHLEQLEKIFSILLNAGYVVSLKKSEIAQREVEFLGFNITKEGRGLTDTFKQKLLNITPPKDLKQLQSILGLLNFARNFIPNYSELVKPLYTIVANANGKFISWTEDNSNQLQHIISVLNQADNLEERNPETRLIIKVNSSPSAGYIRYYNEGSKRPIMYVNYIFSKAEAKFTQTEKLLTTMHKGLIKAMDLAMGQEILVYSPIVSMTKIQRTPLPERKALPVRWITWMTYLEDPRIQFHYDKSLPELQQIPNVTEDVIAKTKHPSEFAMVFYTDGSAIKHPDVNKSHSAGMGIAQVQFIPEYKIVHQWSIPLGDHTAQLAEIAAVEFACKKALKISGPVLIVTDSFYVAESANKELPYWKSNGFLNNKKKPLRHVSKWKSIAECLQLKPDIIIMHEKGHQQPMTTLHTEGNNLADKLATQGSYVVHAGKRTADGSEFEKRTADGSEFESPKKKAKVE

SEQ ID NO: 6463 - protein, 2106 aa, synthetic construct
MPAAKRVKLDGGDKKYSIGLDIGTNSVGWAVITDEYKVPSKKFKVLGNTDRHSIKKNLIGALLFDSGETAEATRLKRTARRRYTRRKNRICYLQEIFSNEMAKVDDSFFHRLEESFLVEEDKKHERHPIFGNIVDEVAYHEKYPTIYHLRKKLVDSTDKADLRLIYLALAHMIKFRGHFLIEGDLNPDNSDVDKLFIQLVQTYNQLFEENPINASGVDAKAILSARLSKSRRLENLIAQLPGEKKNGLFGNLIALSLGLTPNFKSNFDLAEDAKLQLSKDTYDDDLDNLLAQIGDQYADLFLAAKNLSDAILLSDILRVNTEITKAPLSASMIKRYDEHHQDLTLLKALVRQQLPEKYKEIFFDQSKNGYAGYIDGGASQEEFYKFIKPILEKMDGTEELLVKLNREDLLRKQRTFDNGSIPHQIHLGELHAILRRQEDFYPFLKDNREKIEKILTFRIPYYVGPLARGNSRFAWMTRKSEETITPWNFEEVVDKGASAQSFIERMTNFDKNLPNEKVLPKHSLLYEYFTVYNELTKVKYVTEGMRKPAFLSGEQKKAIVDLLFKTNRKVTVKQLKEDYFKKIECFDSVEISGVEDRFNASLGTYHDLLKIIKDKDFLDNEENEDILEDIVLTLTLFEDREMIEERLKTYAHLFDDKVMKQLKRRRYTGWGRLSRKLINGIRDKQSGKTILDFLKSDGFANRNFMQLIHDDSLTFKEDIQKAQVSGQGDSLHEHIANLAGSPAIKKGILQTVKVVDELVKVMGRHKPENIVIEMARENQTTQKGQKNSRERMKRIEEGIKELGSQILKEHPVENTQLQNEKLYLYYLQNGRDMYVDQELDINRLSDYDVDHIVPQSFLKDDSIDNKVLTRSDKARGKSDNVPSEEVVKKMKNYWRQLLNAKLITQRKFDNLTKAERGGLSELDKAGFIKRQLVETRQITKHVAQILDSRMNTKYDENDKLIREVKVITLKSKLVSDFRKDFQFYKVREINNYHHAHDAYLNAVVGTALIKKYPKLESEFVYGDYKVYDVRKMIAKSEQEIGKATAKYFFYSNIMNFFKTEITLANGEIRKRPLIETNGETGEIVWDKGRDFATVRKVLSMPQVNIVKKTEVQTGGFSKESILPKRNSDKLIARKKDWDPKKYGGFDSPTVAYSVLVVAKVEKGKSKKLKSVKELLGITIMERSSFEKNPIDFLEAKGYKEVKKDLIIKLPKYSLFELENGRKRMLASAGELQKGNELALPSKYVNFLYLASHYEKLKGSPEDNEQKQLFVEQHKHYLDEIIEQISEFSKRVILADANLDKVLSAYNKHRDKPIREQAENIIHLFTLTNLGAPAAFKYFDTTIDRKRYTSTKEVLDATLIHQSITGLYETRIDLSQLGGDGGEAAAKEAAAKEAAAKEAAAKEAAAKEAAAKGGVPWLMKKPLQLTVLVPLHEYQERLLQQTALPKEQKELLQKLFLKYDALWQHWENQVGHRRIKPHNIATGTLAPRPQKQYPINPKAKPSIQIVIDDLLKQGVLIQQNSTMNTPVYPVPKPDGKWRMVLDYREVNKTIPLIAAQNQHSAGILSSIYRGKYKTTLDLTNGFWAHPITPESYWLTAFTWQGKQYCWTRLPQGFLNSPALFTADVVDLLKEIPNVQAYVDDIYISHDDPQEHLEQLEKIFSILLNAGYVVSLKKSEIAQREVEFLGFNITKEGRGLTDTFKQKLLNITPPKDLKQLQSILGLLNFARNFIPNYSELVKPLYTIVANANGKFISWTEDNSNQLQHIISVLNQADNLEERNPETRLIIKVNSSPSAGYIRYYNEGSKRPIMYVNYIFSKAEAKFTQTEKLLTTMHKGLIKAMDLAMGQEILVYSPIVSMTKIQRTPLPERKALPVRWITWMTYLEDPRIQFHYDKSLPELQQIPNVTEDVIAKTKHPSEFAMVFYTDGSAIKHPDVNKSHSAGMGIAQVQFIPEYKIVHQWSIPLGDHTAQLAEIAAVEFACKKALKISGPVLIVTDSFYVAESANKELPYWKSNGFLNNKKKPLRHVSKWKSIAECLQLKPDIIIMHEKGHQQPMTTLHTEGNNLADKLATQGSYVVHAGKRTADGSEFEKRTADGSEFESPKKKAKVE

SEQ ID NO: 6464 - protein, 2106 aa, synthetic construct
MPAAKRVKLDGGDKKYSIGLDIGTNSVGWAVITDEYKVPSKKFKVLGNTDRHSIKKNLIGALLFDSGETAEATRLKRTARRRYTRRKNRICYLQEIFSNEMAKVDDSFFHRLEESFLVEEDKKHERHPIFGNIVDEVAYHEKYPTIYHLRKKLVDSTDKADLRLIYLALAHMIKFRGHFLIEGDLNPDNSDVDKLFIQLVQTYNQLFEENPINASGVDAKAILSARLSKSRRLENLIAQLPGEKKNGLFGNLIALSLGLTPNFKSNFDLAEDAKLQLSKDTYDDDLDNLLAQIGDQYADLFLAAKNLSDAILLSDILRVNTEITKAPLSASMIKRYDEHHQDLTLLKALVRQQLPEKYKEIFFDQSKNGYAGYIDGGASQEEFYKFIKPILEKMDGTEELLVKLNREDLLRKQRTFDNGSIPHQIHLGELHAILRRQEDFYPFLKDNREKIEKILTFRIPYYVGPLARGNSRFAWMTRKSEETITPWNFEEVVDKGASAQSFIERMTNFDKNLPNEKVLPKHSLLYEYFTVYNELTKVKYVTEGMRKPAFLSGEQKKAIVDLLFKTNRKVTVKQLKEDYFKKIECFDSVEISGVEDRFNASLGTYHDLLKIIKDKDFLDNEENEDILEDIVLTLTLFEDREMIEERLKTYAHLFDDKVMKQLKRRRYTGWGRLSRKLINGIRDKQSGKTILDFLKSDGFANRNFMQLIHDDSLTFKEDIQKAQVSGQGDSLHEHIANLAGSPAIKKGILQTVKVVDELVKVMGRHKPENIVIEMARENQTTQKGQKNSRERMKRIEEGIKELGSQILKEHPVENTQLQNEKLYLYYLQNGRDMYVDQELDINRLSDYDVDHIVPQSFLKDDSIDNKVLTRSDKARGKSDNVPSEEVVKKMKNYWRQLLNAKLITQRKFDNLTKAERGGLSELDKAGFIKRQLVETRQITKHVAQILDSRMNTKYDENDKLIREVKVITLKSKLVSDFRKDFQFYKVREINNYHHAHDAYLNAVVGTALIKKYPKLESEFVYGDYKVYDVRKMIAKSEQEIGKATAKYFFYSNIMNFFKTEITLANGEIRKRPLIETNGETGEIVWDKGRDFATVRKVLSMPQVNIVKKTEVQTGGFSKESILPKRNSDKLIARKKDWDPKKYGGFDSPTVAYSVLVVAKVEKGKSKKLKSVKELLGITIMERSSFEKNPIDFLEAKGYKEVKKDLIIKLPKYSLFELENGRKRMLASAGELQKGNELALPSKYVNFLYLASHYEKLKGSPEDNEQKQLFVEQHKHYLDEIIEQISEFSKRVILADANLDKVLSAYNKHRDKPIREQAENIIHLFTLTNLGAPAAFKYFDTTIDRKRYTSTKEVLDATLIHQSITGLYETRIDLSQLGGDGGEAAAKEAAAKEAAAKEAAAKEAAAKEAAAKGGVPWLMKKPLQLTVLVPLHEYQERLLQQTALPKEQKELLQKLFLKYDALWQHWENQVGHRRIKPHNIATGTLAPRPQKQYPINPKAKPSIQIVIDDLLKQGVLIQQNSTMNTPVYPVPKPDGKWRMVLDYREVNKTIPLIAAQNQHSAGILSSIYRGKYKTTLDLTNGFWAHPITPESYWLTAFTWQGKQYCWTRLPQGFLNSPALFNADVVDLLKEIPNVQAYVDDIYISHDDPQEHLEQLEKIFSILLNAGYVVSLKKSEIAQREVEFLGFNITKEGRGLTDTFKQKLLNITPPKDLKQLQSILGKLNFARNFIPNYSELVKPLYTIVAPANGKFISWTEDNSNQLQHIISVLNQADNLEERNPETRLIIKVNSSPSAGYIRYYNEGSKRPIMYVNYIFSKAEAKFTQTEKLLTTMHKGLIKAMDLAMGQEILVYSPIVSMTKIQRTPLPERKALPVRWITWMTYLEDPRIQFHYDKSLPELQQIPNVTEDVIAKTKHPSEFAMVFYTDGSAIKHPDVNKSHSAGMGIAQVQFIPEYKIVHQWSIPLGDHTAQLAEIAAVEFACKKALKISGPVLIVTDSFYVAESANKELPYWKSNGFLNNKKKPLRHVSKWKSIAECLQLKPDIIIMHEKGHQQPMTTLHTEGNNLADKLATQGSYVVHAGKRTADGSEFEKRTADGSEFESPKKKAKVE

SEQ ID NO: 6465 - protein, 2195 aa, synthetic construct
MPAAKRVKLDGGDKKYSIGLDIGTNSVGWAVITDEYKVPSKKFKVLGNTDRHSIKKNLIGALLFDSGETAEATRLKRTARRRYTRRKNRICYLQEIFSNEMAKVDDSFFHRLEESFLVEEDKKHERHPIFGNIVDEVAYHEKYPTIYHLRKKLVDSTDKADLRLIYLALAHMIKFRGHFLIEGDLNPDNSDVDKLFIQLVQTYNQLFEENPINASGVDAKAILSARLSKSRRLENLIAQLPGEKKNGLFGNLIALSLGLTPNFKSNFDLAEDAKLQLSKDTYDDDLDNLLAQIGDQYADLFLAAKNLSDAILLSDILRVNTEITKAPLSASMIKRYDEHHQDLTLLKALVRQQLPEKYKEIFFDQSKNGYAGYIDGGASQEEFYKFIKPILEKMDGTEELLVKLNREDLLRKQRTFDNGSIPHQIHLGELHAILRRQEDFYPFLKDNREKIEKILTFRIPYYVGPLARGNSRFAWMTRKSEETITPWNFEEVVDKGASAQSFIERMTNFDKNLPNEKVLPKHSLLYEYFTVYNELTKVKYVTEGMRKPAFLSGEQKKAIVDLLFKTNRKVTVKQLKEDYFKKIECFDSVEISGVEDRFNASLGTYHDLLKIIKDKDFLDNEENEDILEDIVLTLTLFEDREMIEERLKTYAHLFDDKVMKQLKRRRYTGWGRLSRKLINGIRDKQSGKTILDFLKSDGFANRNFMQLIHDDSLTFKEDIQKAQVSGQGDSLHEHIANLAGSPAIKKGILQTVKVVDELVKVMGRHKPENIVIEMARENQTTQKGQKNSRERMKRIEEGIKELGSQILKEHPVENTQLQNEKLYLYYLQNGRDMYVDQELDINRLSDYDVDHIVPQSFLKDDSIDNKVLTRSDKARGKSDNVPSEEVVKKMKNYWRQLLNAKLITQRKFDNLTKAERGGLSELDKAGFIKRQLVETRQITKHVAQILDSRMNTKYDENDKLIREVKVITLKSKLVSDFRKDFQFYKVREINNYHHAHDAYLNAVVGTALIKKYPKLESEFVYGDYKVYDVRKMIAKSEQEIGKATAKYFFYSNIMNFFKTEITLANGEIRKRPLIETNGETGEIVWDKGRDFATVRKVLSMPQVNIVKKTEVQTGGFSKESILPKRNSDKLIARKKDWDPKKYGGFDSPTVAYSVLVVAKVEKGKSKKLKSVKELLGITIMERSSFEKNPIDFLEAKGYKEVKKDLIIKLPKYSLFELENGRKRMLASAGELQKGNELALPSKYVNFLYLASHYEKLKGSPEDNEQKQLFVEQHKHYLDEIIEQISEFSKRVILADANLDKVLSAYNKHRDKPIREQAENIIHLFTLTNLGAPAAFKYFDTTIDRKRYTSTKEVLDATLIHQSITGLYETRIDLSQLGGDGGEAAAKEAAAKEAAAKEAAAKEAAAKEAAAKGGMDPLQLLQPLEAEIKGTKLKAHWNSGATITCVPQAFLEEEVPIKNIWIKTIHGEKEQPVYYLTFKIQGRKVEAEVISSPYDYILVSPSDIPWLMKKPLQLTTLVPLQEYEERLLKQTMLTGSYKEKLQSLFLKYDALWQHWENQVGHRRIKPHHIATGTVNPRPQKQYPINPKAKASIQTVINDLLKQGVLIQQNSIMNTPVYPVPKPDGKWRMVLDYREVNKTIPLIAAQNQHSAGILSSIFRGKYKTTLDLSNGFWAHSITPESYWLTAFTWLGQQYCWTRLPQGFLNSPALFTADVVDLLKEVPNVQVYVDDIYISHDDPREHLEQLEKVFSLLLNAGYVVSLKKSEIAQHEVEFLGFNITKEGRGLTETFKQKLLNITPPRDLKQLQSILGLLNFARNFIPNFSELVKPLYNIIATANGKYITWTTDNSQQLQNIISMLNSAENLEERNPEVRLIMKVNTSPSAGYIRFYNEFAKRPIMYLNYVYTKAEVKFTNTEKLLTTIHKGLIKALDLGMGQEILVYSPIVSMTKIQKTPLPERKALPIRWITWMSYLEDPRIQFHYDKTLPELQQVPTVTDDIIAKIKHPSEFSMVFYTDGSAIKHPNVNKSHNAGMGIAQVQFKPEFTVINTWSIPLGDHTAQLAEVAAVEFACKKALKIDGPVLIVTDSFYVAESVNKELPYWQSNGFFNNKKKPLKHVSKWKSIADCIQLKPDIIIIHEKGHQPTASTFHTEGNNLADKLATQGSYVVNAGKRTADGSEFEKRTADGSEFESPKKKAKVE

SEQ ID NO: 6466 - protein, 2106 aa, synthetic construct
MPAAKRVKLDGGDKKYSIGLDIGTNSVGWAVITDEYKVPSKKFKVLGNTDRHSIKKNLIGALLFDSGETAEATRLKRTARRRYTRRKNRICYLQEIFSNEMAKVDDSFFHRLEESFLVEEDKKHERHPIFGNIVDEVAYHEKYPTIYHLRKKLVDSTDKADLRLIYLALAHMIKFRGHFLIEGDLNPDNSDVDKLFIQLVQTYNQLFEENPINASGVDAKAILSARLSKSRRLENLIAQLPGEKKNGLFGNLIALSLGLTPNFKSNFDLAEDAKLQLSKDTYDDDLDNLLAQIGDQYADLFLAAKNLSDAILLSDILRVNTEITKAPLSASMIKRYDEHHQDLTLLKALVRQQLPEKYKEIFFDQSKNGYAGYIDGGASQEEFYKFIKPILEKMDGTEELLVKLNREDLLRKQRTFDNGSIPHQIHLGELHAILRRQEDFYPFLKDNREKIEKILTFRIPYYVGPLARGNSRFAWMTRKSEETITPWNFEEVVDKGASAQSFIERMTNFDKNLPNEKVLPKHSLLYEYFTVYNELTKVKYVTEGMRKPAFLSGEQKKAIVDLLFKTNRKVTVKQLKEDYFKKIECFDSVEISGVEDRFNASLGTYHDLLKIIKDKDFLDNEENEDILEDIVLTLTLFEDREMIEERLKTYAHLFDDKVMKQLKRRRYTGWGRLSRKLINGIRDKQSGKTILDFLKSDGFANRNFMQLIHDDSLTFKEDIQKAQVSGQGDSLHEHIANLAGSPAIKKGILQTVKVVDELVKVMGRHKPENIVIEMARENQTTQKGQKNSRERMKRIEEGIKELGSQILKEHPVENTQLQNEKLYLYYLQNGRDMYVDQELDINRLSDYDVDHIVPQSFLKDDSIDNKVLTRSDKARGKSDNVPSEEVVKKMKNYWRQLLNAKLITQRKFDNLTKAERGGLSELDKAGFIKRQLVETRQITKHVAQILDSRMNTKYDENDKLIREVKVITLKSKLVSDFRKDFQFYKVREINNYHHAHDAYLNAVVGTALIKKYPKLESEFVYGDYKVYDVRKMIAKSEQEIGKATAKYFFYSNIMNFFKTEITLANGEIRKRPLIETNGETGEIVWDKGRDFATVRKVLSMPQVNIVKKTEVQTGGFSKESILPKRNSDKLIARKKDWDPKKYGGFDSPTVAYSVLVVAKVEKGKSKKLKSVKELLGITIMERSSFEKNPIDFLEAKGYKEVKKDLIIKLPKYSLFELENGRKRMLASAGELQKGNELALPSKYVNFLYLASHYEKLKGSPEDNEQKQLFVEQHKHYLDEIIEQISEFSKRVILADANLDKVLSAYNKHRDKPIREQAENIIHLFTLTNLGAPAAFKYFDTTIDRKRYTSTKEVLDATLIHQSITGLYETRIDLSQLGGDGGEAAAKEAAAKEAAAKEAAAKEAAAKEAAAKGGIPWLMKKPLQLTTLVPLQEYEERLLKQTMLTGSYKEKLQSLFLKYDALWQHWENQVGHRRIKPHHIATGTVNPRPQKQYPINPKAKASIQTVINDLLKQGVLIQQNSIMNTPVYPVPKPDGKWRMVLDYREVNKTIPLIAAQNQHSAGILSSIFRGKYKTTLDLSNGFWAHSITPESYWLTAFTWLGQQYCWTRLPQGFLNSPALFNADVVDLLKEVPNVQVYVDDIYISHDDPREHLEQLEKVFSLLLNAGYVVSLKKSEIAQHEVEFLGFNITKEGRGLTETFKQKLLNITPPRDLKQLQSILGLLNFARNFIPNFSELVKPLYNIIATAPGKYITWTTDNSQQLQNIISMLNSAENLEERNPEVRLIMKVNTSPSAGYIRFYNEFAKRPIMYLNYVYTKAEVKFTNTEKLLTTIHKGLIKALDLGMGQEILVYSPIVSMTKIQKTPLPERKALPIRWITWMSYLEDPRIQFHYDKTLPELQQVPTVTDDIIAKIKHPSEFSMVFYTDGSAIKHPNVNKSHNAGMGIAQVQFKPEFTVINTWSIPLGDHTAQLAEVAAVEFACKKALKIDGPVLIVTDSFYVAESVNKELPYWQSNGFFNNKKKPLKHVSKWKSIADCIQLKPDIIIIHEKGHQPTASTFHTEGNNLADKLATQGSYVVNAGKRTADGSEFEKRTADGSEFESPKKKAKVE

SEQ ID NO: 6467 - protein, 2113 aa, synthetic construct
MPAAKRVKLDGGDKKYSIGLDIGTNSVGWAVITDEYKVPSKKFKVLGNTDRHSIKKNLIGALLFDSGETAEATRLKRTARRRYTRRKNRICYLQEIFSNEMAKVDDSFFHRLEESFLVEEDKKHERHPIFGNIVDEVAYHEKYPTIYHLRKKLVDSTDKADLRLIYLALAHMIKFRGHFLIEGDLNPDNSDVDKLFIQLVQTYNQLFEENPINASGVDAKAILSARLSKSRRLENLIAQLPGEKKNGLFGNLIALSLGLTPNFKSNFDLAEDAKLQLSKDTYDDDLDNLLAQIGDQYADLFLAAKNLSDAILLSDILRVNTEITKAPLSASMIKRYDEHHQDLTLLKALVRQQLPEKYKEIFFDQSKNGYAGYIDGGASQEEFYKFIKPILEKMDGTEELLVKLNREDLLRKQRTFDNGSIPHQIHLGELHAILRRQEDFYPFLKDNREKIEKILTFRIPYYVGPLARGNSRFAWMTRKSEETITPWNFEEVVDKGASAQSFIERMTNFDKNLPNEKVLPKHSLLYEYFTVYNELTKVKYVTEGMRKPAFLSGEQKKAIVDLLFKTNRKVTVKQLKEDYFKKIECFDSVEISGVEDRFNASLGTYHDLLKIIKDKDFLDNEENEDILEDIVLTLTLFEDREMIEERLKTYAHLFDDKVMKQLKRRRYTGWGRLSRKLINGIRDKQSGKTILDFLKSDGFANRNFMQLIHDDSLTFKEDIQKAQVSGQGDSLHEHIANLAGSPAIKKGILQTVKVVDELVKVMGRHKPENIVIEMARENQTTQKGQKNSRERMKRIEEGIKELGSQILKEHPVENTQLQNEKLYLYYLQNGRDMYVDQELDINRLSDYDVDHIVPQSFLKDDSIDNKVLTRSDKARGKSDNVPSEEVVKKMKNYWRQLLNAKLITQRKFDNLTKAERGGLSELDKAGFIKRQLVETRQITKHVAQILDSRMNTKYDENDKLIREVKVITLKSKLVSDFRKDFQFYKVREINNYHHAHDAYLNAVVGTALIKKYPKLESEFVYGDYKVYDVRKMIAKSEQEIGKATAKYFFYSNIMNFFKTEITLANGEIRKRPLIETNGETGEIVWDKGRDFATVRKVLSMPQVNIVKKTEVQTGGFSKESILPKRNSDKLIARKKDWDPKKYGGFDSPTVAYSVLVVAKVEKGKSKKLKSVKELLGITIMERSSFEKNPIDFLEAKGYKEVKKDLIIKLPKYSLFELENGRKRMLASAGELQKGNELALPSKYVNFLYLASHYEKLKGSPEDNEQKQLFVEQHKHYLDEIIEQISEFSKRVILADANLDKVLSAYNKHRDKPIREQAENIIHLFTLTNLGAPAAFKYFDTTIDRKRYTSTKEVLDATLIHQSITGLYETRIDLSQLGGDGGEAAAKEAAAKEAAAKEAAAKEAAAKEAAAKGGVLNLEEEYRLHEKPVPSSIDPSWLQLFPTVWAERAGMGLANQVPPVVVELRSGASPVAVRQYPMSKEAREGIRPHIQRFLDLGVLVPCQSPWNTPLLPVKKPGTNDYRPVQDLREINKRVQDIHPTVPNPYNLLSSLPPSHTWYSVLDLKDAFFCLKLHPNSQPLFAFEWRDPEKGNTGQLTWTRLPQGFKNSPTLFDEALHRDLAPFRALNPQVVLLQYVDDLLVAAPTYRDCKEGTQKLLQELSKLGYRVSAKKAQLCQKEVTYLGYLLKEGKRWLTPARKATVMKIPPPTTPRQVREFLGTAGFCRLWIPGFASLAAPLYPLTKESIPFIWTEEHQKAFDRIKEALLSAPALALPDLTKPFTLYVDERAGVARGVLTQTLGPWRRPVAYLSKKLDPVASGWPTCLKAVAAVALLLKDADKLTLGQNVTVIASHSLESIVRQPPDRWMTNARMTHYQSLLLNERVSFAPPAVLNPATLLPVESEATPVHRCSEILAEETGTRRDLKDQPLPGVPAWYTDGSSFIAEGKRRAGAAIVDGKRTVWASSLPEGTSAQKAELVALTQALRLAEGKDINIYTDSRYAFATAHIHGAIYKQRGLLTSAGKDIKNKEEILALLEAIHLPKRVAIIHCPGHQKGNDPVATGNRRADEAAKQAALSTRVLAETTKPAGKRTADGSEFEKRTADGSEFESPKKKAKVE

SEQ ID NO: 6468 - protein, 2113 aa, synthetic construct
MPAAKRVKLDGGDKKYSIGLDIGTNSVGWAVITDEYKVPSKKFKVLGNTDRHSIKKNLIGALLFDSGETAEATRLKRTARRRYTRRKNRICYLQEIFSNEMAKVDDSFFHRLEESFLVEEDKKHERHPIFGNIVDEVAYHEKYPTIYHLRKKLVDSTDKADLRLIYLALAHMIKFRGHFLIEGDLNPDNSDVDKLFIQLVQTYNQLFEENPINASGVDAKAILSARLSKSRRLENLIAQLPGEKKNGLFGNLIALSLGLTPNFKSNFDLAEDAKLQLSKDTYDDDLDNLLAQIGDQYADLFLAAKNLSDAILLSDILRVNTEITKAPLSASMIKRYDEHHQDLTLLKALVRQQLPEKYKEIFFDQSKNGYAGYIDGGASQEEFYKFIKPILEKMDGTEELLVKLNREDLLRKQRTFDNGSIPHQIHLGELHAILRRQEDFYPFLKDNREKIEKILTFRIPYYVGPLARGNSRFAWMTRKSEETITPWNFEEVVDKGASAQSFIERMTNFDKNLPNEKVLPKHSLLYEYFTVYNELTKVKYVTEGMRKPAFLSGEQKKAIVDLLFKTNRKVTVKQLKEDYFKKIECFDSVEISGVEDRFNASLGTYHDLLKIIKDKDFLDNEENEDILEDIVLTLTLFEDREMIEERLKTYAHLFDDKVMKQLKRRRYTGWGRLSRKLINGIRDKQSGKTILDFLKSDGFANRNFMQLIHDDSLTFKEDIQKAQVSGQGDSLHEHIANLAGSPAIKKGILQTVKVVDELVKVMGRHKPENIVIEMARENQTTQKGQKNSRERMKRIEEGIKELGSQILKEHPVENTQLQNEKLYLYYLQNGRDMYVDQELDINRLSDYDVDHIVPQSFLKDDSIDNKVLTRSDKARGKSDNVPSEEVVKKMKNYWRQLLNAKLITQRKFDNLTKAERGGLSELDKAGFIKRQLVETRQITKHVAQILDSRMNTKYDENDKLIREVKVITLKSKLVSDFRKDFQFYKVREINNYHHAHDAYLNAVVGTALIKKYPKLESEFVYGDYKVYDVRKMIAKSEQEIGKATAKYFFYSNIMNFFKTEITLANGEIRKRPLIETNGETGEIVWDKGRDFATVRKVLSMPQVNIVKKTEVQTGGFSKESILPKRNSDKLIARKKDWDPKKYGGFDSPTVAYSVLVVAKVEKGKSKKLKSVKELLGITIMERSSFEKNPIDFLEAKGYKEVKKDLIIKLPKYSLFELENGRKRMLASAGELQKGNELALPSKYVNFLYLASHYEKLKGSPEDNEQKQLFVEQHKHYLDEIIEQISEFSKRVILADANLDKVLSAYNKHRDKPIREQAENIIHLFTLTNLGAPAAFKYFDTTIDRKRYTSTKEVLDATLIHQSITGLYETRIDLSQLGGDGGEAAAKEAAAKEAAAKEAAAKEAAAKEAAAKGGVLNLEEEYRLHEKPVPSSIDPSWLQLFPTVWAERAGMGLANQVPPVVVELRSGASPVAVRQYPMSKEAREGIRPHIQRFLDLGVLVPCQSPWNTPLLPVKKPGTNDYRPVQDLREINKRVQDIHPTVPNPYNLLSSLPPSHTWYSVLDLKDAFFCLKLHPNSQPLFAFEWRDPEKGNTGQLTWTRLPQGFKNSPTLFNEALHRDLAPFRALNPQVVLLQYVDDLLVAAPTYRDCKEGTQKLLQELSKLGYRVSAKKAQLCQKEVTYLGYLLKEGKRWLTPARKATVMKIPPPTTPRQVREFLGTAGFCRLWIPGFASLAAPLYPLTKPSIPFIWTEEHQKAFDRIKEALLSAPALALPDLTKPFTLYVDERAGVARGVLTQTLGPWRRPVAYLSKKLDPVASGWPTCLKAVAAVALLLKDADKLTLGQNVTVIASHSLESIVRQPPDRWMTNARMTHYQSLLLNERVSFAPPAVLNPATLLPVESEATPVHRCSEILAEETGTRRDLKDQPLPGVPAWYTDGSSFIAEGKRRAGAAIVDGKRTVWASSLPEGTSAQKAELVALTQALRLAEGKDINIYTDSRYAFATAHIHGAIYKQRGWLTSAGKDIKNKEEILALLEAIHLPKRVAIIHCPGHQKGNDPVATGNRRADEAAKQAALSTRVLAETTKPAGKRTADGSEFEKRTADGSEFESPKKKAKVE

SEQ ID NO: 6469 - protein, 2115 aa, synthetic construct
MPAAKRVKLDGGDKKYSIGLDIGTNSVGWAVITDEYKVPSKKFKVLGNTDRHSIKKNLIGALLFDSGETAEATRLKRTARRRYTRRKNRICYLQEIFSNEMAKVDDSFFHRLEESFLVEEDKKHERHPIFGNIVDEVAYHEKYPTIYHLRKKLVDSTDKADLRLIYLALAHMIKFRGHFLIEGDLNPDNSDVDKLFIQLVQTYNQLFEENPINASGVDAKAILSARLSKSRRLENLIAQLPGEKKNGLFGNLIALSLGLTPNFKSNFDLAEDAKLQLSKDTYDDDLDNLLAQIGDQYADLFLAAKNLSDAILLSDILRVNTEITKAPLSASMIKRYDEHHQDLTLLKALVRQQLPEKYKEIFFDQSKNGYAGYIDGGASQEEFYKFIKPILEKMDGTEELLVKLNREDLLRKQRTFDNGSIPHQIHLGELHAILRRQEDFYPFLKDNREKIEKILTFRIPYYVGPLARGNSRFAWMTRKSEETITPWNFEEVVDKGASAQSFIERMTNFDKNLPNEKVLPKHSLLYEYFTVYNELTKVKYVTEGMRKPAFLSGEQKKAIVDLLFKTNRKVTVKQLKEDYFKKIECFDSVEISGVEDRFNASLGTYHDLLKIIKDKDFLDNEENEDILEDIVLTLTLFEDREMIEERLKTYAHLFDDKVMKQLKRRRYTGWGRLSRKLINGIRDKQSGKTILDFLKSDGFANRNFMQLIHDDSLTFKEDIQKAQVSGQGDSLHEHIANLAGSPAIKKGILQTVKVVDELVKVMGRHKPENIVIEMARENQTTQKGQKNSRERMKRIEEGIKELGSQILKEHPVENTQLQNEKLYLYYLQNGRDMYVDQELDINRLSDYDVDHIVPQSFLKDDSIDNKVLTRSDKARGKSDNVPSEEVVKKMKNYWRQLLNAKLITQRKFDNLTKAERGGLSELDKAGFIKRQLVETRQITKHVAQILDSRMNTKYDENDKLIREVKVITLKSKLVSDFRKDFQFYKVREINNYHHAHDAYLNAVVGTALIKKYPKLESEFVYGDYKVYDVRKMIAKSEQEIGKATAKYFFYSNIMNFFKTEITLANGEIRKRPLIETNGETGEIVWDKGRDFATVRKVLSMPQVNIVKKTEVQTGGFSKESILPKRNSDKLIARKKDWDPKKYGGFDSPTVAYSVLVVAKVEKGKSKKLKSVKELLGITIMERSSFEKNPIDFLEAKGYKEVKKDLIIKLPKYSLFELENGRKRMLASAGELQKGNELALPSKYVNFLYLASHYEKLKGSPEDNEQKQLFVEQHKHYLDEIIEQISEFSKRVILADANLDKVLSAYNKHRDKPIREQAENIIHLFTLTNLGAPAAFKYFDTTIDRKRYTSTKEVLDATLIHQSITGLYETRIDLSQLGGDGGEAAAKEAAAKEAAAKEAAAKEAAAKEAAAKGGTLNIEDEYRLHETSKEPDVPLGSTWLSDFPQAWAETGGMGLAVRQAPLIIPLKATSTPVSIKQYPMSQEARLGIKPHIQRLLDQGILVPCQSPWNTPLLPVKKPGTNDYRPVQDLREVNKRVEDIHPTVPNPYNLLSGLPPSHQWYTVLDLKDAFFCLRLHPTSQPLFAFEWRDPEMGISGQLTWTRLPQGFKNSPTLFDEALHRDLADFRIQHPDLILLQYVDDLLLAATSEQDCQRGTRALLQTLGNLGYRASAKKAQICQKQVKYLGYLLKEGQRWLTEARKETVMGQPTPKTPRQLREFLGTAGFCRLWIPGFAEMAAPLYPLTKTGTLFNWGPDQQKAYQEIKQALLTAPALGLPDLTKPFELFVDEKQGYAKGVLTQKLGPWRRPVAYLSKKLDPVAAGWPPCLRMVAAIAVLTKDAGKLTMGQPLVILAPHAVEALVKQPPDRWLSNARMTHYQAMLLDTDRVQFGPVVALNPATLLPLPEKEAPHDCLEILAETHGTRPDLTDQPIPDADYTWYTDGSSFLQEGQRRAGAAVTTETEVIWARALPAGTSAQRAELIALTQALKMAEGKKLNVYTDSRYAFATAHVHGEIYRRRGLLTSEGREIKNKNEILALLKALFLPKRLSIIHCPGHQKGNSAEARGNRMADQAAREAAMKAVLETSTLLAGKRTADGSEFEKRTADGSEFESPKKKAKVE

SEQ ID NO: 6470 - protein, 2115 aa, synthetic construct
MPAAKRVKLDGGDKKYSIGLDIGTNSVGWAVITDEYKVPSKKFKVLGNTDRHSIKKNLIGALLFDSGETAEATRLKRTARRRYTRRKNRICYLQEIFSNEMAKVDDSFFHRLEESFLVEEDKKHERHPIFGNIVDEVAYHEKYPTIYHLRKKLVDSTDKADLRLIYLALAHMIKFRGHFLIEGDLNPDNSDVDKLFIQLVQTYNQLFEENPINASGVDAKAILSARLSKSRRLENLIAQLPGEKKNGLFGNLIALSLGLTPNFKSNFDLAEDAKLQLSKDTYDDDLDNLLAQIGDQYADLFLAAKNLSDAILLSDILRVNTEITKAPLSASMIKRYDEHHQDLTLLKALVRQQLPEKYKEIFFDQSKNGYAGYIDGGASQEEFYKFIKPILEKMDGTEELLVKLNREDLLRKQRTFDNGSIPHQIHLGELHAILRRQEDFYPFLKDNREKIEKILTFRIPYYVGPLARGNSRFAWMTRKSEETITPWNFEEVVDKGASAQSFIERMTNFDKNLPNEKVLPKHSLLYEYFTVYNELTKVKYVTEGMRKPAFLSGEQKKAIVDLLFKTNRKVTVKQLKEDYFKKIECFDSVEISGVEDRFNASLGTYHDLLKIIKDKDFLDNEENEDILEDIVLTLTLFEDREMIEERLKTYAHLFDDKVMKQLKRRRYTGWGRLSRKLINGIRDKQSGKTILDFLKSDGFANRNFMQLIHDDSLTFKEDIQKAQVSGQGDSLHEHIANLAGSPAIKKGILQTVKVVDELVKVMGRHKPENIVIEMARENQTTQKGQKNSRERMKRIEEGIKELGSQILKEHPVENTQLQNEKLYLYYLQNGRDMYVDQELDINRLSDYDVDHIVPQSFLKDDSIDNKVLTRSDKARGKSDNVPSEEVVKKMKNYWRQLLNAKLITQRKFDNLTKAERGGLSELDKAGFIKRQLVETRQITKHVAQILDSRMNTKYDENDKLIREVKVITLKSKLVSDFRKDFQFYKVREINNYHHAHDAYLNAVVGTALIKKYPKLESEFVYGDYKVYDVRKMIAKSEQEIGKATAKYFFYSNIMNFFKTEITLANGEIRKRPLIETNGETGEIVWDKGRDFATVRKVLSMPQVNIVKKTEVQTGGFSKESILPKRNSDKLIARKKDWDPKKYGGFDSPTVAYSVLVVAKVEKGKSKKLKSVKELLGITIMERSSFEKNPIDFLEAKGYKEVKKDLIIKLPKYSLFELENGRKRMLASAGELQKGNELALPSKYVNFLYLASHYEKLKGSPEDNEQKQLFVEQHKHYLDEIIEQISEFSKRVILADANLDKVLSAYNKHRDKPIREQAENIIHLFTLTNLGAPAAFKYFDTTIDRKRYTSTKEVLDATLIHQSITGLYETRIDLSQLGGDGGEAAAKEAAAKEAAAKEAAAKEAAAKEAAAKGGTLNIEDEYRLHETSKEPDVPLGSTWLSDFPQAWAETGGMGLAVRQAPLIIPLKATSTPVSIKQYPMSQEARLGIKPHIQRLLDQGILVPCQSPWNTPLLPVKKPGTNDYRPVQDLREVNKRVEDIHPTVPNPYNLLSGLPPSHQWYTVLDLKDAFFCLRLHPTSQPLFAFEWRDPEMGISGQLTWTRLPQGFKNSPTLFNEALHRDLADFRIQHPDLILLQYVDDLLLAATSEQDCQRGTRALLQTLGNLGYRASAKKAQICQKQVKYLGYLLKEGQRWLTEARKETVMGQPTPKTPRQLREFLGTAGFCRLWIPGFAEMAAPLYPLTKPGTLFNWGPDQQKAYQEIKQALLTAPALGLPDLTKPFELFVDEKQGYAKGVLTQKLGPWRRPVAYLSKKLDPVAAGWPPCLRMVAAIAVLTKDAGKLTMGQPLVILAPHAVEALVKQPPDRWLSNARMTHYQAMLLDTDRVQFGPVVALNPATLLPLPEKEAPHDCLEILAETHGTRPDLTDQPIPDADYTWYTDGSSFLQEGQRRAGAAVTTETEVIWARALPAGTSAQRAELIALTQALKMAEGKKLNVYTDSRYAFATAHVHGEIYRRRGWLTSEGREIKNKNEILALLKALFLPKRLSIIHCPGHQKGNSAEARGNRMADQAAREAAMKAVLETSTLLAGKRTADGSEFEKRTADGSEFESPKKKAKVE

SEQ ID NO: 6471 - protein, 2094 aa, synthetic construct
MPAAKRVKLDGGDKKYSIGLDIGTNSVGWAVITDEYKVPSKKFKVLGNTDRHSIKKNLIGALLFDSGETAEATRLKRTARRRYTRRKNRICYLQEIFSNEMAKVDDSFFHRLEESFLVEEDKKHERHPIFGNIVDEVAYHEKYPTIYHLRKKLVDSTDKADLRLIYLALAHMIKFRGHFLIEGDLNPDNSDVDKLFIQLVQTYNQLFEENPINASGVDAKAILSARLSKSRRLENLIAQLPGEKKNGLFGNLIALSLGLTPNFKSNFDLAEDAKLQLSKDTYDDDLDNLLAQIGDQYADLFLAAKNLSDAILLSDILRVNTEITKAPLSASMIKRYDEHHQDLTLLKALVRQQLPEKYKEIFFDQSKNGYAGYIDGGASQEEFYKFIKPILEKMDGTEELLVKLNREDLLRKQRTFDNGSIPHQIHLGELHAILRRQEDFYPFLKDNREKIEKILTFRIPYYVGPLARGNSRFAWMTRKSEETITPWNFEEVVDKGASAQSFIERMTNFDKNLPNEKVLPKHSLLYEYFTVYNELTKVKYVTEGMRKPAFLSGEQKKAIVDLLFKTNRKVTVKQLKEDYFKKIECFDSVEISGVEDRFNASLGTYHDLLKIIKDKDFLDNEENEDILEDIVLTLTLFEDREMIEERLKTYAHLFDDKVMKQLKRRRYTGWGRLSRKLINGIRDKQSGKTILDFLKSDGFANRNFMQLIHDDSLTFKEDIQKAQVSGQGDSLHEHIANLAGSPAIKKGILQTVKVVDELVKVMGRHKPENIVIEMARENQTTQKGQKNSRERMKRIEEGIKELGSQILKEHPVENTQLQNEKLYLYYLQNGRDMYVDQELDINRLSDYDVDHIVPQSFLKDDSIDNKVLTRSDKARGKSDNVPSEEVVKKMKNYWRQLLNAKLITQRKFDNLTKAERGGLSELDKAGFIKRQLVETRQITKHVAQILDSRMNTKYDENDKLIREVKVITLKSKLVSDFRKDFQFYKVREINNYHHAHDAYLNAVVGTALIKKYPKLESEFVYGDYKVYDVRKMIAKSEQEIGKATAKYFFYSNIMNFFKTEITLANGEIRKRPLIETNGETGEIVWDKGRDFATVRKVLSMPQVNIVKKTEVQTGGFSKESILPKRNSDKLIARKKDWDPKKYGGFDSPTVAYSVLVVAKVEKGKSKKLKSVKELLGITIMERSSFEKNPIDFLEAKGYKEVKKDLIIKLPKYSLFELENGRKRMLASAGELQKGNELALPSKYVNFLYLASHYEKLKGSPEDNEQKQLFVEQHKHYLDEIIEQISEFSKRVILADANLDKVLSAYNKHRDKPIREQAENIIHLFTLTNLGAPAAFKYFDTTIDRKRYTSTKEVLDATLIHQSITGLYETRIDLSQLGGDGGPAPGGTVSLQDEHRLFDIPVTTSLPDVWLQDFPQAWAETGGLGRAKCQAPIIIDLKPTAVPVSIKQYPMSLEAHMGIRQHIIKFLELGVLRPCRSPWNTPLLPVKKPGTQDYRPVQDLREINKRTVDIHPTVPNPYNLLSTLKPDYSWYTVLDLKDAFFCLPLAPQSQELFAFEWKDPERGISGQLTWTRLPQGFKNSPTLFNEALHRDLTDFRTQHPEVTLLQYVDDLLLAAPTKKACTQGTRHLLQELGEKGYRASAKKAQICQTKVTYLGYILSEGKRWLTPGRIETVARIPPPRNPREVREFLGTAGFCRLWIPGFAELAAPLYALTKPSTPFTWQTEHQLAFEALKKALLSAPALGLPDTSKPFTLFLDERQGIAKGVLTQKLGPWKRPVAYLSKKLDPVAAGWPPCLRIMAATAMLVKDSAKLTLGQPLTVITPHTLEAIVRQPPDRWITNARLTHYQALLLDTDRVQFGPPVTLNPATLLPVPENQPSPHDCRQVLAETHGTREDLKDQELPDADHTWYTDGSSYLDSGTRRAGAAVVDGHNTIWAQSLPPGTSAQKAELIALTKALELSKGKKANIYTDSRYAFATAHTHGSIYERRGWLTSEGKEIKNKAEIIALLKALFLPQEVAIIHCPGHQKGQDPVAVGNRQADRVARQAAMAEVLTLATEPDNTSHITAGKRTADGSEFEKRTADGSEFESPKKKAKVE

SEQ ID NO: 6472 - protein, 2088 aa, synthetic construct
MPAAKRVKLDGGDKKYSIGLDIGTNSVGWAVITDEYKVPSKKFKVLGNTDRHSIKKNLIGALLFDSGETAEATRLKRTARRRYTRRKNRICYLQEIFSNEMAKVDDSFFHRLEESFLVEEDKKHERHPIFGNIVDEVAYHEKYPTIYHLRKKLVDSTDKADLRLIYLALAHMIKFRGHFLIEGDLNPDNSDVDKLFIQLVQTYNQLFEENPINASGVDAKAILSARLSKSRRLENLIAQLPGEKKNGLFGNLIALSLGLTPNFKSNFDLAEDAKLQLSKDTYDDDLDNLLAQIGDQYADLFLAAKNLSDAILLSDILRVNTEITKAPLSASMIKRYDEHHQDLTLLKALVRQQLPEKYKEIFFDQSKNGYAGYIDGGASQEEFYKFIKPILEKMDGTEELLVKLNREDLLRKQRTFDNGSIPHQIHLGELHAILRRQEDFYPFLKDNREKIEKILTFRIPYYVGPLARGNSRFAWMTRKSEETITPWNFEEVVDKGASAQSFIERMTNFDKNLPNEKVLPKHSLLYEYFTVYNELTKVKYVTEGMRKPAFLSGEQKKAIVDLLFKTNRKVTVKQLKEDYFKKIECFDSVEISGVEDRFNASLGTYHDLLKIIKDKDFLDNEENEDILEDIVLTLTLFEDREMIEERLKTYAHLFDDKVMKQLKRRRYTGWGRLSRKLINGIRDKQSGKTILDFLKSDGFANRNFMQLIHDDSLTFKEDIQKAQVSGQGDSLHEHIANLAGSPAIKKGILQTVKVVDELVKVMGRHKPENIVIEMARENQTTQKGQKNSRERMKRIEEGIKELGSQILKEHPVENTQLQNEKLYLYYLQNGRDMYVDQELDINRLSDYDVDHIVPQSFLKDDSIDNKVLTRSDKARGKSDNVPSEEVVKKMKNYWRQLLNAKLITQRKFDNLTKAERGGLSELDKAGFIKRQLVETRQITKHVAQILDSRMNTKYDENDKLIREVKVITLKSKLVSDFRKDFQFYKVREINNYHHAHDAYLNAVVGTALIKKYPKLESEFVYGDYKVYDVRKMIAKSEQEIGKATAKYFFYSNIMNFFKTEITLANGEIRKRPLIETNGETGEIVWDKGRDFATVRKVLSMPQVNIVKKTEVQTGGFSKESILPKRNSDKLIARKKDWDPKKYGGFDSPTVAYSVLVVAKVEKGKSKKLKSVKELLGITIMERSSFEKNPIDFLEAKGYKEVKKDLIIKLPKYSLFELENGRKRMLASAGELQKGNELALPSKYVNFLYLASHYEKLKGSPEDNEQKQLFVEQHKHYLDEIIEQISEFSKRVILADANLDKVLSAYNKHRDKPIREQAENIIHLFTLTNLGAPAAFKYFDTTIDRKRYTSTKEVLDATLIHQSITGLYETRIDLSQLGGDGGPAPGGTLNLEDEYRLYETSAEPEVSPGSTWLSDFPQAWAETGGMGLAVRQAPLIIPLKATSTPVSIKQYPMSQEAKLGIKPHIQRLLDQGILVPCQSPWNTPLLPVKKPGTNDYRPVQDLREVNKRVEDIHPTVPNPYNLLSGLPPSHRWYTVLDLKDAFFCLRLHPTSQPLFAFEWRDPGMGISGQLTWTRLPQGFKNSPTLFNEALHRDLADFRIQHPDLILLQYVDDILLAATSELDCQQGTRALLLTLGNLGYRASAKKAQLCQKQVKYLGYLLKEGQRWLTEARKETVMGQPTPKTPRQLREFLGKAGFCRLFIPGFAEMAAPLYPLTKPGTLFNWGPDQQKAYQEIKQALLTAPALGLPDLTKPFELFVDEKQGYAKGVLTQKLGPWRRPVAYLSKKLDPVAAGWPPCLRMVAAIAVLRKDAGKLTMGQPLVILAPHAVEALVKQPPDRWLSNARMTHYQAMLLDTDRVQFGPVVALNPATLLPLPEEGAPHDCLEILAETHGTRPDLTDQPIPDADHTWYTDGSSFLQEGQRKAGAAVTTETEVIWARALPAGTSAQRAELIALTQALKMAEGKRLNVYTDSRYAFATAHIHGEIYRRRGWLTSEGREIKNKSEILALLKALFLPKRLSIIHCLGHQKGDSAEARGNRLADQAAREAAIKTPPDTSTLLAGKRTADGSEFEKRTADGSEFESPKKKAKVE

SEQ ID NO: 6473 - protein, 2088 aa, synthetic construct
MPAAKRVKLDGGDKKYSIGLDIGTNSVGWAVITDEYKVPSKKFKVLGNTDRHSIKKNLIGALLFDSGETAEATRLKRTARRRYTRRKNRICYLQEIFSNEMAKVDDSFFHRLEESFLVEEDKKHERHPIFGNIVDEVAYHEKYPTIYHLRKKLVDSTDKADLRLIYLALAHMIKFRGHFLIEGDLNPDNSDVDKLFIQLVQTYNQLFEENPINASGVDAKAILSARLSKSRRLENLIAQLPGEKKNGLFGNLIALSLGLTPNFKSNFDLAEDAKLQLSKDTYDDDLDNLLAQIGDQYADLFLAAKNLSDAILLSDILRVNTEITKAPLSASMIKRYDEHHQDLTLLKALVRQQLPEKYKEIFFDQSKNGYAGYIDGGASQEEFYKFIKPILEKMDGTEELLVKLNREDLLRKQRTFDNGSIPHQIHLGELHAILRRQEDFYPFLKDNREKIEKILTFRIPYYVGPLARGNSRFAWMTRKSEETITPWNFEEVVDKGASAQSFIERMTNFDKNLPNEKVLPKHSLLYEYFTVYNELTKVKYVTEGMRKPAFLSGEQKKAIVDLLFKTNRKVTVKQLKEDYFKKIECFDSVEISGVEDRFNASLGTYHDLLKIIKDKDFLDNEENEDILEDIVLTLTLFEDREMIEERLKTYAHLFDDKVMKQLKRRRYTGWGRLSRKLINGIRDKQSGKTILDFLKSDGFANRNFMQLIHDDSLTFKEDIQKAQVSGQGDSLHEHIANLAGSPAIKKGILQTVKVVDELVKVMGRHKPENIVIEMARENQTTQKGQKNSRERMKRIEEGIKELGSQILKEHPVENTQLQNEKLYLYYLQNGRDMYVDQELDINRLSDYDVDHIVPQSFLKDDSIDNKVLTRSDKARGKSDNVPSEEVVKKMKNYWRQLLNAKLITQRKFDNLTKAERGGLSELDKAGFIKRQLVETRQITKHVAQILDSRMNTKYDENDKLIREVKVITLKSKLVSDFRKDFQFYKVREINNYHHAHDAYLNAVVGTALIKKYPKLESEFVYGDYKVYDVRKMIAKSEQEIGKATAKYFFYSNIMNFFKTEITLANGEIRKRPLIETNGETGEIVWDKGRDFATVRKVLSMPQVNIVKKTEVQTGGFSKESILPKRNSDKLIARKKDWDPKKYGGFDSPTVAYSVLVVAKVEKGKSKKLKSVKELLGITIMERSSFEKNPIDFLEAKGYKEVKKDLIIKLPKYSLFELENGRKRMLASAGELQKGNELALPSKYVNFLYLASHYEKLKGSPEDNEQKQLFVEQHKHYLDEIIEQISEFSKRVILADANLDKVLSAYNKHRDKPIREQAENIIHLFTLTNLGAPAAFKYFDTTIDRKRYTSTKEVLDATLIHQSITGLYETRIDLSQLGGDGGPAPGGTLGIEDEYRLHETSTEPDVSLGSTWLSDFPQAWAETGGMGLAVRQAPLIIPLKATSTPVSIQQYPMSHEARLGIKPHIQRLLDQGILVPCQSPWNTPLLPVKKPGTNDYRPVQDLREVNKRVEDIHPTVPNPYNLLSGLPPSHQWYTVLDLKDAFFCLRLHPTSQPLFAFEWRDPGMGISGQLTWTRLPQGFKNSPTLFNEALHRDLADFRIQHPDLILLQYVDDILLAATSELDCQQGTRALLQTLGDLGYRASAKKAQICQKQVKYLGYLLREGQRWLTEARKETVMGQPVPKTPRQLREFLGTAGFCRLWIPGFAEMAAPLYPLTKPGTLFSWGPDQQKAYQEIKQALLTAPALGLPDLTKPFELFVDEKQGYAKGVLTQKLGPWRRPVAYLSKKLDPVAAGWPPCLRMVAAIAVLTKDAGKLTMGQPLVILAPHAVEALVKQPPDRWLSNARMTHYQAMLLDTDRVQFGPVVALNPATLLPLPEEGAPHDCLEILAETHGTRPDLTDQPIPDADHTWYTDGSSFLQEGQRKAGAAVTTETEVIWAGALPAGTSAQRAELIALTQALKMAEGKRLNVYTDSRYAFATAHIHGEIYRRRGWLTSEGREIKNKSEILALLKALFLPKRLSIIHCLGHQKGDSAEARGNRLADQAAREAAIKTPPDTSTLLAGKRTADGSEFEKRTADGSEFESPKKKAKVE

SEQ ID NO: 6474 - protein, 2088 aa, synthetic construct
MPAAKRVKLDGGDKKYSIGLDIGTNSVGWAVITDEYKVPSKKFKVLGNTDRHSIKKNLIGALLFDSGETAEATRLKRTARRRYTRRKNRICYLQEIFSNEMAKVDDSFFHRLEESFLVEEDKKHERHPIFGNIVDEVAYHEKYPTIYHLRKKLVDSTDKADLRLIYLALAHMIKFRGHFLIEGDLNPDNSDVDKLFIQLVQTYNQLFEENPINASGVDAKAILSARLSKSRRLENLIAQLPGEKKNGLFGNLIALSLGLTPNFKSNFDLAEDAKLQLSKDTYDDDLDNLLAQIGDQYADLFLAAKNLSDAILLSDILRVNTEITKAPLSASMIKRYDEHHQDLTLLKALVRQQLPEKYKEIFFDQSKNGYAGYIDGGASQEEFYKFIKPILEKMDGTEELLVKLNREDLLRKQRTFDNGSIPHQIHLGELHAILRRQEDFYPFLKDNREKIEKILTFRIPYYVGPLARGNSRFAWMTRKSEETITPWNFEEVVDKGASAQSFIERMTNFDKNLPNEKVLPKHSLLYEYFTVYNELTKVKYVTEGMRKPAFLSGEQKKAIVDLLFKTNRKVTVKQLKEDYFKKIECFDSVEISGVEDRFNASLGTYHDLLKIIKDKDFLDNEENEDILEDIVLTLTLFEDREMIEERLKTYAHLFDDKVMKQLKRRRYTGWGRLSRKLINGIRDKQSGKTILDFLKSDGFANRNFMQLIHDDSLTFKEDIQKAQVSGQGDSLHEHIANLAGSPAIKKGILQTVKVVDELVKVMGRHKPENIVIEMARENQTTQKGQKNSRERMKRIEEGIKELGSQILKEHPVENTQLQNEKLYLYYLQNGRDMYVDQELDINRLSDYDVDHIVPQSFLKDDSIDNKVLTRSDKARGKSDNVPSEEVVKKMKNYWRQLLNAKLITQRKFDNLTKAERGGLSELDKAGFIKRQLVETRQITKHVAQILDSRMNTKYDENDKLIREVKVITLKSKLVSDFRKDFQFYKVREINNYHHAHDAYLNAVVGTALIKKYPKLESEFVYGDYKVYDVRKMIAKSEQEIGKATAKYFFYSNIMNFFKTEITLANGEIRKRPLIETNGETGEIVWDKGRDFATVRKVLSMPQVNIVKKTEVQTGGFSKESILPKRNSDKLIARKKDWDPKKYGGFDSPTVAYSVLVVAKVEKGKSKKLKSVKELLGITIMERSSFEKNPIDFLEAKGYKEVKKDLIIKLPKYSLFELENGRKRMLASAGELQKGNELALPSKYVNFLYLASHYEKLKGSPEDNEQKQLFVEQHKHYLDEIIEQISEFSKRVILADANLDKVLSAYNKHRDKPIREQAENIIHLFTLTNLGAPAAFKYFDTTIDRKRYTSTKEVLDATLIHQSITGLYETRIDLSQLGGDGGPAPGGTLNIEDEYRLHETSKGPDVPLGSTWLSDFPQAWAETGGMGLAVRQAPLIIPLKATSTPVSIKQYPMSQEARLGIKPHIQRLLDQGILVPCQSPWNTPLLPVKKPGTNDYRPVQDLREVNKRVEDIHPTVPNPYNLLSGLPPSHQWYTVLDLKDAFFCLRLHPTSQSLFAFEWRDPEMGISGQLTWTRLPQGFKNSPTLFDEALHRDLADFRIQHPDLILLQYVDDLLLAATSELDCQQGTRALLQTLGDLGYRASAKKAQICQKQVKYLGYLLKEGQRWLTEARKETVMGQPTPKTPRQLREFLGTAGFCRLWIPGFAEMAAPLYPLTKTGTLFEWGPDQQKAYQEIKQALLTAPALGLPDLTKPFELFVDEKQGYAKGVLTQKLGPWRRPVAYLSKKLDPVAAGWPPCLRMVAAIAVLTKDAGKLTMGQPLVILAPHAVEALVKQPPDRWLSNARMTHYQALLLDTDRVQFGPIVALNPATLLPLPEEGLQHDCLDILAEAHGTRPDLTDQPLPDADHTWYTDGSSFLQEGQRKAGAAVTTETEVVWAKALPAGTSAQRAELIALTQALKMAEGKKLNVYTDSRYAFATAHIHGEIYRRRGLLTSEGKEIKNKDEILALLKALFLPKRLSIIHCPGHQKGNRAEARGNRMADQAAREVATRETPETSTLLAGKRTADGSEFEKRTADGSEFESPKKKAKVE

SEQ ID NO: 6475 - protein, 2088 aa, synthetic construct
MPAAKRVKLDGGDKKYSIGLDIGTNSVGWAVITDEYKVPSKKFKVLGNTDRHSIKKNLIGALLFDSGETAEATRLKRTARRRYTRRKNRICYLQEIFSNEMAKVDDSFFHRLEESFLVEEDKKHERHPIFGNIVDEVAYHEKYPTIYHLRKKLVDSTDKADLRLIYLALAHMIKFRGHFLIEGDLNPDNSDVDKLFIQLVQTYNQLFEENPINASGVDAKAILSARLSKSRRLENLIAQLPGEKKNGLFGNLIALSLGLTPNFKSNFDLAEDAKLQLSKDTYDDDLDNLLAQIGDQYADLFLAAKNLSDAILLSDILRVNTEITKAPLSASMIKRYDEHHQDLTLLKALVRQQLPEKYKEIFFDQSKNGYAGYIDGGASQEEFYKFIKPILEKMDGTEELLVKLNREDLLRKQRTFDNGSIPHQIHLGELHAILRRQEDFYPFLKDNREKIEKILTFRIPYYVGPLARGNSRFAWMTRKSEETITPWNFEEVVDKGASAQSFIERMTNFDKNLPNEKVLPKHSLLYEYFTVYNELTKVKYVTEGMRKPAFLSGEQKKAIVDLLFKTNRKVTVKQLKEDYFKKIECFDSVEISGVEDRFNASLGTYHDLLKIIKDKDFLDNEENEDILEDIVLTLTLFEDREMIEERLKTYAHLFDDKVMKQLKRRRYTGWGRLSRKLINGIRDKQSGKTILDFLKSDGFANRNFMQLIHDDSLTFKEDIQKAQVSGQGDSLHEHIANLAGSPAIKKGILQTVKVVDELVKVMGRHKPENIVIEMARENQTTQKGQKNSRERMKRIEEGIKELGSQILKEHPVENTQLQNEKLYLYYLQNGRDMYVDQELDINRLSDYDVDHIVPQSFLKDDSIDNKVLTRSDKARGKSDNVPSEEVVKKMKNYWRQLLNAKLITQRKFDNLTKAERGGLSELDKAGFIKRQLVETRQITKHVAQILDSRMNTKYDENDKLIREVKVITLKSKLVSDFRKDFQFYKVREINNYHHAHDAYLNAVVGTALIKKYPKLESEFVYGDYKVYDVRKMIAKSEQEIGKATAKYFFYSNIMNFFKTEITLANGEIRKRPLIETNGETGEIVWDKGRDFATVRKVLSMPQVNIVKKTEVQTGGFSKESILPKRNSDKLIARKKDWDPKKYGGFDSPTVAYSVLVVAKVEKGKSKKLKSVKELLGITIMERSSFEKNPIDFLEAKGYKEVKKDLIIKLPKYSLFELENGRKRMLASAGELQKGNELALPSKYVNFLYLASHYEKLKGSPEDNEQKQLFVEQHKHYLDEIIEQISEFSKRVILADANLDKVLSAYNKHRDKPIREQAENIIHLFTLTNLGAPAAFKYFDTTIDRKRYTSTKEVLDATLIHQSITGLYETRIDLSQLGGDGGPAPGGTLNIEDEYRLHEISTEPDVSPGSTWLSDFPQAWAETGGMGLAVRQAPLIIPLKATSTPVSIKQYPMSQEAKLGIKPHIQRLLDQGILVPCQSPWNTPLLPVKKPGTNDYRPVQGLREVNKRVEDIHPTVPNPYNLLSGLPTSHRWYTVLDLKDAFFCLRLHPTSQPLFASEWRDPGMGISGQLTWTRLPQGFKNSPTLFNEALHRGLADFRIQHPDLILLQYVDDLLLAATSELDCQQGTRALLKTLGNLGYRASAKKAQICQKQVKYLGYLLREGQRWLTEARKETVMGQPTPKTPRQLREFLGTAGFCRLWIPRFAEMAAPLYPLTKPGTLFNWGPDQQKAYHEIKQALLTAPALGLPDLTKPFELFVDEKQGYAKGVLTQKLGPWRRPVAYLSKKLDPVAAGWPPCLRMVAAIAVLTKDAGKLTMGQPLVILAPHAVEALVKQPPDRWLSNARMTHYQAMLLDTDRVQFGPVVALNPATLLPLPEEGAPHDCLEILAETHGTEPDLTDQPIPDADHTWYTDGSSFLQEGQRKAGAAVTTETEVIWARALPAGTSAQRAELIALTQALKMAEGKRLNVYTDSRYAFATAHIHGEIYKRRGWLTSEGREIKNKSEILALLKALFLPKRLSIIHCLGHQKGDSAEARGNRLADQAAREAAIKTPPDTSTLLAGKRTADGSEFEKRTADGSEFESPKKKAKVE

SEQ ID NO: 6476 - protein, 2082 aa, synthetic construct
MPAAKRVKLDGGDKKYSIGLDIGTNSVGWAVITDEYKVPSKKFKVLGNTDRHSIKKNLIGALLFDSGETAEATRLKRTARRRYTRRKNRICYLQEIFSNEMAKVDDSFFHRLEESFLVEEDKKHERHPIFGNIVDEVAYHEKYPTIYHLRKKLVDSTDKADLRLIYLALAHMIKFRGHFLIEGDLNPDNSDVDKLFIQLVQTYNQLFEENPINASGVDAKAILSARLSKSRRLENLIAQLPGEKKNGLFGNLIALSLGLTPNFKSNFDLAEDAKLQLSKDTYDDDLDNLLAQIGDQYADLFLAAKNLSDAILLSDILRVNTEITKAPLSASMIKRYDEHHQDLTLLKALVRQQLPEKYKEIFFDQSKNGYAGYIDGGASQEEFYKFIKPILEKMDGTEELLVKLNREDLLRKQRTFDNGSIPHQIHLGELHAILRRQEDFYPFLKDNREKIEKILTFRIPYYVGPLARGNSRFAWMTRKSEETITPWNFEEVVDKGASAQSFIERMTNFDKNLPNEKVLPKHSLLYEYFTVYNELTKVKYVTEGMRKPAFLSGEQKKAIVDLLFKTNRKVTVKQLKEDYFKKIECFDSVEISGVEDRFNASLGTYHDLLKIIKDKDFLDNEENEDILEDIVLTLTLFEDREMIEERLKTYAHLFDDKVMKQLKRRRYTGWGRLSRKLINGIRDKQSGKTILDFLKSDGFANRNFMQLIHDDSLTFKEDIQKAQVSGQGDSLHEHIANLAGSPAIKKGILQTVKVVDELVKVMGRHKPENIVIEMARENQTTQKGQKNSRERMKRIEEGIKELGSQILKEHPVENTQLQNEKLYLYYLQNGRDMYVDQELDINRLSDYDVDHIVPQSFLKDDSIDNKVLTRSDKARGKSDNVPSEEVVKKMKNYWRQLLNAKLITQRKFDNLTKAERGGLSELDKAGFIKRQLVETRQITKHVAQILDSRMNTKYDENDKLIREVKVITLKSKLVSDFRKDFQFYKVREINNYHHAHDAYLNAVVGTALIKKYPKLESEFVYGDYKVYDVRKMIAKSEQEIGKATAKYFFYSNIMNFFKTEITLANGEIRKRPLIETNGETGEIVWDKGRDFATVRKVLSMPQVNIVKKTEVQTGGFSKESILPKRNSDKLIARKKDWDPKKYGGFDSPTVAYSVLVVAKVEKGKSKKLKSVKELLGITIMERSSFEKNPIDFLEAKGYKEVKKDLIIKLPKYSLFELENGRKRMLASAGELQKGNELALPSKYVNFLYLASHYEKLKGSPEDNEQKQLFVEQHKHYLDEIIEQISEFSKRVILADANLDKVLSAYNKHRDKPIREQAENIIHLFTLTNLGAPAAFKYFDTTIDRKRYTSTKEVLDATLIHQSITGLYETRIDLSQLGGDGGPAPGGTLQLDDEYRLYSPLVKPDQNIQFWLEQFPQAWAETAGMGLAKQVPPQVIQLKASATPVSVRQYPLSKEAQEGIRPHVQRLIQQGILVPVQSPWNTPLLPVRKPGTNDYRPVQDLREVNKRVQDIHPTVPNPYNLLCALPPQRSWYTVLDLKDAFFCLRLHPTSQPLFAFEWRDPGTGRTGQLTWTRLPQGFKNSPTIFDEALHRDLANFRIQHPQVTLLQYVDDLLLAGATKQDCLEGTKALLLELSDLGYRASAKKAQICRREVTYLGYSLRDGQRWLTEARKKTVVQIPAPTTAKQVREFLGTAGFCRLWIPGFATLAAPLYPLTKEKGEFSWAPEHQKAFDAIKKALLSAPALALPDVTKPFTLYVDERKGVARGVLTQTLGPWRRPVAYLSKKLDPVASGWPVCLKAIAAVAILVKDADKLTLGQNITVIAPHALENIVRQPPDRWMTNARMTHYQSLLLTERVTFAPPAALNPATLLPEETDEPVTHDCHQLLIEETGVRKDLTDIPLTGEVLTWFTDGSSYVVEGKRMAGAAVVDGTRTIWASSLPEGTSAQKAELMALTQALRLAEGKSINIYTDSRYAFATAHVHGAIYKQRGLLTSAGREIKNKEEILSLLEALHLPKRLAIIHCPGHQKAKDPISRGNQMADRVAKQAAQGVNLLAGKRTADGSEFEKRTADGSEFESPKKKAKVE

SEQ ID NO: 6477 - protein, 2168 aa, synthetic construct
MPAAKRVKLDGGDKKYSIGLDIGTNSVGWAVITDEYKVPSKKFKVLGNTDRHSIKKNLIGALLFDSGETAEATRLKRTARRRYTRRKNRICYLQEIFSNEMAKVDDSFFHRLEESFLVEEDKKHERHPIFGNIVDEVAYHEKYPTIYHLRKKLVDSTDKADLRLIYLALAHMIKFRGHFLIEGDLNPDNSDVDKLFIQLVQTYNQLFEENPINASGVDAKAILSARLSKSRRLENLIAQLPGEKKNGLFGNLIALSLGLTPNFKSNFDLAEDAKLQLSKDTYDDDLDNLLAQIGDQYADLFLAAKNLSDAILLSDILRVNTEITKAPLSASMIKRYDEHHQDLTLLKALVRQQLPEKYKEIFFDQSKNGYAGYIDGGASQEEFYKFIKPILEKMDGTEELLVKLNREDLLRKQRTFDNGSIPHQIHLGELHAILRRQEDFYPFLKDNREKIEKILTFRIPYYVGPLARGNSRFAWMTRKSEETITPWNFEEVVDKGASAQSFIERMTNFDKNLPNEKVLPKHSLLYEYFTVYNELTKVKYVTEGMRKPAFLSGEQKKAIVDLLFKTNRKVTVKQLKEDYFKKIECFDSVEISGVEDRFNASLGTYHDLLKIIKDKDFLDNEENEDILEDIVLTLTLFEDREMIEERLKTYAHLFDDKVMKQLKRRRYTGWGRLSRKLINGIRDKQSGKTILDFLKSDGFANRNFMQLIHDDSLTFKEDIQKAQVSGQGDSLHEHIANLAGSPAIKKGILQTVKVVDELVKVMGRHKPENIVIEMARENQTTQKGQKNSRERMKRIEEGIKELGSQILKEHPVENTQLQNEKLYLYYLQNGRDMYVDQELDINRLSDYDVDHIVPQSFLKDDSIDNKVLTRSDKARGKSDNVPSEEVVKKMKNYWRQLLNAKLITQRKFDNLTKAERGGLSELDKAGFIKRQLVETRQITKHVAQILDSRMNTKYDENDKLIREVKVITLKSKLVSDFRKDFQFYKVREINNYHHAHDAYLNAVVGTALIKKYPKLESEFVYGDYKVYDVRKMIAKSEQEIGKATAKYFFYSNIMNFFKTEITLANGEIRKRPLIETNGETGEIVWDKGRDFATVRKVLSMPQVNIVKKTEVQTGGFSKESILPKRNSDKLIARKKDWDPKKYGGFDSPTVAYSVLVVAKVEKGKSKKLKSVKELLGITIMERSSFEKNPIDFLEAKGYKEVKKDLIIKLPKYSLFELENGRKRMLASAGELQKGNELALPSKYVNFLYLASHYEKLKGSPEDNEQKQLFVEQHKHYLDEIIEQISEFSKRVILADANLDKVLSAYNKHRDKPIREQAENIIHLFTLTNLGAPAAFKYFDTTIDRKRYTSTKEVLDATLIHQSITGLYETRIDLSQLGGDGGPAPGGMDPLQLLQPLEAEIKGTKLKAHWNSGATITCVPQAFLEEEVPIKNIWIKTIHGEKEQPVYYLTFKIQGRKVEAEVISSPYDYILVSPSDIPWLMKKPLQLTTLVPLQEYEERLLKQTMLTGSYKEKLQSLFLKYDALWQHWENQVGHRRIKPHHIATGTVNPRPQKQYPINPKAKASIQTVINDLLKQGVLIQQNSIMNTPVYPVPKPDGKWRMVLDYREVNKTIPLIAAQNQHSAGILSSIFRGKYKTTLDLSNGFWAHSITPESYWLTAFTWLGQQYCWTRLPQGFLNSPALFNADVVDLLKEVPNVQVYVDDIYISHDDPREHLEQLEKVFSLLLNAGYVVSLKKSEIAQHEVEFLGFNITKEGRGLTETFKQKLLNITPPRDLKQLQSILGKLNFARNFIPNFSELVKPLYNIIATAPGKYITWTTDNSQQLQNIISMLNSAENLEERNPEVRLIMKVNTSPSAGYIRFYNEFAKRPIMYLNYVYTKAEVKFTNTEKLLTTIHKGLIKALDLGMGQEILVYSPIVSMTKIQKTPLPERKALPIRWITWMSYLEDPRIQFHYDKTLPELQQVPTVTDDIIAKIKHPSEFSMVFYTDGSAIKHPNVNKSHNAGMGIAQVQFKPEFTVINTWSIPLGDHTAQLAEVAAVEFACKKALKIDGPVLIVTDSFYVAESVNKELPYWQSNGFFNNKKKPLKHVSKWKSIADCIQLKPDIIIIHEKGHQPTASTFHTEGNNLADKLATQGSYVVNAGKRTADGSEFEKRTADGSEFESPKKKAKVE

SEQ ID NO: 6478 - protein, 2086 aa, synthetic construct
MPAAKRVKLDGGDKKYSIGLDIGTNSVGWAVITDEYKVPSKKFKVLGNTDRHSIKKNLIGALLFDSGETAEATRLKRTARRRYTRRKNRICYLQEIFSNEMAKVDDSFFHRLEESFLVEEDKKHERHPIFGNIVDEVAYHEKYPTIYHLRKKLVDSTDKADLRLIYLALAHMIKFRGHFLIEGDLNPDNSDVDKLFIQLVQTYNQLFEENPINASGVDAKAILSARLSKSRRLENLIAQLPGEKKNGLFGNLIALSLGLTPNFKSNFDLAEDAKLQLSKDTYDDDLDNLLAQIGDQYADLFLAAKNLSDAILLSDILRVNTEITKAPLSASMIKRYDEHHQDLTLLKALVRQQLPEKYKEIFFDQSKNGYAGYIDGGASQEEFYKFIKPILEKMDGTEELLVKLNREDLLRKQRTFDNGSIPHQIHLGELHAILRRQEDFYPFLKDNREKIEKILTFRIPYYVGPLARGNSRFAWMTRKSEETITPWNFEEVVDKGASAQSFIERMTNFDKNLPNEKVLPKHSLLYEYFTVYNELTKVKYVTEGMRKPAFLSGEQKKAIVDLLFKTNRKVTVKQLKEDYFKKIECFDSVEISGVEDRFNASLGTYHDLLKIIKDKDFLDNEENEDILEDIVLTLTLFEDREMIEERLKTYAHLFDDKVMKQLKRRRYTGWGRLSRKLINGIRDKQSGKTILDFLKSDGFANRNFMQLIHDDSLTFKEDIQKAQVSGQGDSLHEHIANLAGSPAIKKGILQTVKVVDELVKVMGRHKPENIVIEMARENQTTQKGQKNSRERMKRIEEGIKELGSQILKEHPVENTQLQNEKLYLYYLQNGRDMYVDQELDINRLSDYDVDHIVPQSFLKDDSIDNKVLTRSDKARGKSDNVPSEEVVKKMKNYWRQLLNAKLITQRKFDNLTKAERGGLSELDKAGFIKRQLVETRQITKHVAQILDSRMNTKYDENDKLIREVKVITLKSKLVSDFRKDFQFYKVREINNYHHAHDAYLNAVVGTALIKKYPKLESEFVYGDYKVYDVRKMIAKSEQEIGKATAKYFFYSNIMNFFKTEITLANGEIRKRPLIETNGETGEIVWDKGRDFATVRKVLSMPQVNIVKKTEVQTGGFSKESILPKRNSDKLIARKKDWDPKKYGGFDSPTVAYSVLVVAKVEKGKSKKLKSVKELLGITIMERSSFEKNPIDFLEAKGYKEVKKDLIIKLPKYSLFELENGRKRMLASAGELQKGNELALPSKYVNFLYLASHYEKLKGSPEDNEQKQLFVEQHKHYLDEIIEQISEFSKRVILADANLDKVLSAYNKHRDKPIREQAENIIHLFTLTNLGAPAAFKYFDTTIDRKRYTSTKEVLDATLIHQSITGLYETRIDLSQLGGDGGPAPGGVLNLEEEYRLHEKPVPSSIDPSWLQLFPTVWAERAGMGLANQVPPVVVELRSGASPVAVRQYPMSKEAREGIRPHIQRFLDLGVLVPCQSPWNTPLLPVKKPGTNDYRPVQDLREINKRVQDIHPTVPNPYNLLSSLPPSHTWYSVLDLKDAFFCLKLHPNSQPLFAFEWRDPEKGNTGQLTWTRLPQGFKNSPTLFNEALHRDLAPFRALNPQVVLLQYVDDLLVAAPTYRDCKEGTQKLLQELSKLGYRVSAKKAQLCQKEVTYLGYLLKEGKRWLTPARKATVMKIPPPTTPRQVREFLGTAGFCRLWIPGFASLAAPLYPLTKPSIPFIWTEEHQKAFDRIKEALLSAPALALPDLTKPFTLYVDERAGVARGVLTQTLGPWRRPVAYLSKKLDPVASGWPTCLKAVAAVALLLKDADKLTLGQNVTVIASHSLESIVRQPPDRWMTNARMTHYQSLLLNERVSFAPPAVLNPATLLPVESEATPVHRCSEILAEETGTRRDLKDQPLPGVPAWYTDGSSFIAEGKRRAGAAIVDGKRTVWASSLPEGTSAQKAELVALTQALRLAEGKDINIYTDSRYAFATAHIHGAIYKQRGWLTSAGKDIKNKEEILALLEAIHLPKRVAIIHCPGHQKGNDPVATGNRRADEAAKQAALSTRVLAETTKPAGKRTADGSEFEKRTADGSEFESPKKKAKVE

SEQ ID NO: 6479 - protein, 2086 aa, synthetic construct
MPAAKRVKLDGGDKKYSIGLDIGTNSVGWAVITDEYKVPSKKFKVLGNTDRHSIKKNLIGALLFDSGETAEATRLKRTARRRYTRRKNRICYLQEIFSNEMAKVDDSFFHRLEESFLVEEDKKHERHPIFGNIVDEVAYHEKYPTIYHLRKKLVDSTDKADLRLIYLALAHMIKFRGHFLIEGDLNPDNSDVDKLFIQLVQTYNQLFEENPINASGVDAKAILSARLSKSRRLENLIAQLPGEKKNGLFGNLIALSLGLTPNFKSNFDLAEDAKLQLSKDTYDDDLDNLLAQIGDQYADLFLAAKNLSDAILLSDILRVNTEITKAPLSASMIKRYDEHHQDLTLLKALVRQQLPEKYKEIFFDQSKNGYAGYIDGGASQEEFYKFIKPILEKMDGTEELLVKLNREDLLRKQRTFDNGSIPHQIHLGELHAILRRQEDFYPFLKDNREKIEKILTFRIPYYVGPLARGNSRFAWMTRKSEETITPWNFEEVVDKGASAQSFIERMTNFDKNLPNEKVLPKHSLLYEYFTVYNELTKVKYVTEGMRKPAFLSGEQKKAIVDLLFKTNRKVTVKQLKEDYFKKIECFDSVEISGVEDRFNASLGTYHDLLKIIKDKDFLDNEENEDILEDIVLTLTLFEDREMIEERLKTYAHLFDDKVMKQLKRRRYTGWGRLSRKLINGIRDKQSGKTILDFLKSDGFANRNFMQLIHDDSLTFKEDIQKAQVSGQGDSLHEHIANLAGSPAIKKGILQTVKVVDELVKVMGRHKPENIVIEMARENQTTQKGQKNSRERMKRIEEGIKELGSQILKEHPVENTQLQNEKLYLYYLQNGRDMYVDQELDINRLSDYDVDHIVPQSFLKDDSIDNKVLTRSDKARGKSDNVPSEEVVKKMKNYWRQLLNAKLITQRKFDNLTKAERGGLSELDKAGFIKRQLVETRQITKHVAQILDSRMNTKYDENDKLIREVKVITLKSKLVSDFRKDFQFYKVREINNYHHAHDAYLNAVVGTALIKKYPKLESEFVYGDYKVYDVRKMIAKSEQEIGKATAKYFFYSNIMNFFKTEITLANGEIRKRPLIETNGETGEIVWDKGRDFATVRKVLSMPQVNIVKKTEVQTGGFSKESILPKRNSDKLIARKKDWDPKKYGGFDSPTVAYSVLVVAKVEKGKSKKLKSVKELLGITIMERSSFEKNPIDFLEAKGYKEVKKDLIIKLPKYSLFELENGRKRMLASAGELQKGNELALPSKYVNFLYLASHYEKLKGSPEDNEQKQLFVEQHKHYLDEIIEQISEFSKRVILADANLDKVLSAYNKHRDKPIREQAENIIHLFTLTNLGAPAAFKYFDTTIDRKRYTSTKEVLDATLIHQSITGLYETRIDLSQLGGDGGPAPGGVLNLEEEYRLHEKPVPSSIDPSWLQLFPTVWAERAGMGLANQVPPVVVELRSGASPVAVRQYPMSKEAREGIRPHIQRFLDLGVLVPCQSPWNTPLLPVKKPGTNDYRPVQDLREINKRVQDIHPTVPNPYNLLSSLPPSHTWYSVLDLKDAFFCLKLHPNSQPLFAFEWRDPEKGNTGQLTWTRLPQGFKNSPTLFNEALHRDLAPFRALNPQVVLLQYVDDLLVAAPTYRDCKEGTQKLLQELSKLGYRVSAKKAQLCQKEVTYLGYLLKEGKRWLTPARKATVMKIPPPTTPRQVREFLGKAGFCRLFIPGFASLAAPLYPLTKPSIPFIWTEEHQKAFDRIKEALLSAPALALPDLTKPFTLYVDERAGVARGVLTQTLGPWRRPVAYLSKKLDPVASGWPTCLKAVAAVALLLKDADKLTLGQNVTVIASHSLESIVRQPPDRWMTNARMTHYQSLLLNERVSFAPPAVLNPATLLPVESEATPVHRCSEILAEETGTRRDLKDQPLPGVPAWYTDGSSFIAEGKRRAGAAIVDGKRTVWASSLPEGTSAQKAELVALTQALRLAEGKDINIYTDSRYAFATAHIHGAIYKQRGWLTSAGKDIKNKEEILALLEAIHLPKRVAIIHCPGHQKGNDPVATGNRRADEAAKQAALSTRVLAETTKPAGKRTADGSEFEKRTADGSEFESPKKKAKVE

SEQ ID NO: 6480 - protein, 2088 aa, synthetic construct
MPAAKRVKLDGGDKKYSIGLDIGTNSVGWAVITDEYKVPSKKFKVLGNTDRHSIKKNLIGALLFDSGETAEATRLKRTARRRYTRRKNRICYLQEIFSNEMAKVDDSFFHRLEESFLVEEDKKHERHPIFGNIVDEVAYHEKYPTIYHLRKKLVDSTDKADLRLIYLALAHMIKFRGHFLIEGDLNPDNSDVDKLFIQLVQTYNQLFEENPINASGVDAKAILSARLSKSRRLENLIAQLPGEKKNGLFGNLIALSLGLTPNFKSNFDLAEDAKLQLSKDTYDDDLDNLLAQIGDQYADLFLAAKNLSDAILLSDILRVNTEITKAPLSASMIKRYDEHHQDLTLLKALVRQQLPEKYKEIFFDQSKNGYAGYIDGGASQEEFYKFIKPILEKMDGTEELLVKLNREDLLRKQRTFDNGSIPHQIHLGELHAILRRQEDFYPFLKDNREKIEKILTFRIPYYVGPLARGNSRFAWMTRKSEETITPWNFEEVVDKGASAQSFIERMTNFDKNLPNEKVLPKHSLLYEYFTVYNELTKVKYVTEGMRKPAFLSGEQKKAIVDLLFKTNRKVTVKQLKEDYFKKIECFDSVEISGVEDRFNASLGTYHDLLKIIKDKDFLDNEENEDILEDIVLTLTLFEDREMIEERLKTYAHLFDDKVMKQLKRRRYTGWGRLSRKLINGIRDKQSGKTILDFLKSDGFANRNFMQLIHDDSLTFKEDIQKAQVSGQGDSLHEHIANLAGSPAIKKGILQTVKVVDELVKVMGRHKPENIVIEMARENQTTQKGQKNSRERMKRIEEGIKELGSQILKEHPVENTQLQNEKLYLYYLQNGRDMYVDQELDINRLSDYDVDHIVPQSFLKDDSIDNKVLTRSDKARGKSDNVPSEEVVKKMKNYWRQLLNAKLITQRKFDNLTKAERGGLSELDKAGFIKRQLVETRQITKHVAQILDSRMNTKYDENDKLIREVKVITLKSKLVSDFRKDFQFYKVREINNYHHAHDAYLNAVVGTALIKKYPKLESEFVYGDYKVYDVRKMIAKSEQEIGKATAKYFFYSNIMNFFKTEITLANGEIRKRPLIETNGETGEIVWDKGRDFATVRKVLSMPQVNIVKKTEVQTGGFSKESILPKRNSDKLIARKKDWDPKKYGGFDSPTVAYSVLVVAKVEKGKSKKLKSVKELLGITIMERSSFEKNPIDFLEAKGYKEVKKDLIIKLPKYSLFELENGRKRMLASAGELQKGNELALPSKYVNFLYLASHYEKLKGSPEDNEQKQLFVEQHKHYLDEIIEQISEFSKRVILADANLDKVLSAYNKHRDKPIREQAENIIHLFTLTNLGAPAAFKYFDTTIDRKRYTSTKEVLDATLIHQSITGLYETRIDLSQLGGDGGPAPGGTLNIEDEYRLHETSKEPDVPLGSTWLSDFPQAWAETGGMGLAVRQAPLIIPLKATSTPVSIKQYPMSQEARLGIKPHIQRLLDQGILVPCQSPWNTPLLPVKKPGTNDYRPVQDLREVNKRVEDIHPTVPNPYNLLSGLPPSHQWYTVLDLKDAFFCLRLHPTSQPLFAFEWRDPEMGISGQLTWTRLPQGFKNSPTLFNEALHRDLADFRIQHPDLILLQYVDDLLLAATSEQDCQRGTRALLQTLGNLGYRASAKKAQICQKQVKYLGYLLKEGQRWLTEARKETVMGQPTPKTPRQLREFLGKAGFCRLFIPGFAEMAAPLYPLTKPGTLFNWGPDQQKAYQEIKQALLTAPALGLPDLTKPFELFVDEKQGYAKGVLTQKLGPWRRPVAYLSKKLDPVAAGWPPCLRMVAAIAVLTKDAGKLTMGQPLVILAPHAVEALVKQPPDRWLSNARMTHYQAMLLDTDRVQFGPVVALNPATLLPLPEKEAPHDCLEILAETHGTRPDLTDQPIPDADYTWYTDGSSFLQEGQRRAGAAVTTETEVIWARALPAGTSAQRAELIALTQALKMAEGKKLNVYTDSRYAFATAHVHGEIYRRRGWLTSEGREIKNKNEILALLKALFLPKRLSIIHCPGHQKGNSAEARGNRMADQAAREAAMKAVLETSTLLAGKRTADGSEFEKRTADGSEFESPKKKAKVE

SEQ ID NO: 6481 - protein, 2167 aa, synthetic construct
MPAAKRVKLDGGDKKYSIGLDIGTNSVGWAVITDEYKVPSKKFKVLGNTDRHSIKKNLIGALLFDSGETAEATRLKRTARRRYTRRKNRICYLQEIFSNEMAKVDDSFFHRLEESFLVEEDKKHERHPIFGNIVDEVAYHEKYPTIYHLRKKLVDSTDKADLRLIYLALAHMIKFRGHFLIEGDLNPDNSDVDKLFIQLVQTYNQLFEENPINASGVDAKAILSARLSKSRRLENLIAQLPGEKKNGLFGNLIALSLGLTPNFKSNFDLAEDAKLQLSKDTYDDDLDNLLAQIGDQYADLFLAAKNLSDAILLSDILRVNTEITKAPLSASMIKRYDEHHQDLTLLKALVRQQLPEKYKEIFFDQSKNGYAGYIDGGASQEEFYKFIKPILEKMDGTEELLVKLNREDLLRKQRTFDNGSIPHQIHLGELHAILRRQEDFYPFLKDNREKIEKILTFRIPYYVGPLARGNSRFAWMTRKSEETITPWNFEEVVDKGASAQSFIERMTNFDKNLPNEKVLPKHSLLYEYFTVYNELTKVKYVTEGMRKPAFLSGEQKKAIVDLLFKTNRKVTVKQLKEDYFKKIECFDSVEISGVEDRFNASLGTYHDLLKIIKDKDFLDNEENEDILEDIVLTLTLFEDREMIEERLKTYAHLFDDKVMKQLKRRRYTGWGRLSRKLINGIRDKQSGKTILDFLKSDGFANRNFMQLIHDDSLTFKEDIQKAQVSGQGDSLHEHIANLAGSPAIKKGILQTVKVVDELVKVMGRHKPENIVIEMARENQTTQKGQKNSRERMKRIEEGIKELGSQILKEHPVENTQLQNEKLYLYYLQNGRDMYVDQELDINRLSDYDVDHIVPQSFLKDDSIDNKVLTRSDKARGKSDNVPSEEVVKKMKNYWRQLLNAKLITQRKFDNLTKAERGGLSELDKAGFIKRQLVETRQITKHVAQILDSRMNTKYDENDKLIREVKVITLKSKLVSDFRKDFQFYKVREINNYHHAHDAYLNAVVGTALIKKYPKLESEFVYGDYKVYDVRKMIAKSEQEIGKATAKYFFYSNIMNFFKTEITLANGEIRKRPLIETNGETGEIVWDKGRDFATVRKVLSMPQVNIVKKTEVQTGGFSKESILPKRNSDKLIARKKDWDPKKYGGFDSPTVAYSVLVVAKVEKGKSKKLKSVKELLGITIMERSSFEKNPIDFLEAKGYKEVKKDLIIKLPKYSLFELENGRKRMLASAGELQKGNELALPSKYVNFLYLASHYEKLKGSPEDNEQKQLFVEQHKHYLDEIIEQISEFSKRVILADANLDKVLSAYNKHRDKPIREQAENIIHLFTLTNLGAPAAFKYFDTTIDRKRYTSTKEVLDATLIHQSITGLYETRIDLSQLGGDGGPAPAPGGMDLLKPLTVERKGVKIKGYWNSQADITCVPKDLLQGEEPVRQQNVTTIHGTQEGDVYYVNLKIDGRRINTEVIGTTLDYAIITPGDVPWILKKPLELTIKLDLEEQQGTLLNNSILSKKGKEELKQLFEKYSALWQSWENQVGHRRIRPHKIATGTVKPTPQKQYHINPKAKPDIQIVINDLLKQGVLIQKESTMNTPVYPVPKPNGRWRMVLDYRAVNKVTPLIAVQNQHSYGILGSLFKGRYKTTIDLSNGFWAHPIVPEDYWITAFTWQGKQYCWTVLPQGFLNSPGLFNGDVVDLLQGIPNVEVYVDDVYISHDSEKEHLEYLDILFNRLKEAGYIISLKKSNIANSIVDFLGFQITNEGRGLTDTFKEKLENITAPTTLKQLQSILGLLNFARNFIPDFTELIAPLYALIPKSPKNYVPWQIEHSTTLETLITKLNGAEYLQGRKGDKTLIMKVNASYTTGYIRYYNEGEKKPISYVSIVFSKTELKFTELEKLLTTVHKGLLKALDLSMGQNIHVYSPIVSMQNIQKTPQTAKKALASRWLSWLSYLEDPRIRFFYDPQMPALKDLPAVDTGKDNKKHPSNFQHIFYTDGSAITSPTKEGHLNAGMGIVYFINKDGNLQKQQEWSISLGNHTAQFAEIAAFEFALKKCLPLGGNILVVTDSNYVAKAYNEELDVWASNGFVNNRKKPLKHISKWKSVADLKRLRPDVVVTHEPGHQKLDSSPHAYGNNLADQLATQASFKVHAGKRTADGSEFEKRTADGSEFESPKKKAKVE

SEQ ID NO: 6482 - protein, 2089 aa, synthetic construct
MPAAKRVKLDGGDKKYSIGLDIGTNSVGWAVITDEYKVPSKKFKVLGNTDRHSIKKNLIGALLFDSGETAEATRLKRTARRRYTRRKNRICYLQEIFSNEMAKVDDSFFHRLEESFLVEEDKKHERHPIFGNIVDEVAYHEKYPTIYHLRKKLVDSTDKADLRLIYLALAHMIKFRGHFLIEGDLNPDNSDVDKLFIQLVQTYNQLFEENPINASGVDAKAILSARLSKSRRLENLIAQLPGEKKNGLFGNLIALSLGLTPNFKSNFDLAEDAKLQLSKDTYDDDLDNLLAQIGDQYADLFLAAKNLSDAILLSDILRVNTEITKAPLSASMIKRYDEHHQDLTLLKALVRQQLPEKYKEIFFDQSKNGYAGYIDGGASQEEFYKFIKPILEKMDGTEELLVKLNREDLLRKQRTFDNGSIPHQIHLGELHAILRRQEDFYPFLKDNREKIEKILTFRIPYYVGPLARGNSRFAWMTRKSEETITPWNFEEVVDKGASAQSFIERMTNFDKNLPNEKVLPKHSLLYEYFTVYNELTKVKYVTEGMRKPAFLSGEQKKAIVDLLFKTNRKVTVKQLKEDYFKKIECFDSVEISGVEDRFNASLGTYHDLLKIIKDKDFLDNEENEDILEDIVLTLTLFEDREMIEERLKTYAHLFDDKVMKQLKRRRYTGWGRLSRKLINGIRDKQSGKTILDFLKSDGFANRNFMQLIHDDSLTFKEDIQKAQVSGQGDSLHEHIANLAGSPAIKKGILQTVKVVDELVKVMGRHKPENIVIEMARENQTTQKGQKNSRERMKRIEEGIKELGSQILKEHPVENTQLQNEKLYLYYLQNGRDMYVDQELDINRLSDYDVDHIVPQSFLKDDSIDNKVLTRSDKARGKSDNVPSEEVVKKMKNYWRQLLNAKLITQRKFDNLTKAERGGLSELDKAGFIKRQLVETRQITKHVAQILDSRMNTKYDENDKLIREVKVITLKSKLVSDFRKDFQFYKVREINNYHHAHDAYLNAVVGTALIKKYPKLESEFVYGDYKVYDVRKMIAKSEQEIGKATAKYFFYSNIMNFFKTEITLANGEIRKRPLIETNGETGEIVWDKGRDFATVRKVLSMPQVNIVKKTEVQTGGFSKESILPKRNSDKLIARKKDWDPKKYGGFDSPTVAYSVLVVAKVEKGKSKKLKSVKELLGITIMERSSFEKNPIDFLEAKGYKEVKKDLIIKLPKYSLFELENGRKRMLASAGELQKGNELALPSKYVNFLYLASHYEKLKGSPEDNEQKQLFVEQHKHYLDEIIEQISEFSKRVILADANLDKVLSAYNKHRDKPIREQAENIIHLFTLTNLGAPAAFKYFDTTIDRKRYTSTKEVLDATLIHQSITGLYETRIDLSQLGGDGGPAPAPGGTLQLEEEYRLFEPESTQKQEMDIWLKNFPQAWAETGGMGTAHCQAPVLIQLKATATPISIRQYPMPHEAYQGIKPHIRRMLDQGILKPCQSPWNTPLLPVKKPGTEDYRPVQDLREVNKRVEDIHPTVPNPYNLLSTLPPSHPWYTVLDLKDAFFCLRLHSESQLLFAFEWRDPEIGLSGQLTWTRLPQGFKNSPTLFNEALHSDLADFRVRYPALVLLQYVDDLLLAAATRTECLEGTKALLETLGNKGYRASAKKAQICLQEVTYLGYSLKDGQRWLTKARKEAILSIPVPKNSRQVREFLGTAGYCRLWIPGFAELAAPLYPLTRPGTLFQWGTEQQLAFEDIKKALLSSPALGLPDITKPFELFIDENSGFAKGVLVQKLGPWKRPVAYLSKKLDTVASGWPPCLRMVAAIAILVKDAGKLTLGQPLTILTSHPVEALVRQPPNKWLSNARMTHYQAMLLDAERVHFGPTVSLNPATLLPLPSGGNHHDCLQILAETHGTRPDLTDQPLPDADLTWYTDGSSFIRNGEREAGAAVTTESEVIWAAPLPPGTSAQRAELIALTQALKMAEGKKLTVYTDSRYAFATTHVHGEIYRRRGWLTSEGKEIKNKNEILALLEALFLPKRLSIIHCPGHQKGDSPQAKGNRLADDTAKKAATETHSSLTVLPAGKRTADGSEFEKRTADGSEFESPKKKAKVE

SEQ ID NO: 6483 - protein, 2003 aa, synthetic construct
MPAAKRVKLDGGDKKYSIGLDIGTNSVGWAVITDEYKVPSKKFKVLGNTDRHSIKKNLIGALLFDSGETAEATRLKRTARRRYTRRKNRICYLQEIFSNEMAKVDDSFFHRLEESFLVEEDKKHERHPIFGNIVDEVAYHEKYPTIYHLRKKLVDSTDKADLRLIYLALAHMIKFRGHFLIEGDLNPDNSDVDKLFIQLVQTYNQLFEENPINASGVDAKAILSARLSKSRRLENLIAQLPGEKKNGLFGNLIALSLGLTPNFKSNFDLAEDAKLQLSKDTYDDDLDNLLAQIGDQYADLFLAAKNLSDAILLSDILRVNTEITKAPLSASMIKRYDEHHQDLTLLKALVRQQLPEKYKEIFFDQSKNGYAGYIDGGASQEEFYKFIKPILEKMDGTEELLVKLNREDLLRKQRTFDNGSIPHQIHLGELHAILRRQEDFYPFLKDNREKIEKILTFRIPYYVGPLARGNSRFAWMTRKSEETITPWNFEEVVDKGASAQSFIERMTNFDKNLPNEKVLPKHSLLYEYFTVYNELTKVKYVTEGMRKPAFLSGEQKKAIVDLLFKTNRKVTVKQLKEDYFKKIECFDSVEISGVEDRFNASLGTYHDLLKIIKDKDFLDNEENEDILEDIVLTLTLFEDREMIEERLKTYAHLFDDKVMKQLKRRRYTGWGRLSRKLINGIRDKQSGKTILDFLKSDGFANRNFMQLIHDDSLTFKEDIQKAQVSGQGDSLHEHIANLAGSPAIKKGILQTVKVVDELVKVMGRHKPENIVIEMARENQTTQKGQKNSRERMKRIEEGIKELGSQILKEHPVENTQLQNEKLYLYYLQNGRDMYVDQELDINRLSDYDVDHIVPQSFLKDDSIDNKVLTRSDKARGKSDNVPSEEVVKKMKNYWRQLLNAKLITQRKFDNLTKAERGGLSELDKAGFIKRQLVETRQITKHVAQILDSRMNTKYDENDKLIREVKVITLKSKLVSDFRKDFQFYKVREINNYHHAHDAYLNAVVGTALIKKYPKLESEFVYGDYKVYDVRKMIAKSEQEIGKATAKYFFYSNIMNFFKTEITLANGEIRKRPLIETNGETGEIVWDKGRDFATVRKVLSMPQVNIVKKTEVQTGGFSKESILPKRNSDKLIARKKDWDPKKYGGFDSPTVAYSVLVVAKVEKGKSKKLKSVKELLGITIMERSSFEKNPIDFLEAKGYKEVKKDLIIKLPKYSLFELENGRKRMLASAGELQKGNELALPSKYVNFLYLASHYEKLKGSPEDNEQKQLFVEQHKHYLDEIIEQISEFSKRVILADANLDKVLSAYNKHRDKPIREQAENIIHLFTLTNLGAPAAFKYFDTTIDRKRYTSTKEVLDATLIHQSITGLYETRIDLSQLGGDGGPAPAPGGGLEHLPPPPEVSQFPLNPERLQALTDLVSRALEAKHIEPYQGPGNNPIFPVKKPNGKWRFIHDLRATNSLTRDLASPSPGPPDLTSLPQDLPHLRTIDLTDAFFQIPLPAVFQPYFAFTLPQPNNHGPGTRYSWRVLPQGFKNSPTLFQQQLSHILAPVRKAFPNSLIIQYMDDILLASPALRELTALTDKVTNALTKEGLPMSLEKTQATPGSIHFLGQVISPDCITYETLPSIHVKSIWSLAELQSMLGELQWVSKGTPVLRSSLHQLYLALRGHRDPRDTIELTSTQVQALKTIQKALALNCRSRLVSQLPILALIILRPTGTTAVLFQTKQKWPLVWLHTPHPATSLRPWGQLLANAIITLDKYSLQHYGQICKSFHHNISNQALTYYLHTSDQSSVAILLQHSHRFHNLGAQPSGPWRSLLQVPQIFQNIDVLRPPFIISPVVIDHAPCLFSDGATSKAAFILWDKQVIHQQVLPLPSTCSAQAGELFGLLAGLQKSKPWPALNIFLDSKFLIGHLRRMAWGAFLGPSTQCDLHARLFPLLQGKTVYVHHVRSHTLLQDPISRLNEATDALMLAPLLPLAGKRTADGSEFEKRTADGSEFESPKKKAKVE

SEQ ID NO: 6484 - protein, 2090 aa, synthetic construct
MPAAKRVKLDGGDKKYSIGLDIGTNSVGWAVITDEYKVPSKKFKVLGNTDRHSIKKNLIGALLFDSGETAEATRLKRTARRRYTRRKNRICYLQEIFSNEMAKVDDSFFHRLEESFLVEEDKKHERHPIFGNIVDEVAYHEKYPTIYHLRKKLVDSTDKADLRLIYLALAHMIKFRGHFLIEGDLNPDNSDVDKLFIQLVQTYNQLFEENPINASGVDAKAILSARLSKSRRLENLIAQLPGEKKNGLFGNLIALSLGLTPNFKSNFDLAEDAKLQLSKDTYDDDLDNLLAQIGDQYADLFLAAKNLSDAILLSDILRVNTEITKAPLSASMIKRYDEHHQDLTLLKALVRQQLPEKYKEIFFDQSKNGYAGYIDGGASQEEFYKFIKPILEKMDGTEELLVKLNREDLLRKQRTFDNGSIPHQIHLGELHAILRRQEDFYPFLKDNREKIEKILTFRIPYYVGPLARGNSRFAWMTRKSEETITPWNFEEVVDKGASAQSFIERMTNFDKNLPNEKVLPKHSLLYEYFTVYNELTKVKYVTEGMRKPAFLSGEQKKAIVDLLFKTNRKVTVKQLKEDYFKKIECFDSVEISGVEDRFNASLGTYHDLLKIIKDKDFLDNEENEDILEDIVLTLTLFEDREMIEERLKTYAHLFDDKVMKQLKRRRYTGWGRLSRKLINGIRDKQSGKTILDFLKSDGFANRNFMQLIHDDSLTFKEDIQKAQVSGQGDSLHEHIANLAGSPAIKKGILQTVKVVDELVKVMGRHKPENIVIEMARENQTTQKGQKNSRERMKRIEEGIKELGSQILKEHPVENTQLQNEKLYLYYLQNGRDMYVDQELDINRLSDYDVDHIVPQSFLKDDSIDNKVLTRSDKARGKSDNVPSEEVVKKMKNYWRQLLNAKLITQRKFDNLTKAERGGLSELDKAGFIKRQLVETRQITKHVAQILDSRMNTKYDENDKLIREVKVITLKSKLVSDFRKDFQFYKVREINNYHHAHDAYLNAVVGTALIKKYPKLESEFVYGDYKVYDVRKMIAKSEQEIGKATAKYFFYSNIMNFFKTEITLANGEIRKRPLIETNGETGEIVWDKGRDFATVRKVLSMPQVNIVKKTEVQTGGFSKESILPKRNSDKLIARKKDWDPKKYGGFDSPTVAYSVLVVAKVEKGKSKKLKSVKELLGITIMERSSFEKNPIDFLEAKGYKEVKKDLIIKLPKYSLFELENGRKRMLASAGELQKGNELALPSKYVNFLYLASHYEKLKGSPEDNEQKQLFVEQHKHYLDEIIEQISEFSKRVILADANLDKVLSAYNKHRDKPIREQAENIIHLFTLTNLGAPAAFKYFDTTIDRKRYTSTKEVLDATLIHQSITGLYETRIDLSQLGGDGGPAPAPGGTLNLEDEYRLYETSAEPEVSPGSTWLSDFPQAWAETGGMGLAVRQAPLIIPLKATSTPVSIKQYPMSQEAKLGIKPHIQRLLDQGILVPCQSPWNTPLLPVKKPGTNDYRPVQDLREVNKRVEDIHPTVPNPYNLLSGLPPSHRWYTVLDLKDAFFCLRLHPTSQPLFAFEWRDPGMGISGQLTWTRLPQGFKNSPTLFNEALHRDLADFRIQHPDLILLQYVDDILLAATSELDCQQGTRALLLTLGNLGYRASAKKAQLCQKQVKYLGYLLKEGQRWLTEARKETVMGQPTPKTPRQLREFLGKAGFCRLFIPGFAEMAAPLYPLTKPGTLFNWGPDQQKAYQEIKQALLTAPALGLPDLTKPFELFVDEKQGYAKGVLTQKLGPWRRPVAYLSKKLDPVAAGWPPCLRMVAAIAVLRKDAGKLTMGQPLVILAPHAVEALVKQPPDRWLSNARMTHYQAMLLDTDRVQFGPVVALNPATLLPLPEEGAPHDCLEILAETHGTRPDLTDQPIPDADHTWYTDGSSFLQEGQRKAGAAVTTETEVIWARALPAGTSAQRAELIALTQALKMAEGKRLNVYTDSRYAFATAHIHGEIYRRRGWLTSEGREIKNKSEILALLKALFLPKRLSIIHCLGHQKGDSAEARGNRLADQAAREAAIKTPPDTSTLLAGKRTADGSEFEKRTADGSEFESPKKKAKVE

SEQ ID NO: 6485 - protein, 2110 aa, synthetic construct
MPAAKRVKLDGGDKKYSIGLDIGTNSVGWAVITDEYKVPSKKFKVLGNTDRHSIKKNLIGALLFDSGETAEATRLKRTARRRYTRRKNRICYLQEIFSNEMAKVDDSFFHRLEESFLVEEDKKHERHPIFGNIVDEVAYHEKYPTIYHLRKKLVDSTDKADLRLIYLALAHMIKFRGHFLIEGDLNPDNSDVDKLFIQLVQTYNQLFEENPINASGVDAKAILSARLSKSRRLENLIAQLPGEKKNGLFGNLIALSLGLTPNFKSNFDLAEDAKLQLSKDTYDDDLDNLLAQIGDQYADLFLAAKNLSDAILLSDILRVNTEITKAPLSASMIKRYDEHHQDLTLLKALVRQQLPEKYKEIFFDQSKNGYAGYIDGGASQEEFYKFIKPILEKMDGTEELLVKLNREDLLRKQRTFDNGSIPHQIHLGELHAILRRQEDFYPFLKDNREKIEKILTFRIPYYVGPLARGNSRFAWMTRKSEETITPWNFEEVVDKGASAQSFIERMTNFDKNLPNEKVLPKHSLLYEYFTVYNELTKVKYVTEGMRKPAFLSGEQKKAIVDLLFKTNRKVTVKQLKEDYFKKIECFDSVEISGVEDRFNASLGTYHDLLKIIKDKDFLDNEENEDILEDIVLTLTLFEDREMIEERLKTYAHLFDDKVMKQLKRRRYTGWGRLSRKLINGIRDKQSGKTILDFLKSDGFANRNFMQLIHDDSLTFKEDIQKAQVSGQGDSLHEHIANLAGSPAIKKGILQTVKVVDELVKVMGRHKPENIVIEMARENQTTQKGQKNSRERMKRIEEGIKELGSQILKEHPVENTQLQNEKLYLYYLQNGRDMYVDQELDINRLSDYDVDHIVPQSFLKDDSIDNKVLTRSDKARGKSDNVPSEEVVKKMKNYWRQLLNAKLITQRKFDNLTKAERGGLSELDKAGFIKRQLVETRQITKHVAQILDSRMNTKYDENDKLIREVKVITLKSKLVSDFRKDFQFYKVREINNYHHAHDAYLNAVVGTALIKKYPKLESEFVYGDYKVYDVRKMIAKSEQEIGKATAKYFFYSNIMNFFKTEITLANGEIRKRPLIETNGETGEIVWDKGRDFATVRKVLSMPQVNIVKKTEVQTGGFSKESILPKRNSDKLIARKKDWDPKKYGGFDSPTVAYSVLVVAKVEKGKSKKLKSVKELLGITIMERSSFEKNPIDFLEAKGYKEVKKDLIIKLPKYSLFELENGRKRMLASAGELQKGNELALPSKYVNFLYLASHYEKLKGSPEDNEQKQLFVEQHKHYLDEIIEQISEFSKRVILADANLDKVLSAYNKHRDKPIREQAENIIHLFTLTNLGAPAAFKYFDTTIDRKRYTSTKEVLDATLIHQSITGLYETRIDLSQLGGDGGPAPAPGGTLNIEDEYRLHETSKEPDVSLGSTWLSDFPQAWAETGGMGLAVRQAPLIIPLKATSTPVSIKQYPMSQEARLGIKPHIQRLLDQGILVPCQSPWNTPLLPVKKPGTNDYRPVQDLREVNKRVEDIHPTVPNPYNLLSGLPPSHQWYTVLDLKDAFFCLRLHPTSQPLFAFEWRDPEMGISGQLTWTRLPQGFKNSPTLFNEALHRDLADFRIQHPDLILLQYVDDLLLAATSELDCQQGTRALLQTLGNLGYRASAKKAQICQKQVKYLGYLLKEGQRWLTEARKETVMGQPTPKTPRQLREFLGKAGFCRLFIPGFAEMAAPLYPLTKPGTLFNWGPDQQKAYQEIKQALLTAPALGLPDLTKPFELFVDEKQGYAKGVLTQKLGPWRRPVAYLSKKLDPVAAGWPPCLRMVAAIAVLTKDAGKLTMGQPLVILAPHAVEALVKQPPDRWLSNARMTHYQALLLDTDRVQFGPVVALNPATLLPLPEEGLQHNCLDILAEAHGTRPDLTDQPLPDADHTWYTDGSSLLQEGQRKAGAAVTTETEVIWAKALPAGTSAQRAELIALTQALKMAEGKKLNVYTDSRYAFATAHIHGEIYRRRGWLTSEGKEIKNKDEILALLKALFLPKRLSIIHCPGHQKGHSAEARGNRMADQAARKAAITETPDTSTLLIENSSPSGGSKRTADGSEFEAGKRTADGSEFEKRTADGSEFESPKKKAKVE

SEQ ID NO: 6486 - protein, 2110 aa, synthetic construct; identical to SEQ ID NO: 6485

SEQ ID NO: 6487 - protein, 2110 aa, synthetic construct
MPAAKRVKLDGGDKKYSIGLDIGTNSVGWAVITDEYKVPSKKFKVLGNTDRHSIKKNLIGALLFDSGETAEATRLKRTARRRYTRRKNRICYLQEIFSNEMAKVDDSFFHRLEESFLVEEDKKHERHPIFGNIVDEVAYHEKYPTIYHLRKKLVDSTDKADLRLIYLALAHMIKFRGHFLIEGDLNPDNSDVDKLFIQLVQTYNQLFEENPINASGVDAKAILSARLSKSRRLENLIAQLPGEKKNGLFGNLIALSLGLTPNFKSNFDLAEDAKLQLSKDTYDDDLDNLLAQIGDQYADLFLAAKNLSDAILLSDILRVNTEITKAPLSASMIKRYDEHHQDLTLLKALVRQQLPEKYKEIFFDQSKNGYAGYIDGGASQEEFYKFIKPILEKMDGTEELLVKLNREDLLRKQRTFDNGSIPHQIHLGELHAILRRQEDFYPFLKDNREKIEKILTFRIPYYVGPLARGNSRFAWMTRKSEETITPWNFEEVVDKGASAQSFIERMTNFDKNLPNEKVLPKHSLLYEYFTVYNELTKVKYVTEGMRKPAFLSGEQKKAIVDLLFKTNRKVTVKQLKEDYFKKIECFDSVEISGVEDRFNASLGTYHDLLKIIKDKDFLDNEENEDILEDIVLTLTLFEDREMIEERLKTYAHLFDDKVMKQLKRRRYTGWGRLSRKLINGIRDKQSGKTILDFLKSDGFANRNFMQLIHDDSLTFKEDIQKAQVSGQGDSLHEHIANLAGSPAIKKGILQTVKVVDELVKVMGRHKPENIVIEMARENQTTQKGQKNSRERMKRIEEGIKELGSQILKEHPVENTQLQNEKLYLYYLQNGRDMYVDQELDINRLSDYDVDHIVPQSFLKDDSIDNKVLTRSDKARGKSDNVPSEEVVKKMKNYWRQLLNAKLITQRKFDNLTKAERGGLSELDKAGFIKRQLVETRQITKHVAQILDSRMNTKYDENDKLIREVKVITLKSKLVSDFRKDFQFYKVREINNYHHAHDAYLNAVVGTALIKKYPKLESEFVYGDYKVYDVRKMIAKSEQEIGKATAKYFFYSNIMNFFKTEITLANGEIRKRPLIETNGETGEIVWDKGRDFATVRKVLSMPQVNIVKKTEVQTGGFSKESILPKRNSDKLIARKKDWDPKKYGGFDSPTVAYSVLVVAKVEKGKSKKLKSVKELLGITIMERSSFEKNPIDFLEAKGYKEVKKDLIIKLPKYSLFELENGRKRMLASAGELQKGNELALPSKYVNFLYLASHYEKLKGSPEDNEQKQLFVEQHKHYLDEIIEQISEFSKRVILADANLDKVLSAYNKHRDKPIREQAENIIHLFTLTNLGAPAAFKYFDTTIDRKRYTSTKEVLDATLIHQSITGLYETRIDLSQLGGDGGPAPAPGGVQEISDSRPMLHIYLNGRRFLGLLDTGADKTCIAGRDWPANWPIHQTESSLQGLGMACGVARSSQPLRWQHEDKSGIIHPFVIPTLPFTLWGRDIMKDIKVRLMTDSPDDSQDLMIGAIESNLFADQISWKSDQPVWLNQWPLKQEKLQALQQLVTEQLQLGHLEESNSPWNTPVFVIKKKSGKWRLLQDLRAVNATMHDMGALQPGLPSPVAVPKGWEIIIIDLQDCFFNIKLHPEDCKRFAFSVPSPNFKRPYQRFQWKVLPQGMKNSPTLCQKFVDKAILTVRDKYQDSYIVHYMDDILLAHPSRSIVDEILTSMIQALNKHGLVVSTEKIQKYDNLKYLGTHIQGDSVSYQKLQIRTDKLRTLNDFQKLLGNINWIRPFLKLTTGELKPLFEILNGDSNPISTRKLTPEACKALQLMNERLSTARVKRLDLSQPWSLCILKTEYTPTACLWQDGVVEWIHLPHISPKVITPYDIFCTQLIIKGRHRSKELFSKDPDYIVVPYTKVQFDLLLQEKEDWPISLLGFLGEVHFHLPKDPLLTFTLQTAIIFPHMTSTTPLEKGIVIFTDGSANGRSVTYIQGREPIIKENTQNTAQQAEIVAVITAFEEVSQPFNLYTDSKYVTGLFPEIETATLSPRTKIYTELKHLQRLIHKRQEKFYIGHIRGHTGLPGPLAQGNAYADSLTRILTAAGKRTADGSEFEKRTADGSEFESPKKKAKVE

SEQ ID NO: 6488 - protein, 2084 aa, synthetic construct
MPAAKRVKLDGGDKKYSIGLDIGTNSVGWAVITDEYKVPSKKFKVLGNTDRHSIKKNLIGALLFDSGETAEATRLKRTARRRYTRRKNRICYLQEIFSNEMAKVDDSFFHRLEESFLVEEDKKHERHPIFGNIVDEVAYHEKYPTIYHLRKKLVDSTDKADLRLIYLALAHMIKFRGHFLIEGDLNPDNSDVDKLFIQLVQTYNQLFEENPINASGVDAKAILSARLSKSRRLENLIAQLPGEKKNGLFGNLIALSLGLTPNFKSNFDLAEDAKLQLSKDTYDDDLDNLLAQIGDQYADLFLAAKNLSDAILLSDILRVNTEITKAPLSASMIKRYDEHHQDLTLLKALVRQQLPEKYKEIFFDQSKNGYAGYIDGGASQEEFYKFIKPILEKMDGTEELLVKLNREDLLRKQRTFDNGSIPHQIHLGELHAILRRQEDFYPFLKDNREKIEKILTFRIPYYVGPLARGNSRFAWMTRKSEETITPWNFEEVVDKGASAQSFIERMTNFDKNLPNEKVLPKHSLLYEYFTVYNELTKVKYVTEGMRKPAFLSGEQKKAIVDLLFKTNRKVTVKQLKEDYFKKIECFDSVEISGVEDRFNASLGTYHDLLKIIKDKDFLDNEENEDILEDIVLTLTLFEDREMIEERLKTYAHLFDDKVMKQLKRRRYTGWGRLSRKLINGIRDKQSGKTILDFLKSDGFANRNFMQLIHDDSLTFKEDIQKAQVSGQGDSLHEHIANLAGSPAIKKGILQTVKVVDELVKVMGRHKPENIVIEMARENQTTQKGQKNSRERMKRIEEGIKELGSQILKEHPVENTQLQNEKLYLYYLQNGRDMYVDQELDINRLSDYDVDHIVPQSFLKDDSIDNKVLTRSDKARGKSDNVPSEEVVKKMKNYWRQLLNAKLITQRKFDNLTKAERGGLSELDKAGFIKRQLVETRQITKHVAQILDSRMNTKYDENDKLIREVKVITLKSKLVSDFRKDFQFYKVREINNYHHAHDAYLNAVVGTALIKKYPKLESEFVYGDYKVYDVRKMIAKSEQEIGKATAKYFFYSNIMNFFKTEITLANGEIRKRPLIETNGETGEIVWDKGRDFATVRKVLSMPQVNIVKKTEVQTGGFSKESILPKRNSDKLIARKKDWDPKKYGGFDSPTVAYSVLVVAKVEKGKSKKLKSVKELLGITIMERSSFEKNPIDFLEAKGYKEVKKDLIIKLPKYSLFELENGRKRMLASAGELQKGNELALPSKYVNFLYLASHYEKLKGSPEDNEQKQLFVEQHKHYLDEIIEQISEFSKRVILADANLDKVLSAYNKHRDKPIREQAENIIHLFTLTNLGAPAAFKYFDTTIDRKRYTSTKEVLDATLIHQSITGLYETRIDLSQLGGDGGPAPAPGGTLQLDDEYRLYSPLVKPDQNIQFWLEQFPQAWAETAGMGLAKQVPPQVIQLKASATPVSVRQYPLSKEAQEGIRPHVQRLIQQGILVPVQSPWNTPLLPVRKPGTNDYRPVQDLREVNKRVQDIHPTVPNPYNLLCALPPQRSWYTVLDLKDAFFCLRLHPTSQPLFAFEWRDPGTGRTGQLTWTRLPQGFKNSPTIFDEALHRDLANFRIQHPQVTLLQYVDDLLLAGATKQDCLEGTKALLLELSDLGYRASAKKAQICRREVTYLGYSLRDGQRWLTEARKKTVVQIPAPTTAKQVREFLGTAGFCRLWIPGFATLAAPLYPLTKEKGEFSWAPEHQKAFDAIKKALLSAPALALPDVTKPFTLYVDERKGVARGVLTQTLGPWRRPVAYLSKKLDPVASGWPVCLKAIAAVAILVKDADKLTLGQNITVIAPHALENIVRQPPDRWMTNARMTHYQSLLLTERVTFAPPAALNPATLLPEETDEPVTHDCHQLLIEETGVRKDLTDIPLTGEVLTWFTDGSSYVVEGKRMAGAAVVDGTRTIWASSLPEGTSAQKAELMALTQALRLAEGKSINIYTDSRYAFATAHVHGAIYKQRGLLTSAGREIKNKEEILSLLEALHLPKRLAIIHCPGHQKAKDPISRGNQMADRVAKQAAQGVNLLAGKRTADGSEFEKRTADGSEFESPKKKAKVE

SEQ ID NO: 6489 - protein, 2081 aa, synthetic construct
MPAAKRVKLDGGDKKYSIGLDIGTNSVGWAVITDEYKVPSKKFKVLGNTDRHSIKKNLIGALLFDSGETAEATRLKRTARRRYTRRKNRICYLQEIFSNEMAKVDDSFFHRLEESFLVEEDKKHERHPIFGNIVDEVAYHEKYPTIYHLRKKLVDSTDKADLRLIYLALAHMIKFRGHFLIEGDLNPDNSDVDKLFIQLVQTYNQLFEENPINASGVDAKAILSARLSKSRRLENLIAQLPGEKKNGLFGNLIALSLGLTPNFKSNFDLAEDAKLQLSKDTYDDDLDNLLAQIGDQYADLFLAAKNLSDAILLSDILRVNTEITKAPLSASMIKRYDEHHQDLTLLKALVRQQLPEKYKEIFFDQSKNGYAGYIDGGASQEEFYKFIKPILEKMDGTEELLVKLNREDLLRKQRTFDNGSIPHQIHLGELHAILRRQEDFYPFLKDNREKIEKILTFRIPYYVGPLARGNSRFAWMTRKSEETITPWNFEEVVDKGASAQSFIERMTNFDKNLPNEKVLPKHSLLYEYFTVYNELTKVKYVTEGMRKPAFLSGEQKKAIVDLLFKTNRKVTVKQLKEDYFKKIECFDSVEISGVEDRFNASLGTYHDLLKIIKDKDFLDNEENEDILEDIVLTLTLFEDREMIEERLKTYAHLFDDKVMKQLKRRRYTGWGRLSRKLINGIRDKQSGKTILDFLKSDGFANRNFMQLIHDDSLTFKEDIQKAQVSGQGDSLHEHIANLAGSPAIKKGILQTVKVVDELVKVMGRHKPENIVIEMARENQTTQKGQKNSRERMKRIEEGIKELGSQILKEHPVENTQLQNEKLYLYYLQNGRDMYVDQELDINRLSDYDVDHIVPQSFLKDDSIDNKVLTRSDKARGKSDNVPSEEVVKKMKNYWRQLLNAKLITQRKFDNLTKAERGGLSELDKAGFIKRQLVETRQITKHVAQILDSRMNTKYDENDKLIREVKVITLKSKLVSDFRKDFQFYKVREINNYHHAHDAYLNAVVGTALIKKYPKLESEFVYGDYKVYDVRKMIAKSEQEIGKATAKYFFYSNIMNFFKTEITLANGEIRKRPLIETNGETGEIVWDKGRDFATVRKVLSMPQVNIVKKTEVQTGGFSKESILPKRNSDKLIARKKDWDPKKYGGFDSPTVAYSVLVVAKVEKGKSKKLKSVKELLGITIMERSSFEKNPIDFLEAKGYKEVKKDLIIKLPKYSLFELENGRKRMLASAGELQKGNELALPSKYVNFLYLASHYEKLKGSPEDNEQKQLFVEQHKHYLDEIIEQISEFSKRVILADANLDKVLSAYNKHRDKPIREQAENIIHLFTLTNLGAPAAFKYFDTTIDRKRYTSTKEVLDATLIHQSITGLYETRIDLSQLGGDGGPAPAPGGIPWLMKKPLQLTTLVPLQEYEERLLKQTMLTGSYKEKLQSLFLKYDALWQHWENQVGHRRIKPHHIATGTVNPRPQKQYPINPKAKASIQTVINDLLKQGVLIQQNSIMNTPVYPVPKPDGKWRMVLDYREVNKTIPLIAAQNQHSAGILSSIFRGKYKTTLDLSNGFWAHSITPESYWLTAFTWLGQQYCWTRLPQGFLNSPALFNADVVDLLKEVPNVQVYVDDIYISHDDPREHLEQLEKVFSLLLNAGYVVSLKKSEIAQHEVEFLGFNITKEGRGLTETFKQKLLNITPPRDLKQLQSILGKLNFARNFIPNFSELVKPLYNIIATAPGKYITWTTDNSQQLQNIISMLNSAENLEERNPEVRLIMKVNTSPSAGYIRFYNEFAKRPIMYLNYVYTKAEVKFTNTEKLLTTIHKGLIKALDLGMGQEILVYSPIVSMTKIQKTPLPERKALPIRWITWMSYLEDPRIQFHYDKTLPELQQVPTVTDDIIAKIKHPSEFSMVFYTDGSAIKHPNVNKSHNAGMGIAQVQFKPEFTVINTWSIPLGDHTAQLAEVAAVEFACKKALKIDGPVLIVTDSFYVAESVNKELPYWQSNGFFNNKKKPLKHVSKWKSIADCIQLKPDIIIIHEKGHQPTASTFHTEGNNLADKLATQGSYVVNAGKRTADGSEFEKRTADGSEFESPKKKAKVE

SEQ ID NO: 6490 - protein, 2170 aa, synthetic construct
MPAAKRVKLDGGDKKYSIGLDIGTNSVGWAVITDEYKVPSKKFKVLGNTDRHSIKKNLIGALLFDSGETAEATRLKRTARRRYTRRKNRICYLQEIFSNEMAKVDDSFFHRLEESFLVEEDKKHERHPIFGNIVDEVAYHEKYPTIYHLRKKLVDSTDKADLRLIYLALAHMIKFRGHFLIEGDLNPDNSDVDKLFIQLVQTYNQLFEENPINASGVDAKAILSARLSKSRRLENLIAQLPGEKKNGLFGNLIALSLGLTPNFKSNFDLAEDAKLQLSKDTYDDDLDNLLAQIGDQYADLFLAAKNLSDAILLSDILRVNTEITKAPLSASMIKRYDEHHQDLTLLKALVRQQLPEKYKEIFFDQSKNGYAGYIDGGASQEEFYKFIKPILEKMDGTEELLVKLNREDLLRKQRTFDNGSIPHQIHLGELHAILRRQEDFYPFLKDNREKIEKILTFRIPYYVGPLARGNSRFAWMTRKSEETITPWNFEEVVDKGASAQSFIERMTNFDKNLPNEKVLPKHSLLYEYFTVYNELTKVKYVTEGMRKPAFLSGEQKKAIVDLLFKTNRKVTVKQLKEDYFKKIECFDSVEISGVEDRFNASLGTYHDLLKIIKDKDFLDNEENEDILEDIVLTLTLFEDREMIEERLKTYAHLFDDKVMKQLKRRRYTGWGRLSRKLINGIRDKQSGKTILDFLKSDGFANRNFMQLIHDDSLTFKEDIQKAQVSGQGDSLHEHIANLAGSPAIKKGILQTVKVVDELVKVMGRHKPENIVIEMARENQTTQKGQKNSRERMKRIEEGIKELGSQILKEHPVENTQLQNEKLYLYYLQNGRDMYVDQELDINRLSDYDVDHIVPQSFLKDDSIDNKVLTRSDKARGKSDNVPSEEVVKKMKNYWRQLLNAKLITQRKFDNLTKAERGGLSELDKAGFIKRQLVETRQITKHVAQILDSRMNTKYDENDKLIREVKVITLKSKLVSDFRKDFQFYKVREINNYHHAHDAYLNAVVGTALIKKYPKLESEFVYGDYKVYDVRKMIAKSEQEIGKATAKYFFYSNIMNFFKTEITLANGEIRKRPLIETNGETGEIVWDKGRDFATVRKVLSMPQVNIVKKTEVQTGGFSKESILPKRNSDKLIARKKDWDPKKYGGFDSPTVAYSVLVVAKVEKGKSKKLKSVKELLGITIMERSSFEKNPIDFLEAKGYKEVKKDLIIKLPKYSLFELENGRKRMLASAGELQKGNELALPSKYVNFLYLASHYEKLKGSPEDNEQKQLFVEQHKHYLDEIIEQISEFSKRVILADANLDKVLSAYNKHRDKPIREQAENIIHLFTLTNLGAPAAFKYFDTTIDRKRYTSTKEVLDATLIHQSITGLYETRIDLSQLGGDGGPAPAPGGMDPLQLLQPLEAEIKGTKLKAHWNSGATITCVPQAFLEEEVPIKNIWIKTIHGEKEQPVYYLTFKIQGRKVEAEVISSPYDYILVSPSDIPWLMKKPLQLTTLVPLQEYEERLLKQTMLTGSYKEKLQSLFLKYDALWQHWENQVGHRRIKPHHIATGTVNPRPQKQYPINPKAKASIQTVINDLLKQGVLIQQNSIMNTPVYPVPKPDGKWRMVLDYREVNKTIPLIAAQNQHSAGILSSIFRGKYKTTLDLSNGFWAHSITPESYWLTAFTWLGQQYCWTRLPQGFLNSPALFNADVVDLLKEVPNVQVYVDDIYISHDDPREHLEQLEKVFSLLLNAGYVVSLKKSEIAQHEVEFLGFNITKEGRGLTETFKQKLLNITPPRDLKQLQSILGKLNFARNFIPNFSELVKPLYNIIATAPGKYITWTTDNSQQLQNIISMLNSAENLEERNPEVRLIMKVNTSPSAGYIRFYNEFAKRPIMYLNYVYTKAEVKFTNTEKLLTTIHKGLIKALDLGMGQEILVYSPIVSMTKIQKTPLPERKALPIRWITWMSYLEDPRIQFHYDKTLPELQQVPTVTDDIIAKIKHPSEFSMVFYTDGSAIKHPNVNKSHNAGMGIAQVQFKPEFTVINTWSIPLGDHTAQLAEVAAVEFACKKALKIDGPVLIVTDSFYVAESVNKELPYWQSNGFFNNKKKPLKHVSKWKSIADCIQLKPDIIIIHEKGHQPTASTFHTEGNNLADKLATQGSYVVNAGKRTADGSEFEKRTADGSEFESPKKKAKVE

SEQ ID NO: 6491 - protein, 2090 aa, synthetic construct
MPAAKRVKLDGGDKKYSIGLDIGTNSVGWAVITDEYKVPSKKFKVLGNTDRHSIKKNLIGALLFDSGETAEATRLKRTARRRYTRRKNRICYLQEIFSNEMAKVDDSFFHRLEESFLVEEDKKHERHPIFGNIVDEVAYHEKYPTIYHLRKKLVDSTDKADLRLIYLALAHMIKFRGHFLIEGDLNPDNSDVDKLFIQLVQTYNQLFEENPINASGVDAKAILSARLSKSRRLENLIAQLPGEKKNGLFGNLIALSLGLTPNFKSNFDLAEDAKLQLSKDTYDDDLDNLLAQIGDQYADLFLAAKNLSDAILLSDILRVNTEITKAPLSASMIKRYDEHHQDLTLLKALVRQQLPEKYKEIFFDQSKNGYAGYIDGGASQEEFYKFIKPILEKMDGTEELLVKLNREDLLRKQRTFDNGSIPHQIHLGELHAILRRQEDFYPFLKDNREKIEKILTFRIPYYVGPLARGNSRFAWMTRKSEETITPWNFEEVVDKGASAQSFIERMTNFDKNLPNEKVLPKHSLLYEYFTVYNELTKVKYVTEGMRKPAFLSGEQKKAIVDLLFKTNRKVTVKQLKEDYFKKIECFDSVEISGVEDRFNASLGTYHDLLKIIKDKDFLDNEENEDILEDIVLTLTLFEDREMIEERLKTYAHLFDDKVMKQLKRRRYTGWGRLSRKLINGIRDKQSGKTILDFLKSDGFANRNFMQLIHDDSLTFKEDIQKAQVSGQGDSLHEHIANLAGSPAIKKGILQTVKVVDELVKVMGRHKPENIVIEMARENQTTQKGQKNSRERMKRIEEGIKELGSQILKEHPVENTQLQNEKLYLYYLQNGRDMYVDQELDINRLSDYDVDHIVPQSFLKDDSIDNKVLTRSDKARGKSDNVPSEEVVKKMKNYWRQLLNAKLITQRKFDNLTKAERGGLSELDKAGFIKRQLVETRQITKHVAQILDSRMNTKYDENDKLIREVKVITLKSKLVSDFRKDFQFYKVREINNYHHAHDAYLNAVVGTALIKKYPKLESEFVYGDYKVYDVRKMIAKSEQEIGKATAKYFFYSNIMNFFKTEITLANGEIRKRPLIETNGETGEIVWDKGRDFATVRKVLSMPQVNIVKKTEVQTGGFSKESILPKRNSDKLIARKKDWDPKKYGGFDSPTVAYSVLVVAKVEKGKSKKLKSVKELLGITIMERSSFEKNPIDFLEAKGYKEVKKDLIIKLPKYSLFELENGRKRMLASAGELQKGNELALPSKYVNFLYLASHYEKLKGSPEDNEQKQLFVEQHKHYLDEIIEQISEFSKRVILADANLDKVLSAYNKHRDKPIREQAENIIHLFTLTNLGAPAAFKYFDTTIDRKRYTSTKEVLDATLIHQSITGLYETRIDLSQLGGDGGPAPAPGGTLNIEDEYRLHETSKEPDVPLGSTWLSDFPQAWAETGGMGLAVRQAPLIIPLKATSTPVSIKQYPMSQEARLGIKPHIQRLLDQGILVPCQSPWNTPLLPVKKPGTNDYRPVQDLREVNKRVEDIHPTVPNPYNLLSGLPPSHQWYTVLDLKDAFFCLRLHPTSQPLFAFEWRDPEMGISGQLTWTRLPQGFKNSPTLFNEALHRDLADFRIQHPDLILLQYVDDLLLAATSEQDCQRGTRALLQTLGNLGYRASAKKAQICQKQVKYLGYLLKEGQRWLTEARKETVMGQPTPKTPRQLREFLGKAGFCRLFIPGFAEMAAPLYPLTKPGTLFNWGPDQQKAYQEIKQALLTAPALGLPDLTKPFELFVDEKQGYAKGVLTQKLGPWRRPVAYLSKKLDPVAAGWPPCLRMVAAIAVLTKDAGKLTMGQPLVILAPHAVEALVKQPPDRWLSNARMTHYQAMLLDTDRVQFGPVVALNPATLLPLPEKEAPHDCLEILAETHGTRPDLTDQPIPDADYTWYTDGSSFLQEGQRRAGAAVTTETEVIWARALPAGTSAQRAELIALTQALKMAEGKKLNVYTDSRYAFATAHVHGEIYRRRGWLTSEGREIKNKNEILALLKALFLPKRLSIIHCPGHQKGNSAEARGNRMADQAAREAAMKAVLETSTLLAGKRTADGSEFEKRTADGSEFESPKKKAKVE

SEQ ID NO: 6492 - protein, 2094 aa, synthetic construct
MPAAKRVKLDGGDKKYSIGLDIGTNSVGWAVITDEYKVPSKKFKVLGNTDRHSIKKNLIGALLFDSGETAEATRLKRTARRRYTRRKNRICYLQEIFSNEMAKVDDSFFHRLEESFLVEEDKKHERHPIFGNIVDEVAYHEKYPTIYHLRKKLVDSTDKADLRLIYLALAHMIKFRGHFLIEGDLNPDNSDVDKLFIQLVQTYNQLFEENPINASGVDAKAILSARLSKSRRLENLIAQLPGEKKNGLFGNLIALSLGLTPNFKSNFDLAEDAKLQLSKDTYDDDLDNLLAQIGDQYADLFLAAKNLSDAILLSDILRVNTEITKAPLSASMIKRYDEHHQDLTLLKALVRQQLPEKYKEIFFDQSKNGYAGYIDGGASQEEFYKFIKPILEKMDGTEELLVKLNREDLLRKQRTFDNGSIPHQIHLGELHAILRRQEDFYPFLKDNREKIEKILTFRIPYYVGPLARGNSRFAWMTRKSEETITPWNFEEVVDKGASAQSFIERMTNFDKNLPNEKVLPKHSLLYEYFTVYNELTKVKYVTEGMRKPAFLSGEQKKAIVDLLFKTNRKVTVKQLKEDYFKKIECFDSVEISGVEDRFNASLGTYHDLLKIIKDKDFLDNEENEDILEDIVLTLTLFEDREMIEERLKTYAHLFDDKVMKQLKRRRYTGWGRLSRKLINGIRDKQSGKTILDFLKSDGFANRNFMQLIHDDSLTFKEDIQKAQVSGQGDSLHEHIANLAGSPAIKKGILQTVKVVDELVKVMGRHKPENIVIEMARENQTTQKGQKNSRERMKRIEEGIKELGSQILKEHPVENTQLQNEKLYLYYLQNGRDMYVDQELDINRLSDYDVDHIVPQSFLKDDSIDNKVLTRSDKARGKSDNVPSEEVVKKMKNYWRQLLNAKLITQRKFDNLTKAERGGLSELDKAGFIKRQLVETRQITKHVAQILDSRMNTKYDENDKLIREVKVITLKSKLVSDFRKDFQFYKVREINNYHHAHDAYLNAVVGTALIKKYPKLESEFVYGDYKVYDVRKMIAKSEQEIGKATAKYFFYSNIMNFFKTEITLANGEIRKRPLIETNGETGEIVWDKGRDFATVRKVLSMPQVNIVKKTEVQTGGFSKESILPKRNSDKLIARKKDWDPKKYGGFDSPTVAYSVLVVAKVEKGKSKKLKSVKELLGITIMERSSFEKNPIDFLEAKGYKEVKKDLIIKLPKYSLFELENGRKRMLASAGELQKGNELALPSKYVNFLYLASHYEKLKGSPEDNEQKQLFVEQHKHYLDEIIEQISEFSKRVILADANLDKVLSAYNKHRDKPIREQAENIIHLFTLTNLGAPAAFKYFDTTIDRKRYTSTKEVLDATLIHQSITGLYETRIDLSQLGGDGGPAPAPAPGGTAPLEEEYRLFLEAPIQNVTLLEQWKREIPKVWAEINPPGLASTQAPIHVQLLSTALPVRVRQYPITLEAKRSLRETIRKFRAAGILRPVHSPWNTPLLPVRKSGTSEYRMVQDLREVNKRVETIHPTVPNPYTLLSLLPPDRIWYSVLDLKDAFFCIPLAPESQLIFAFEWADAEEGESGQLTWTRLPQGFKNSPTLFNEALNRDLQGFRLDHPSVSLLQYVDDLLIAADTQAACLSATRDLLMTLAELGYRVSGKKAQLCQEEVTYLGFKIHKGSRSLSNSRTQAILQIPVPKTKRQVREFLGTIGYCRLWIPGFAELAQPLYAATRPGNDPLVWGEKEEEAFQSLKLALTQPPALALPSLDKPFQLFVEETSGAAKGVLTQALGPWKRPVAYLSKRLDPVAAGWPRCLRAIAAAALLTREASKLTFGQDIEITSSHNLESLLRSPPDKWLTNARITQYQVLLLDPPRVRFKQTAALNPATLLPETDDTLPIHHCLDTLDSLTSTRPDLTDQPLAQAEATLFTDGSSYIRDGKRYAGAAVVTLDSVIWAEPLPIGTSAQKAELIALTKALEWSKDKSVNIYTDSRYAFATLHVHGMIYRERGWLTAGGKAIKNAPEILALLTAVWLPKRVAVMHCKGHQKDDAPTSTGNRRADEVAREVAIRPLSTQATISAGKRTADGSEFEKRTADGSEFESPKKKAKVE

SEQ ID NO: 6493 - protein, 2098 aa, synthetic construct
MPAAKRVKLDGGDKKYSIGLDIGTNSVGWAVITDEYKVPSKKFKVLGNTDRHSIKKNLIGALLFDSGETAEATRLKRTARRRYTRRKNRICYLQEIFSNEMAKVDDSFFHRLEESFLVEEDKKHERHPIFGNIVDEVAYHEKYPTIYHLRKKLVDSTDKADLRLIYLALAHMIKFRGHFLIEGDLNPDNSDVDKLFIQLVQTYNQLFEENPINASGVDAKAILSARLSKSRRLENLIAQLPGEKKNGLFGNLIALSLGLTPNFKSNFDLAEDAKLQLSKDTYDDDLDNLLAQIGDQYADLFLAAKNLSDAILLSDILRVNTEITKAPLSASMIKRYDEHHQDLTLLKALVRQQLPEKYKEIFFDQSKNGYAGYIDGGASQEEFYKFIKPILEKMDGTEELLVKLNREDLLRKQRTFDNGSIPHQIHLGELHAILRRQEDFYPFLKDNREKIEKILTFRIPYYVGPLARGNSRFAWMTRKSEETITPWNFEEVVDKGASAQSFIERMTNFDKNLPNEKVLPKHSLLYEYFTVYNELTKVKYVTEGMRKPAFLSGEQKKAIVDLLFKTNRKVTVKQLKEDYFKKIECFDSVEISGVEDRFNASLGTYHDLLKIIKDKDFLDNEENEDILEDIVLTLTLFEDREMIEERLKTYAHLFDDKVMKQLKRRRYTGWGRLSRKLINGIRDKQSGKTILDFLKSDGFANRNFMQLIHDDSLTFKEDIQKAQVSGQGDSLHEHIANLAGSPAIKKGILQTVKVVDELVKVMGRHKPENIVIEMARENQTTQKGQKNSRERMKRIEEGIKELGSQILKEHPVENTQLQNEKLYLYYLQNGRDMYVDQELDINRLSDYDVDHIVPQSFLKDDSIDNKVLTRSDKARGKSDNVPSEEVVKKMKNYWRQLLNAKLITQRKFDNLTKAERGGLSELDKAGFIKRQLVETRQITKHVAQILDSRMNTKYDENDKLIREVKVITLKSKLVSDFRKDFQFYKVREINNYHHAHDAYLNAVVGTALIKKYPKLESEFVYGDYKVYDVRKMIAKSEQEIGKATAKYFFYSNIMNFFKTEITLANGEIRKRPLIETNGETGEIVWDKGRDFATVRKVLSMPQVNIVKKTEVQTGGFSKESILPKRNSDKLIARKKDWDPKKYGGFDSPTVAYSVLVVAKVEKGKSKKLKSVKELLGITIMERSSFEKNPIDFLEAKGYKEVKKDLIIKLPKYSLFELENGRKRMLASAGELQKGNELALPSKYVNFLYLASHYEKLKGSPEDNEQKQLFVEQHKHYLDEIIEQISEFSKRVILADANLDKVLSAYNKHRDKPIREQAENIIHLFTLTNLGAPAAFKYFDTTIDRKRYTSTKEVLDATLIHQSITGLYETRIDLSQLGGDGGPAPAPAPGGTVSLQDEHRLFDIPVTTSLPDVWLQDFPQAWAETGGLGRAKCQAPIIIDLKPTAVPVSIKQYPMSLEAHMGIRQHIIKFLELGVLRPCRSPWNTPLLPVKKPGTQDYRPVQDLREINKRTVDIHPTVPNPYNLLSTLKPDYSWYTVLDLKDAFFCLPLAPQSQELFAFEWKDPERGISGQLTWTRLPQGFKNSPTLFNEALHRDLTDFRTQHPEVTLLQYVDDLLLAAPTKKACTQGTRHLLQELGEKGYRASAKKAQICQTKVTYLGYILSEGKRWLTPGRIETVARIPPPRNPREVREFLGTAGFCRLWIPGFAELAAPLYALTKPSTPFTWQTEHQLAFEALKKALLSAPALGLPDTSKPFTLFLDERQGIAKGVLTQKLGPWKRPVAYLSKKLDPVAAGWPPCLRIMAATAMLVKDSAKLTLGQPLTVITPHTLEAIVRQPPDRWITNARLTHYQALLLDTDRVQFGPPVTLNPATLLPVPENQPSPHDCRQVLAETHGTREDLKDQELPDADHTWYTDGSSYLDSGTRRAGAAVVDGHNTIWAQSLPPGTSAQKAELIALTKALELSKGKKANIYTDSRYAFATAHTHGSIYERRGWLTSEGKEIKNKAEIIALLKALFLPQEVAIIHCPGHQKGQDPVAVGNRQADRVARQAAMAEVLTLATEPDNTSHITAGKRTADGSEFEKRTADGSEFESPKKKAKVE

SEQ ID NO: 6494 - protein, 2169 aa, synthetic construct
MPAAKRVKLDGGDKKYSIGLDIGTNSVGWAVITDEYKVPSKKFKVLGNTDRHSIKKNLIGALLFDSGETAEATRLKRTARRRYTRRKNRICYLQEIFSNEMAKVDDSFFHRLEESFLVEEDKKHERHPIFGNIVDEVAYHEKYPTIYHLRKKLVDSTDKADLRLIYLALAHMIKFRGHFLIEGDLNPDNSDVDKLFIQLVQTYNQLFEENPINASGVDAKAILSARLSKSRRLENLIAQLPGEKKNGLFGNLIALSLGLTPNFKSNFDLAEDAKLQLSKDTYDDDLDNLLAQIGDQYADLFLAAKNLSDAILLSDILRVNTEITKAPLSASMIKRYDEHHQDLTLLKALVRQQLPEKYKEIFFDQSKNGYAGYIDGGASQEEFYKFIKPILEKMDGTEELLVKLNREDLLRKQRTFDNGSIPHQIHLGELHAILRRQEDFYPFLKDNREKIEKILTFRIPYYVGPLARGNSRFAWMTRKSEETITPWNFEEVVDKGASAQSFIERMTNFDKNLPNEKVLPKHSLLYEYFTVYNELTKVKYVTEGMRKPAFLSGEQKKAIVDLLFKTNRKVTVKQLKEDYFKKIECFDSVEISGVEDRFNASLGTYHDLLKIIKDKDFLDNEENEDILEDIVLTLTLFEDREMIEERLKTYAHLFDDKVMKQLKRRRYTGWGRLSRKLINGIRDKQSGKTILDFLKSDGFANRNFMQLIHDDSLTFKEDIQKAQVSGQGDSLHEHIANLAGSPAIKKGILQTVKVVDELVKVMGRHKPENIVIEMARENQTTQKGQKNSRERMKRIEEGIKELGSQILKEHPVENTQLQNEKLYLYYLQNGRDMYVDQELDINRLSDYDVDHIVPQSFLKDDSIDNKVLTRSDKARGKSDNVPSEEVVKKMKNYWRQLLNAKLITQRKFDNLTKAERGGLSELDKAGFIKRQLVETRQITKHVAQILDSRMNTKYDENDKLIREVKVITLKSKLVSDFRKDFQFYKVREINNYHHAHDAYLNAVVGTALIKKYPKLESEFVYGDYKVYDVRKMIAKSEQEIGKATAKYFFYSNIMNFFKTEITLANGEIRKRPLIETNGETGEIVWDKGRDFATVRKVLSMPQVNIVKKTEVQTGGFSKESILPKRNSDKLIARKKDWDPKKYGGFDSPTVAYSVLVVAKVEKGKSKKLKSVKELLGITIMERSSFEKNPIDFLEAKGYKEVKKDLIIKLPKYSLFELENGRKRMLASAGELQKGNELALPSKYVNFLYLASHYEKLKGSPEDNEQKQLFVEQHKHYLDEIIEQISEFSKRVILADANLDKVLSAYNKHRDKPIREQAENIIHLFTLTNLGAPAAFKYFDTTIDRKRYTSTKEVLDATLIHQSITGLYETRIDLSQLGGDGGPAPAPAPGGMDLLKPLTVERKGVKIKGYWNSQADITCVPKDLLQGEEPVRQQNVTTIHGTQEGDVYYVNLKIDGRRINTEVIGTTLDYAIITPGDVPWILKKPLELTIKLDLEEQQGTLLNNSILSKKGKEELKQLFEKYSALWQSWENQVGHRRIRPHKIATGTVKPTPQKQYHINPKAKPDIQIVINDLLKQGVLIQKESTMNTPVYPVPKPNGRWRMVLDYRAVNKVTPLIAVQNQHSYGILGSLFKGRYKTTIDLSNGFWAHPIVPEDYWITAFTWQGKQYCWTVLPQGFLNSPGLFNGDVVDLLQGIPNVEVYVDDVYISHDSEKEHLEYLDILFNRLKEAGYIISLKKSNIANSIVDFLGFQITNEGRGLTDTFKEKLENITAPTTLKQLQSILGLLNFARNFIPDFTELIAPLYALIPKSPKNYVPWQIEHSTTLETLITKLNGAEYLQGRKGDKTLIMKVNASYTTGYIRYYNEGEKKPISYVSIVFSKTELKFTELEKLLTTVHKGLLKALDLSMGQNIHVYSPIVSMQNIQKTPQTAKKALASRWLSWLSYLEDPRIRFFYDPQMPALKDLPAVDTGKDNKKHPSNFQHIFYTDGSAITSPTKEGHLNAGMGIVYFINKDGNLQKQQEWSISLGNHTAQFAEIAAFEFALKKCLPLGGNILVVTDSNYVAKAYNEELDVWASNGFVNNRKKPLKHISKWKSVADLKRLRPDVVVTHEPGHQKLDSSPHAYGNNLADQLATQASFKVHAGKRTADGSEFEKRTADGSEFESPKKKAKVE

SEQ ID NO: 6495 - protein, 2091 aa, synthetic construct
MPAAKRVKLDGGDKKYSIGLDIGTNSVGWAVITDEYKVPSKKFKVLGNTDRHSIKKNLIGALLFDSGETAEATRLKRTARRRYTRRKNRICYLQEIFSNEMAKVDDSFFHRLEESFLVEEDKKHERHPIFGNIVDEVAYHEKYPTIYHLRKKLVDSTDKADLRLIYLALAHMIKFRGHFLIEGDLNPDNSDVDKLFIQLVQTYNQLFEENPINASGVDAKAILSARLSKSRRLENLIAQLPGEKKNGLFGNLIALSLGLTPNFKSNFDLAEDAKLQLSKDTYDDDLDNLLAQIGDQYADLFLAAKNLSDAILLSDILRVNTEITKAPLSASMIKRYDEHHQDLTLLKALVRQQLPEKYKEIFFDQSKNGYAGYIDGGASQEEFYKFIKPILEKMDGTEELLVKLNREDLLRKQRTFDNGSIPHQIHLGELHAILRRQEDFYPFLKDNREKIEKILTFRIPYYVGPLARGNSRFAWMTRKSEETITPWNFEEVVDKGASAQSFIERMTNFDKNLPNEKVLPKHSLLYEYFTVYNELTKVKYVTEGMRKPAFLSGEQKKAIVDLLFKTNRKVTVKQLKEDYFKKIECFDSVEISGVEDRFNASLGTYHDLLKIIKDKDFLDNEENEDILEDIVLTLTLFEDREMIEERLKTYAHLFDDKVMKQLKRRRYTGWGRLSRKLINGIRDKQSGKTILDFLKSDGFANRNFMQLIHDDSLTFKEDIQKAQVSGQGDSLHEHIANLAGSPAIKKGILQTVKVVDELVKVMGRHKPENIVIEMARENQTTQKGQKNSRERMKRIEEGIKELGSQILKEHPVENTQLQNEKLYLYYLQNGRDMYVDQELDINRLSDYDVDHIVPQSFLKDDSIDNKVLTRSDKARGKSDNVPSEEVVKKMKNYWRQLLNAKLITQRKFDNLTKAERGGLSELDKAGFIKRQLVETRQITKHVAQILDSRMNTKYDENDKLIREVKVITLKSKLVSDFRKDFQFYKVREINNYHHAHDAYLNAVVGTALIKKYPKLESEFVYGDYKVYDVRKMIAKSEQEIGKATAKYFFYSNIMNFFKTEITLANGEIRKRPLIETNGETGEIVWDKGRDFATVRKVLSMPQVNIVKKTEVQTGGFSKESILPKRNSDKLIARKKDWDPKKYGGFDSPTVAYSVLVVAKVEKGKSKKLKSVKELLGITIMERSSFEKNPIDFLEAKGYKEVKKDLIIKLPKYSLFELENGRKRMLASAGELQKGNELALPSKYVNFLYLASHYEKLKGSPEDNEQKQLFVEQHKHYLDEIIEQISEFSKRVILADANLDKVLSAYNKHRDKPIREQAENIIHLFTLTNLGAPAAFKYFDTTIDRKRYTSTKEVLDATLIHQSITGLYETRIDLSQLGGDGGPAPAPAPGGTLQLEEEYRLFEPESTQKQEMDIWLKNFPQAWAETGGMGTAHCQAPVLIQLKATATPISIRQYPMPHEAYQGIKPHIRRMLDQGILKPCQSPWNTPLLPVKKPGTEDYRPVQDLREVNKRVEDIHPTVPNPYNLLSTLPPSHPWYTVLDLKDAFFCLRLHSESQLLFAFEWRDPEIGLSGQLTWTRLPQGFKNSPTLFNEALHSDLADFRVRYPALVLLQYVDDLLLAAATRTECLEGTKALLETLGNKGYRASAKKAQICLQEVTYLGYSLKDGQRWLTKARKEAILSIPVPKNSRQVREFLGTAGYCRLWIPGFAELAAPLYPLTRPGTLFQWGTEQQLAFEDIKKALLSSPALGLPDITKPFELFIDENSGFAKGVLVQKLGPWKRPVAYLSKKLDTVASGWPPCLRMVAAIAILVKDAGKLTLGQPLTILTSHPVEALVRQPPNKWLSNARMTHYQAMLLDAERVHFGPTVSLNPATLLPLPSGGNHHDCLQILAETHGTRPDLTDQPLPDADLTWYTDGSSFIRNGEREAGAAVTTESEVIWAAPLPPGTSAQRAELIALTQALKMAEGKKLTVYTDSRYAFATTHVHGEIYRRRGWLTSEGKEIKNKNEILALLEALFLPKRLSIIHCPGHQKGDSPQAKGNRLADDTAKKAATETHSSLTVLPAGKRTADGSEFEKRTADGSEFESPKKKAKVE

SEQ ID NO: 6496 - protein, 2091 aa, synthetic construct
MPAAKRVKLDGGDKKYSIGLDIGTNSVGWAVITDEYKVPSKKFKVLGNTDRHSIKKNLIGALLFDSGETAEATRLKRTARRRYTRRKNRICYLQEIFSNEMAKVDDSFFHRLEESFLVEEDKKHERHPIFGNIVDEVAYHEKYPTIYHLRKKLVDSTDKADLRLIYLALAHMIKFRGHFLIEGDLNPDNSDVDKLFIQLVQTYNQLFEENPINASGVDAKAILSARLSKSRRLENLIAQLPGEKKNGLFGNLIALSLGLTPNFKSNFDLAEDAKLQLSKDTYDDDLDNLLAQIGDQYADLFLAAKNLSDAILLSDILRVNTEITKAPLSASMIKRYDEHHQDLTLLKALVRQQLPEKYKEIFFDQSKNGYAGYIDGGASQEEFYKFIKPILEKMDGTEELLVKLNREDLLRKQRTFDNGSIPHQIHLGELHAILRRQEDFYPFLKDNREKIEKILTFRIPYYVGPLARGNSRFAWMTRKSEETITPWNFEEVVDKGASAQSFIERMTNFDKNLPNEKVLPKHSLLYEYFTVYNELTKVKYVTEGMRKPAFLSGEQKKAIVDLLFKTNRKVTVKQLKEDYFKKIECFDSVEISGVEDRFNASLGTYHDLLKIIKDKDFLDNEENEDILEDIVLTLTLFEDREMIEERLKTYAHLFDDKVMKQLKRRRYTGWGRLSRKLINGIRDKQSGKTILDFLKSDGFANRNFMQLIHDDSLTFKEDIQKAQVSGQGDSLHEHIANLAGSPAIKKGILQTVKVVDELVKVMGRHKPENIVIEMARENQTTQKGQKNSRERMKRIEEGIKELGSQILKEHPVENTQLQNEKLYLYYLQNGRDMYVDQELDINRLSDYDVDHIVPQSFLKDDSIDNKVLTRSDKARGKSDNVPSEEVVKKMKNYWRQLLNAKLITQRKFDNLTKAERGGLSELDKAGFIKRQLVETRQITKHVAQILDSRMNTKYDENDKLIREVKVITLKSKLVSDFRKDFQFYKVREINNYHHAHDAYLNAVVGTALIKKYPKLESEFVYGDYKVYDVRKMIAKSEQEIGKATAKYFFYSNIMNFFKTEITLANGEIRKRPLIETNGETGEIVWDKGRDFATVRKVLSMPQVNIVKKTEVQTGGFSKESILPKRNSDKLIARKKDWDPKKYGGFDSPTVAYSVLVVAKVEKGKSKKLKSVKELLGITIMERSSFEKNPIDFLEAKGYKEVKKDLIIKLPKYSLFELENGRKRMLASAGELQKGNELALPSKYVNFLYLASHYEKLKGSPEDNEQKQLFVEQHKHYLDEIIEQISEFSKRVILADANLDKVLSAYNKHRDKPIREQAENIIHLFTLTNLGAPAAFKYFDTTIDRKRYTSTKEVLDATLIHQSITGLYETRIDLSQLGGDGGPAPAPAPGGTLQLEEEYRLFEPESTQKQEMDIWLKNFPQAWAETGGMGTAHCQAPVLIQLKATATPISIRQYPMPHEAYQGIKPHIRRMLDQGILKPCQSPWNTPLLPVKKPGTEDYRPVQDLREVNKRVEDIHPTVPNPYNLLSTLPPSHPWYTVLDLKDAFFCLRLHSESQLLFAFEWRDPEIGLSGQLTWTRLPQGFKNSPTLFNEALHSDLADFRVRYPALVLLQYVDDLLLAAATRTECLEGTKALLETLGNKGYRASAKKAQICLQEVTYLGYSLKDGQRWLTKARKEAILSIPVPKNSRQVREFLGKAGYCRLFIPGFAELAAPLYPLTRPGTLFQWGTEQQLAFEDIKKALLSSPALGLPDITKPFELFIDENSGFAKGVLVQKLGPWKRPVAYLSKKLDTVASGWPPCLRMVAAIAILVKDAGKLTLGQPLTILTSHPVEALVRQPPNKWLSNARMTHYQAMLLDAERVHFGPTVSLNPATLLPLPSGGNHHDCLQILAETHGTRPDLTDQPLPDADLTWYTDGSSFIRNGEREAGAAVTTESEVIWAAPLPPGTSAQRAELIALTQALKMAEGKKLTVYTDSRYAFATTHVHGEIYRRRGWLTSEGKEIKNKNEILALLEALFLPKRLSIIHCPGHQKGDSPQAKGNRLADDTAKKAATETHSSLTVLPAGKRTADGSEFEKRTADGSEFESPKKKAKVE

SEQ ID NO: 6497 - protein, 2090 aa, synthetic construct
MPAAKRVKLDGGDKKYSIGLDIGTNSVGWAVITDEYKVPSKKFKVLGNTDRHSIKKNLIGALLFDSGETAEATRLKRTARRRYTRRKNRICYLQEIFSNEMAKVDDSFFHRLEESFLVEEDKKHERHPIFGNIVDEVAYHEKYPTIYHLRKKLVDSTDKADLRLIYLALAHMIKFRGHFLIEGDLNPDNSDVDKLFIQLVQTYNQLFEENPINASGVDAKAILSARLSKSRRLENLIAQLPGEKKNGLFGNLIALSLGLTPNFKSNFDLAEDAKLQLSKDTYDDDLDNLLAQIGDQYADLFLAAKNLSDAILLSDILRVNTEITKAPLSASMIKRYDEHHQDLTLLKALVRQQLPEKYKEIFFDQSKNGYAGYIDGGASQEEFYKFIKPILEKMDGTEELLVKLNREDLLRKQRTFDNGSIPHQIHLGELHAILRRQEDFYPFLKDNREKIEKILTFRIPYYVGPLARGNSRFAWMTRKSEETITPWNFEEVVDKGASAQSFIERMTNFDKNLPNEKVLPKHSLLYEYFTVYNELTKVKYVTEGMRKPAFLSGEQKKAIVDLLFKTNRKVTVKQLKEDYFKKIECFDSVEISGVEDRFNASLGTYHDLLKIIKDKDFLDNEENEDILEDIVLTLTLFEDREMIEERLKTYAHLFDDKVMKQLKRRRYTGWGRLSRKLINGIRDKQSGKTILDFLKSDGFANRNFMQLIHDDSLTFKEDIQKAQVSGQGDSLHEHIANLAGSPAIKKGILQTVKVVDELVKVMGRHKPENIVIEMARENQTTQKGQKNSRERMKRIEEGIKELGSQILKEHPVENTQLQNEKLYLYYLQNGRDMYVDQELDINRLSDYDVDHIVPQSFLKDDSIDNKVLTRSDKARGKSDNVPSEEVVKKMKNYWRQLLNAKLITQRKFDNLTKAERGGLSELDKAGFIKRQLVETRQITKHVAQILDSRMNTKYDENDKLIREVKVITLKSKLVSDFRKDFQFYKVREINNYHHAHDAYLNAVVGTALIKKYPKLESEFVYGDYKVYDVRKMIAKSEQEIGKATAKYFFYSNIMNFFKTEITLANGEIRKRPLIETNGETGEIVWDKGRDFATVRKVLSMPQVNIVKKTEVQTGGFSKESILPKRNSDKLIARKKDWDPKKYGGFDSPTVAYSVLVVAKVEKGKSKKLKSVKELLGITIMERSSFEKNPIDFLEAKGYKEVKKDLIIKLPKYSLFELENGRKRMLASAGELQKGNELALPSKYVNFLYLASHYEKLKGSPEDNEQKQLFVEQHKHYLDEIIEQISEFSKRVILADANLDKVLSAYNKHRDKPIREQAENIIHLFTLTNLGAPAAFKYFDTTIDRKRYTSTKEVLDATLIHQSITGLYETRIDLSQLGGDGGPAPAPAPGGVLNLEEEYRLHEKPVPSSIDPSWLQLFPTVWAERAGMGLANQVPPVVVELRSGASPVAVRQYPMSKEAREGIRPHIQKFLDLGVLVPCRSPWNTPLLPVKKPGTNDYRPVQDLREINKRVQDIHPTVPNPYNLLSSLPPSYTWYSVLDLKDAFFCLRLHPNSQPLFAFEWKDPEKGNTGQLTWTRLPQGFKNSPTLFNEALHRDLAPFRALNPQVVLLQYVDDLLVAAPTYEDCKKGTQKLLQELSKLGYRVSAKKAQLCQREVTYLGYLLKEGKRWLTPARKATVMKIPVPTTPRQVREFLGKAGFCRLFIPGFASLAAPLYPLTKPSIPFIWTEEHQQAFDHIKKALLSAPALALPDLTKPFTLYIDERAGVARGVLTQTLGPWRRPVAYLSKKLDPVASGWPTCLKAVAAVALLLKDADKLTLGQNVTVIASHSLESIVRQPPDRWMTNARMTHYQSLLLNERVSFAPPAVLNPATLLPVESEATPVHRCSEILAEETGTRRDLEDQPLPGVPTWYTDGSSFITEGKRRAGAPIVDGKRTVWASSLPEGTSAQKAELVALTQALRLAEGKNINIYTDSRYAFATAHIHGAIYKQRGWLTSAGKDIKNKEEILALLEAIHLPRRVAIIHCPGHQRGSNPVATGNRRADEAAKQAALSTRVLAGTTKPAGKRTADGSEFEKRTADGSEFESPKKKAKVE

SEQ ID NO: 6498 - protein, 2005 aa, synthetic construct
MPAAKRVKLDGGDKKYSIGLDIGTNSVGWAVITDEYKVPSKKFKVLGNTDRHSIKKNLIGALLFDSGETAEATRLKRTARRRYTRRKNRICYLQEIFSNEMAKVDDSFFHRLEESFLVEEDKKHERHPIFGNIVDEVAYHEKYPTIYHLRKKLVDSTDKADLRLIYLALAHMIKFRGHFLIEGDLNPDNSDVDKLFIQLVQTYNQLFEENPINASGVDAKAILSARLSKSRRLENLIAQLPGEKKNGLFGNLIALSLGLTPNFKSNFDLAEDAKLQLSKDTYDDDLDNLLAQIGDQYADLFLAAKNLSDAILLSDILRVNTEITKAPLSASMIKRYDEHHQDLTLLKALVRQQLPEKYKEIFFDQSKNGYAGYIDGGASQEEFYKFIKPILEKMDGTEELLVKLNREDLLRKQRTFDNGSIPHQIHLGELHAILRRQEDFYPFLKDNREKIEKILTFRIPYYVGPLARGNSRFAWMTRKSEETITPWNFEEVVDKGASAQSFIERMTNFDKNLPNEKVLPKHSLLYEYFTVYNELTKVKYVTEGMRKPAFLSGEQKKAIVDLLFKTNRKVTVKQLKEDYFKKIECFDSVEISGVEDRFNASLGTYHDLLKIIKDKDFLDNEENEDILEDIVLTLTLFEDREMIEERLKTYAHLFDDKVMKQLKRRRYTGWGRLSRKLINGIRDKQSGKTILDFLKSDGFANRNFMQLIHDDSLTFKEDIQKAQVSGQGDSLHEHIANLAGSPAIKKGILQTVKVVDELVKVMGRHKPENIVIEMARENQTTQKGQKNSRERMKRIEEGIKELGSQILKEHPVENTQLQNEKLYLYYLQNGRDMYVDQELDINRLSDYDVDHIVPQSFLKDDSIDNKVLTRSDKARGKSDNVPSEEVVKKMKNYWRQLLNAKLITQRKFDNLTKAERGGLSELDKAGFIKRQLVETRQITKHVAQILDSRMNTKYDENDKLIREVKVITLKSKLVSDFRKDFQFYKVREINNYHHAHDAYLNAVVGTALIKKYPKLESEFVYGDYKVYDVRKMIAKSEQEIGKATAKYFFYSNIMNFFKTEITLANGEIRKRPLIETNGETGEIVWDKGRDFATVRKVLSMPQVNIVKKTEVQTGGFSKESILPKRNSDKLIARKKDWDPKKYGGFDSPTVAYSVLVVAKVEKGKSKKLKSVKELLGITIMERSSFEKNPIDFLEAKGYKEVKKDLIIKLPKYSLFELENGRKRMLASAGELQKGNELALPSKYVNFLYLASHYEKLKGSPEDNEQKQLFVEQHKHYLDEIIEQISEFSKRVILADANLDKVLSAYNKHRDKPIREQAENIIHLFTLTNLGAPAAFKYFDTTIDRKRYTSTKEVLDATLIHQSITGLYETRIDLSQLGGDGGPAPAPAPGGHLPPPPQVDQFPLNLPERLQALNDLVSKALEAGHIEPYSGPGNNPVFPVKKPNGKWRFIHDLRATNAITTTLTSPSPGPPDLTSLPTALPHLQTIDLTDAFFQIPLPKQYQPYFAFTIPQPCNYGPGTRYAWTVLPQGFKNSPTLFQQQLAAVLNPMRKMFPTSTIVQYMDDILLASPTNEELQQLSQLTLQALTTHGLPISQEKTQQTPGQIRFLGQVISPNHITYESTPTIPIKSQWTLTELQVILGEIQWVSKGTPILRKHLQSLYSALHPYRDPRACITLTPQQLHALHAIQQALQHNCRGRLNPALPLLGLISLSTSGTTSVIFQPKQNWPLAWLHTPHPPTSLCPWGHLLACTILTLDKYTLQHYGQLCQSFHHNMSKQALCDFLRNSPHPSVGILIHHMGRFHNLGSQPSGPWKTLLHLPTLLQEPRLLRPIFTLSPVVLDTAPCLFSDGSPQKAAYVLWDQTILQQDITPLPSHETHSAQKGELLALICGLRAAKPWPSLNIFLDSKYLIKYLHSLAIGAFLGTSAHQTLQAALPPLLQGKTIYLHHVRSHTNLPDPISTFNEYTDSLILAPLVPLAGKRTADGSEFEKRTADGSEFESPKKKAKVE

SEQ ID NO: 6499 - protein, 2214 aa, synthetic construct
MPAAKRVKLDGGDKKYSIGLDIGTNSVGWAVITDEYKVPSKKFKVLGNTDRHSIKKNLIGALLFDSGETAEATRLKRTARRRYTRRKNRICYLQEIFSNEMAKVDDSFFHRLEESFLVEEDKKHERHPIFGNIVDEVAYHEKYPTIYHLRKKLVDSTDKADLRLIYLALAHMIKFRGHFLIEGDLNPDNSDVDKLFIQLVQTYNQLFEENPINASGVDAKAILSARLSKSRRLENLIAQLPGEKKNGLFGNLIALSLGLTPNFKSNFDLAEDAKLQLSKDTYDDDLDNLLAQIGDQYADLFLAAKNLSDAILLSDILRVNTEITKAPLSASMIKRYDEHHQDLTLLKALVRQQLPEKYKEIFFDQSKNGYAGYIDGGASQEEFYKFIKPILEKMDGTEELLVKLNREDLLRKQRTFDNGSIPHQIHLGELHAILRRQEDFYPFLKDNREKIEKILTFRIPYYVGPLARGNSRFAWMTRKSEETITPWNFEEVVDKGASAQSFIERMTNFDKNLPNEKVLPKHSLLYEYFTVYNELTKVKYVTEGMRKPAFLSGEQKKAIVDLLFKTNRKVTVKQLKEDYFKKIECFDSVEISGVEDRFNASLGTYHDLLKIIKDKDFLDNEENEDILEDIVLTLTLFEDREMIEERLKTYAHLFDDKVMKQLKRRRYTGWGRLSRKLINGIRDKQSGKTILDFLKSDGFANRNFMQLIHDDSLTFKEDIQKAQVSGQGDSLHEHIANLAGSPAIKKGILQTVKVVDELVKVMGRHKPENIVIEMARENQTTQKGQKNSRERMKRIEEGIKELGSQILKEHPVENTQLQNEKLYLYYLQNGRDMYVDQELDINRLSDYDVDHIVPQSFLKDDSIDNKVLTRSDKARGKSDNVPSEEVVKKMKNYWRQLLNAKLITQRKFDNLTKAERGGLSELDKAGFIKRQLVETRQITKHVAQILDSRMNTKYDENDKLIREVKVITLKSKLVSDFRKDFQFYKVREINNYHHAHDAYLNAVVGTALIKKYPKLESEFVYGDYKVYDVRKMIAKSEQEIGKATAKYFFYSNIMNFFKTEITLANGEIRKRPLIETNGETGEIVWDKGRDFATVRKVLSMPQVNIVKKTEVQTGGFSKESILPKRNSDKLIARKKDWDPKKYGGFDSPTVAYSVLVVAKVEKGKSKKLKSVKELLGITIMERSSFEKNPIDFLEAKGYKEVKKDLIIKLPKYSLFELENGRKRMLASAGELQKGNELALPSKYVNFLYLASHYEKLKGSPEDNEQKQLFVEQHKHYLDEIIEQISEFSKRVILADANLDKVLSAYNKHRDKPIREQAENIIHLFTLTNLGAPAAFKYFDTTIDRKRYTSTKEVLDATLIHQSITGLYETRIDLSQLGGDGGPAPAPAPGGTLGDQGSRGSDPLPEPRVTLTVEGIPTEFLVNTGAEHSVLTKPMGKMGSKRTVVAGATGSKVYPWTTKRLLKIGQKQVTHSFLVIPECPAPLLGRDLLTKLKAQIQFSTEGPQVTWEDRPAMCLVLNLEEEYRLHEKPVPPSIDPSWLQLFPMVWAEKAGMGLANQVPPVVVELKSDASPVAVRQYPMSKEAREGIRPHIQRFLDLGILVPCQSPWNTPLLPVKKPGTNDYRPVQDLREVNKRVQDIHPTVPNPYNLLSSLPPSHTWYSVLDLKDAFFCLKLHPNSQPLFAFEWRDPEKGNTGQLTWTRLPQGFKNSPTLFNEALHRDLASFRALNPQVVMLQYVDDLLVAAPTYRDCKEGTRRLLQELSKLGYRVSAKKAQLCREEVTYLGYLLKGGKRWLTPARKATVMKIPTPTTPRQVREFLGKAGFCRLFIPGFASLAAPLYPLTRPKVPFTWTEAHQEAFGRIKEALLSAPALALPDLTKPFALYVDEKEGVARGVLTQTLGPWRRPVAYLSKKLDPVASGWPTCLKAIAAVALLLKDADKLTLGQNVLVIAPHNLESIVRQPPDRWMTNARMTHYQSLLLNERVSFAPPAILNPATLLPVESDDTPIHICSEILAEETGTRPDLRDQPLPGVPAWYTDGSSFIMDGRRQAGAAIVDNKRTVWASNLPEGTSAQKAELIALTQALRLAEGKSINIYTDSRYAFATAHVHGAIYKQRGWLTSAGKDIKNKEEILALLEAIHLPKRVAIIHCPGHQRGTDPVATGNRKADEAAKQAAQSTRILTETTKNAGKRTADGSEFEKRTADGSEFESPKKKAKVE

SEQ ID NO: 6500 - protein, 2092 aa, synthetic construct
MPAAKRVKLDGGDKKYSIGLDIGTNSVGWAVITDEYKVPSKKFKVLGNTDRHSIKKNLIGALLFDSGETAEATRLKRTARRRYTRRKNRICYLQEIFSNEMAKVDDSFFHRLEESFLVEEDKKHERHPIFGNIVDEVAYHEKYPTIYHLRKKLVDSTDKADLRLIYLALAHMIKFRGHFLIEGDLNPDNSDVDKLFIQLVQTYNQLFEENPINASGVDAKAILSARLSKSRRLENLIAQLPGEKKNGLFGNLIALSLGLTPNFKSNFDLAEDAKLQLSKDTYDDDLDNLLAQIGDQYADLFLAAKNLSDAILLSDILRVNTEITKAPLSASMIKRYDEHHQDLTLLKALVRQQLPEKYKEIFFDQSKNGYAGYIDGGASQEEFYKFIKPILEKMDGTEELLVKLNREDLLRKQRTFDNGSIPHQIHLGELHAILRRQEDFYPFLKDNREKIEKILTFRIPYYVGPLARGNSRFAWMTRKSEETITPWNFEEVVDKGASAQSFIERMTNFDKNLPNEKVLPKHSLLYEYFTVYNELTKVKYVTEGMRKPAFLSGEQKKAIVDLLFKTNRKVTVKQLKEDYFKKIECFDSVEISGVEDRFNASLGTYHDLLKIIKDKDFLDNEENEDILEDIVLTLTLFEDREMIEERLKTYAHLFDDKVMKQLKRRRYTGWGRLSRKLINGIRDKQSGKTILDFLKSDGFANRNFMQLIHDDSLTFKEDIQKAQVSGQGDSLHEHIANLAGSPAIKKGILQTVKVVDELVKVMGRHKPENIVIEMARENQTTQKGQKNSRERMKRIEEGIKELGSQILKEHPVENTQLQNEKLYLYYLQNGRDMYVDQELDINRLSDYDVDHIVPQSFLKDDSIDNKVLTRSDKARGKSDNVPSEEVVKKMKNYWRQLLNAKLITQRKFDNLTKAERGGLSELDKAGFIKRQLVETRQITKHVAQILDSRMNTKYDENDKLIREVKVITLKSKLVSDFRKDFQFYKVREINNYHHAHDAYLNAVVGTALIKKYPKLESEFVYGDYKVYDVRKMIAKSEQEIGKATAKYFFYSNIMNFFKTEITLANGEIRKRPLIETNGETGEIVWDKGRDFATVRKVLSMPQVNIVKKTEVQTGGFSKESILPKRNSDKLIARKKDWDPKKYGGFDSPTVAYSVLVVAKVEKGKSKKLKSVKELLGITIMERSSFEKNPIDFLEAKGYKEVKKDLIIKLPKYSLFELENGRKRMLASAGELQKGNELALPSKYVNFLYLASHYEKLKGSPEDNEQKQLFVEQHKHYLDEIIEQISEFSKRVILADANLDKVLSAYNKHRDKPIREQAENIIHLFTLTNLGAPAAFKYFDTTIDRKRYTSTKEVLDATLIHQSITGLYETRIDLSQLGGDGGPAPAPAPGGTLNLEDEYRLYETSAEPEVSPGSTWLSDFPQAWAETGGMGLAVRQAPLIIPLKATSTPVSIKQYPMSQEAKLGIKPHIQRLLDQGILVPCQSPWNTPLLPVKKPGTNDYRPVQDLREVNKRVEDIHPTVPNPYNLLSGLPPSHRWYTVLDLKDAFFCLRLHPTSQPLFAFEWRDPGMGISGQLTWTRLPQGFKNSPTLFNEALHRDLADFRIQHPDLILLQYVDDILLAATSELDCQQGTRALLLTLGNLGYRASAKKAQLCQKQVKYLGYLLKEGQRWLTEARKETVMGQPTPKTPRQLREFLGTAGFCRLWIPGFAEMAAPLYPLTKPGTLFNWGPDQQKAYQEIKQALLTAPALGLPDLTKPFELFVDEKQGYAKGVLTQKLGPWRRPVAYLSKKLDPVAAGWPPCLRMVAAIAVLRKDAGKLTMGQPLVILAPHAVEALVKQPPDRWLSNARMTHYQAMLLDTDRVQFGPVVALNPATLLPLPEEGAPHDCLEILAETHGTRPDLTDQPIPDADHTWYTDGSSFLQEGQRKAGAAVTTETEVIWARALPAGTSAQRAELIALTQALKMAEGKRLNVYTDSRYAFATAHIHGEIYRRRGWLTSEGREIKNKSEILALLKALFLPKRLSIIHCLGHQKGDSAEARGNRLADQAAREAAIKTPPDTSTLLAGKRTADGSEFEKRTADGSEFESPKKKAKVE

SEQ ID NO: 6501 - protein, 2092 aa, synthetic construct
MPAAKRVKLDGGDKKYSIGLDIGTNSVGWAVITDEYKVPSKKFKVLGNTDRHSIKKNLIGALLFDSGETAEATRLKRTARRRYTRRKNRICYLQEIFSNEMAKVDDSFFHRLEESFLVEEDKKHERHPIFGNIVDEVAYHEKYPTIYHLRKKLVDSTDKADLRLIYLALAHMIKFRGHFLIEGDLNPDNSDVDKLFIQLVQTYNQLFEENPINASGVDAKAILSARLSKSRRLENLIAQLPGEKKNGLFGNLIALSLGLTPNFKSNFDLAEDAKLQLSKDTYDDDLDNLLAQIGDQYADLFLAAKNLSDAILLSDILRVNTEITKAPLSASMIKRYDEHHQDLTLLKALVRQQLPEKYKEIFFDQSKNGYAGYIDGGASQEEFYKFIKPILEKMDGTEELLVKLNREDLLRKQRTFDNGSIPHQIHLGELHAILRRQEDFYPFLKDNREKIEKILTFRIPYYVGPLARGNSRFAWMTRKSEETITPWNFEEVVDKGASAQSFIERMTNFDKNLPNEKVLPKHSLLYEYFTVYNELTKVKYVTEGMRKPAFLSGEQKKAIVDLLFKTNRKVTVKQLKEDYFKKIECFDSVEISGVEDRFNASLGTYHDLLKIIKDKDFLDNEENEDILEDIVLTLTLFEDREMIEERLKTYAHLFDDKVMKQLKRRRYTGWGRLSRKLINGIRDKQSGKTILDFLKSDGFANRNFMQLIHDDSLTFKEDIQKAQVSGQGDSLHEHIANLAGSPAIKKGILQTVKVVDELVKVMGRHKPENIVIEMARENQTTQKGQKNSRERMKRIEEGIKELGSQILKEHPVENTQLQNEKLYLYYLQNGRDMYVDQELDINRLSDYDVDHIVPQSFLKDDSIDNKVLTRSDKARGKSDNVPSEEVVKKMKNYWRQLLNAKLITQRKFDNLTKAERGGLSELDKAGFIKRQLVETRQITKHVAQILDSRMNTKYDENDKLIREVKVITLKSKLVSDFRKDFQFYKVREINNYHHAHDAYLNAVVGTALIKKYPKLESEFVYGDYKVYDVRKMIAKSEQEIGKATAKYFFYSNIMNFFKTEITLANGEIRKRPLIETNGETGEIVWDKGRDFATVRKVLSMPQVNIVKKTEVQTGGFSKESILPKRNSDKLIARKKDWDPKKYGGFDSPTVAYSVLVVAKVEKGKSKKLKSVKELLGITIMERSSFEKNPIDFLEAKGYKEVKKDLIIKLPKYSLFELENGRKRMLASAGELQKGNELALPSKYVNFLYLASHYEKLKGSPEDNEQKQLFVEQHKHYLDEIIEQISEFSKRVILADANLDKVLSAYNKHRDKPIREQAENIIHLFTLTNLGAPAAFKYFDTTIDRKRYTSTKEVLDATLIHQSITGLYETRIDLSQLGGDGGPAPAPAPGGTLGIEDEYRLHETSTEPDVSLGSTWLSDFPQAWAETGGMGLAVRQAPLIIPLKATSTPVSIQQYPMSHEARLGIKPHIQRLLDQGILVPCQSPWNTPLLPVKKPGTNDYRPVQDLREVNKRVEDIHPTVPNPYNLLSGLPPSHQWYTVLDLKDAFFCLRLHPTSQPLFAFEWRDPGMGISGQLTWTRLPQGFKNSPTLFNEALHRDLADFRIQHPDLILLQYVDDILLAATSELDCQQGTRALLQTLGDLGYRASAKKAQICQKQVKYLGYLLREGQRWLTEARKETVMGQPVPKTPRQLREFLGTAGFCRLWIPGFAEMAAPLYPLTKPGTLFSWGPDQQKAYQEIKQALLTAPALGLPDLTKPFELFVDEKQGYAKGVLTQKLGPWRRPVAYLSKKLDPVAAGWPPCLRMVAAIAVLTKDAGKLTMGQPLVILAPHAVEALVKQPPDRWLSNARMTHYQAMLLDTDRVQFGPVVALNPATLLPLPEEGAPHDCLEILAETHGTRPDLTDQPIPDADHTWYTDGSSFLQEGQRKAGAAVTTETEVIWAGALPAGTSAQRAELIALTQALKMAEGKRLNVYTDSRYAFATAHIHGEIYRRRGWLTSEGREIKNKSEILALLKALFLPKRLSIIHCLGHQKGDSAEARGNRLADQAAREAAIKTPPDTSTLLAGKRTADGSEFEKRTADGSEFESPKKKAKVE

SEQ ID NO: 6502 - protein, 2092 aa, synthetic construct
MPAAKRVKLDGGDKKYSIGLDIGTNSVGWAVITDEYKVPSKKFKVLGNTDRHSIKKNLIGALLFDSGETAEATRLKRTARRRYTRRKNRICYLQEIFSNEMAKVDDSFFHRLEESFLVEEDKKHERHPIFGNIVDEVAYHEKYPTIYHLRKKLVDSTDKADLRLIYLALAHMIKFRGHFLIEGDLNPDNSDVDKLFIQLVQTYNQLFEENPINASGVDAKAILSARLSKSRRLENLIAQLPGEKKNGLFGNLIALSLGLTPNFKSNFDLAEDAKLQLSKDTYDDDLDNLLAQIGDQYADLFLAAKNLSDAILLSDILRVNTEITKAPLSASMIKRYDEHHQDLTLLKALVRQQLPEKYKEIFFDQSKNGYAGYIDGGASQEEFYKFIKPILEKMDGTEELLVKLNREDLLRKQRTFDNGSIPHQIHLGELHAILRRQEDFYPFLKDNREKIEKILTFRIPYYVGPLARGNSRFAWMTRKSEETITPWNFEEVVDKGASAQSFIERMTNFDKNLPNEKVLPKHSLLYEYFTVYNELTKVKYVTEGMRKPAFLSGEQKKAIVDLLFKTNRKVTVKQLKEDYFKKIECFDSVEISGVEDRFNASLGTYHDLLKIIKDKDFLDNEENEDILEDIVLTLTLFEDREMIEERLKTYAHLFDDKVMKQLKRRRYTGWGRLSRKLINGIRDKQSGKTILDFLKSDGFANRNFMQLIHDDSLTFKEDIQKAQVSGQGDSLHEHIANLAGSPAIKKGILQTVKVVDELVKVMGRHKPENIVIEMARENQTTQKGQKNSRERMKRIEEGIKELGSQILKEHPVENTQLQNEKLYLYYLQNGRDMYVDQELDINRLSDYDVDHIVPQSFLKDDSIDNKVLTRSDKARGKSDNVPSEEVVKKMKNYWRQLLNAKLITQRKFDNLTKAERGGLSELDKAGFIKRQLVETRQITKHVAQILDSRMNTKYDENDKLIREVKVITLKSKLVSDFRKDFQFYKVREINNYHHAHDAYLNAVVGTALIKKYPKLESEFVYGDYKVYDVRKMIAKSEQEIGKATAKYFFYSNIMNFFKTEITLANGEIRKRPLIETNGETGEIVWDKGRDFATVRKVLSMPQVNIVKKTEVQTGGFSKESILPKRNSDKLIARKKDWDPKKYGGFDSPTVAYSVLVVAKVEKGKSKKLKSVKELLGITIMERSSFEKNPIDFLEAKGYKEVKKDLIIKLPKYSLFELENGRKRMLASAGELQKGNELALPSKYVNFLYLASHYEKLKGSPEDNEQKQLFVEQHKHYLDEIIEQISEFSKRVILADANLDKVLSAYNKHRDKPIREQAENIIHLFTLTNLGAPAAFKYFDTTIDRKRYTSTKEVLDATLIHQSITGLYETRIDLSQLGGDGGPAPAPAPGGTLNIEDEYRLHETSKGPDVPLGSTWLSDFPQAWAETGGMGLAVRQAPLIIPLKATSTPVSIKQYPMSQEARLGIKPHIQRLLDQGILVPCQSPWNTPLLPVKKPGTNDYRPVQDLREVNKRVEDIHPTVPNPYNLLSGLPPSHQWYTVLDLKDAFFCLRLHPTSQSLFAFEWRDPEMGISGQLTWTRLPQGFKNSPTLFNEALHRDLADFRIQHPDLILLQYVDDLLLAATSELDCQQGTRALLQTLGDLGYRASAKKAQICQKQVKYLGYLLKEGQRWLTEARKETVMGQPTPKTPRQLREFLGTAGFCRLWIPGFAEMAAPLYPLTKPGTLFEWGPDQQKAYQEIKQALLTAPALGLPDLTKPFELFVDEKQGYAKGVLTQKLGPWRRPVAYLSKKLDPVAAGWPPCLRMVAAIAVLTKDAGKLTMGQPLVILAPHAVEALVKQPPDRWLSNARMTHYQALLLDTDRVQFGPIVALNPATLLPLPEEGLQHDCLDILAEAHGTRPDLTDQPLPDADHTWYTDGSSFLQEGQRKAGAAVTTETEVVWAKALPAGTSAQRAELIALTQALKMAEGKKLNVYTDSRYAFATAHIHGEIYRRRGWLTSEGKEIKNKDEILALLKALFLPKRLSIIHCPGHQKGNRAEARGNRMADQAAREVATRETPETSTLLAGKRTADGSEFEKRTADGSEFESPKKKAKVE

SEQ ID NO: 6503 - protein, 2092 aa, synthetic construct
MPAAKRVKLDGGDKKYSIGLDIGTNSVGWAVITDEYKVPSKKFKVLGNTDRHSIKKNLIGALLFDSGETAEATRLKRTARRRYTRRKNRICYLQEIFSNEMAKVDDSFFHRLEESFLVEEDKKHERHPIFGNIVDEVAYHEKYPTIYHLRKKLVDSTDKADLRLIYLALAHMIKFRGHFLIEGDLNPDNSDVDKLFIQLVQTYNQLFEENPINASGVDAKAILSARLSKSRRLENLIAQLPGEKKNGLFGNLIALSLGLTPNFKSNFDLAEDAKLQLSKDTYDDDLDNLLAQIGDQYADLFLAAKNLSDAILLSDILRVNTEITKAPLSASMIKRYDEHHQDLTLLKALVRQQLPEKYKEIFFDQSKNGYAGYIDGGASQEEFYKFIKPILEKMDGTEELLVKLNREDLLRKQRTFDNGSIPHQIHLGELHAILRRQEDFYPFLKDNREKIEKILTFRIPYYVGPLARGNSRFAWMTRKSEETITPWNFEEVVDKGASAQSFIERMTNFDKNLPNEKVLPKHSLLYEYFTVYNELTKVKYVTEGMRKPAFLSGEQKKAIVDLLFKTNRKVTVKQLKEDYFKKIECFDSVEISGVEDRFNASLGTYHDLLKIIKDKDFLDNEENEDILEDIVLTLTLFEDREMIEERLKTYAHLFDDKVMKQLKRRRYTGWGRLSRKLINGIRDKQSGKTILDFLKSDGFANRNFMQLIHDDSLTFKEDIQKAQVSGQGDSLHEHIANLAGSPAIKKGILQTVKVVDELVKVMGRHKPENIVIEMARENQTTQKGQKNSRERMKRIEEGIKELGSQILKEHPVENTQLQNEKLYLYYLQNGRDMYVDQELDINRLSDYDVDHIVPQSFLKDDSIDNKVLTRSDKARGKSDNVPSEEVVKKMKNYWRQLLNAKLITQRKFDNLTKAERGGLSELDKAGFIKRQLVETRQITKHVAQILDSRMNTKYDENDKLIREVKVITLKSKLVSDFRKDFQFYKVREINNYHHAHDAYLNAVVGTALIKKYPKLESEFVYGDYKVYDVRKMIAKSEQEIGKATAKYFFYSNIMNFFKTEITLANGEIRKRPLIETNGETGEIVWDKGRDFATVRKVLSMPQVNIVKKTEVQTGGFSKESILPKRNSDKLIARKKDWDPKKYGGFDSPTVAYSVLVVAKVEKGKSKKLKSVKELLGITIMERSSFEKNPIDFLEAKGYKEVKKDLIIKLPKYSLFELENGRKRMLASAGELQKGNELALPSKYVNFLYLASHYEKLKGSPEDNEQKQLFVEQHKHYLDEIIEQISEFSKRVILADANLDKVLSAYNKHRDKPIREQAENIIHLFTLTNLGAPAAFKYFDTTIDRKRYTSTKEVLDATLIHQSITGLYETRIDLSQLGGDGGPAPAPAPGGTLNIEDEYRLHETSKGPDVPLGSTWLSDFPQAWAETGGMGLAVRQAPLIIPLKATSTPVSIKQYPMSQEARLGIKPHIQRLLDQGILVPCQSPWNTPLLPVKKPGTNDYRPVQDLREVNKRVEDIHPTVPNPYNLLSGLPPSHQWYTVLDLKDAFFCLRLHPTSQSLFAFEWRDPEMGISGQLTWTRLPQGFKNSPTLFNEALHRDLADFRIQHPDLILLQYVDDLLLAATSELDCQQGTRALLQTLGDLGYRASAKKAQICQKQVKYLGYLLKEGQRWLTEARKETVMGQPTPKTPRQLREFLGKAGFCRLFIPGFAEMAAPLYPLTKPGTLFEWGPDQQKAYQEIKQALLTAPALGLPDLTKPFELFVDEKQGYAKGVLTQKLGPWRRPVAYLSKKLDPVAAGWPPCLRMVAAIAVLTKDAGKLTMGQPLVILAPHAVEALVKQPPDRWLSNARMTHYQALLLDTDRVQFGPIVALNPATLLPLPEEGLQHDCLDILAEAHGTRPDLTDQPLPDADHTWYTDGSSFLQEGQRKAGAAVTTETEVVWAKALPAGTSAQRAELIALTQALKMAEGKKLNVYTDSRYAFATAHIHGEIYRRRGWLTSEGKEIKNKDEILALLKALFLPKRLSIIHCPGHQKGNRAEARGNRMADQAAREVATRETPETSTLLAGKRTADGSEFEKRTADGSEFESPKKKAKVE

SEQ ID NO: 6504 - protein, 2112 aa, synthetic construct; identical to SEQ ID NO: 4508

SEQ ID NO: 6505 - protein, 2112 aa, synthetic construct; identical to SEQ ID NO: 4508

SEQ ID NO: 6506 - protein, 2092 aa, synthetic construct
MPAAKRVKLDGGDKKYSIGLDIGTNSVGWAVITDEYKVPSKKFKVLGNTDRHSIKKNLIGALLFDSGETAEATRLKRTARRRYTRRKNRICYLQEIFSNEMAKVDDSFFHRLEESFLVEEDKKHERHPIFGNIVDEVAYHEKYPTIYHLRKKLVDSTDKADLRLIYLALAHMIKFRGHFLIEGDLNPDNSDVDKLFIQLVQTYNQLFEENPINASGVDAKAILSARLSKSRRLENLIAQLPGEKKNGLFGNLIALSLGLTPNFKSNFDLAEDAKLQLSKDTYDDDLDNLLAQIGDQYADLFLAAKNLSDAILLSDILRVNTEITKAPLSASMIKRYDEHHQDLTLLKALVRQQLPEKYKEIFFDQSKNGYAGYIDGGASQEEFYKFIKPILEKMDGTEELLVKLNREDLLRKQRTFDNGSIPHQIHLGELHAILRRQEDFYPFLKDNREKIEKILTFRIPYYVGPLARGNSRFAWMTRKSEETITPWNFEEVVDKGASAQSFIERMTNFDKNLPNEKVLPKHSLLYEYFTVYNELTKVKYVTEGMRKPAFLSGEQKKAIVDLLFKTNRKVTVKQLKEDYFKKIECFDSVEISGVEDRFNASLGTYHDLLKIIKDKDFLDNEENEDILEDIVLTLTLFEDREMIEERLKTYAHLFDDKVMKQLKRRRYTGWGRLSRKLINGIRDKQSGKTILDFLKSDGFANRNFMQLIHDDSLTFKEDIQKAQVSGQGDSLHEHIANLAGSPAIKKGILQTVKVVDELVKVMGRHKPENIVIEMARENQTTQKGQKNSRERMKRIEEGIKELGSQILKEHPVENTQLQNEKLYLYYLQNGRDMYVDQELDINRLSDYDVDHIVPQSFLKDDSIDNKVLTRSDKARGKSDNVPSEEVVKKMKNYWRQLLNAKLITQRKFDNLTKAERGGLSELDKAGFIKRQLVETRQITKHVAQILDSRMNTKYDENDKLIREVKVITLKSKLVSDFRKDFQFYKVREINNYHHAHDAYLNAVVGTALIKKYPKLESEFVYGDYKVYDVRKMIAKSEQEIGKATAKYFFYSNIMNFFKTEITLANGEIRKRPLIETNGETGEIVWDKGRDFATVRKVLSMPQVNIVKKTEVQTGGFSKESILPKRNSDKLIARKKDWDPKKYGGFDSPTVAYSVLVVAKVEKGKSKKLKSVKELLGITIMERSSFEKNPIDFLEAKGYKEVKKDLIIKLPKYSLFELENGRKRMLASAGELQKGNELALPSKYVNFLYLASHYEKLKGSPEDNEQKQLFVEQHKHYLDEIIEQISEFSKRVILADANLDKVLSAYNKHRDKPIREQAENIIHLFTLTNLGAPAAFKYFDTTIDRKRYTSTKEVLDATLIHQSITGLYETRIDLSQLGGDGGPAPAPAPGGTLNIEDEYRLHEISTEPDVSPGSTWLSDFPQAWAETGGMGLAVRQAPLIIPLKATSTPVSIKQYPMSQEAKLGIKPHIQRLLDQGILVPCQSPWNTPLLPVKKPGTNDYRPVQGLREVNKRVEDIHPTVPNPYNLLSGLPTSHRWYTVLDLKDAFFCLRLHPTSQPLFASEWRDPGMGISGQLTWTRLPQGFKNSPTLFNEALHRGLADFRIQHPDLILLQYVDDLLLAATSELDCQQGTRALLKTLGNLGYRASAKKAQICQKQVKYLGYLLREGQRWLTEARKETVMGQPTPKTPRQLREFLGTAGFCRLWIPRFAEMAAPLYPLTKPGTLFNWGPDQQKAYHEIKQALLTAPALGLPDLTKPFELFVDEKQGYAKGVLTQKLGPWRRPVAYLSKKLDPVAAGWPPCLRMVAAIAVLTKDAGKLTMGQPLVILAPHAVEALVKQPPDRWLSNARMTHYQAMLLDTDRVQFGPVVALNPATLLPLPEEGAPHDCLEILAETHGTEPDLTDQPIPDADHTWYTDGSSFLQEGQRKAGAAVTTETEVIWARALPAGTSAQRAELIALTQALKMAEGKRLNVYTDSRYAFATAHIHGEIYKRRGWLTSEGREIKNKSEILALLKALFLPKRLSIIHCLGHQKGDSAEARGNRLADQAAREAAIKTPPDTSTLLAGKRTADGSEFEKRTADGSEFESPKKKAKVE

SEQ ID NO: 6507 - protein, 2006 aa, synthetic construct
MPAAKRVKLDGGDKKYSIGLDIGTNSVGWAVITDEYKVPSKKFKVLGNTDRHSIKKNLIGALLFDSGETAEATRLKRTARRRYTRRKNRICYLQEIFSNEMAKVDDSFFHRLEESFLVEEDKKHERHPIFGNIVDEVAYHEKYPTIYHLRKKLVDSTDKADLRLIYLALAHMIKFRGHFLIEGDLNPDNSDVDKLFIQLVQTYNQLFEENPINASGVDAKAILSARLSKSRRLENLIAQLPGEKKNGLFGNLIALSLGLTPNFKSNFDLAEDAKLQLSKDTYDDDLDNLLAQIGDQYADLFLAAKNLSDAILLSDILRVNTEITKAPLSASMIKRYDEHHQDLTLLKALVRQQLPEKYKEIFFDQSKNGYAGYIDGGASQEEFYKFIKPILEKMDGTEELLVKLNREDLLRKQRTFDNGSIPHQIHLGELHAILRRQEDFYPFLKDNREKIEKILTFRIPYYVGPLARGNSRFAWMTRKSEETITPWNFEEVVDKGASAQSFIERMTNFDKNLPNEKVLPKHSLLYEYFTVYNELTKVKYVTEGMRKPAFLSGEQKKAIVDLLFKTNRKVTVKQLKEDYFKKIECFDSVEISGVEDRFNASLGTYHDLLKIIKDKDFLDNEENEDILEDIVLTLTLFEDREMIEERLKTYAHLFDDKVMKQLKRRRYTGWGRLSRKLINGIRDKQSGKTILDFLKSDGFANRNFMQLIHDDSLTFKEDIQKAQVSGQGDSLHEHIANLAGSPAIKKGILQTVKVVDELVKVMGRHKPENIVIEMARENQTTQKGQKNSRERMKRIEEGIKELGSQILKEHPVENTQLQNEKLYLYYLQNGRDMYVDQELDINRLSDYDVDHIVPQSFLKDDSIDNKVLTRSDKARGKSDNVPSEEVVKKMKNYWRQLLNAKLITQRKFDNLTKAERGGLSELDKAGFIKRQLVETRQITKHVAQILDSRMNTKYDENDKLIREVKVITLKSKLVSDFRKDFQFYKVREINNYHHAHDAYLNAVVGTALIKKYPKLESEFVYGDYKVYDVRKMIAKSEQEIGKATAKYFFYSNIMNFFKTEITLANGEIRKRPLIETNGETGEIVWDKGRDFATVRKVLSMPQVNIVKKTEVQTGGFSKESILPKRNSDKLIARKKDWDPKKYGGFDSPTVAYSVLVVAKVEKGKSKKLKSVKELLGITIMERSSFEKNPIDFLEAKGYKEVKKDLIIKLPKYSLFELENGRKRMLASAGELQKGNELALPSKYVNFLYLASHYEKLKGSPEDNEQKQLFVEQHKHYLDEIIEQISEFSKRVILADANLDKVLSAYNKHRDKPIREQAENIIHLFTLTNLGAPAAFKYFDTTIDRKRYTSTKEVLDATLIHQSITGLYETRIDLSQLGGDGGPAPAPAPGGLTAAIDILAPQQCAEPITWKSDEPVWVDQWPLTNDKLAAAQQLVQEQLEAGHITESSSPWNTPIFVIKKKSGKWRLLQDLRAVNATMVLMGALQPGLPSPVAIPQGYLKIIIDLKDCFFSIPLHPSDQKRFAFSLPSTNFKEPMQRFQWKVLPQGMANSPTLCQKYVATAIHKVRHAWKQMYIIHYMDDILIAGKDGQQVLQCFDQLKQELTAAGLHIAPEKVQLQDPYTYLGFELNGPKITNQKAVIRKDKLQTLNDFQKLLGDINWLRPYLKLTTGDLKPLFDTLKGDSDPNSHRSLSKEALASLEKVETAIAEQFVTHINYSLPLIFLIFNTALTPTGLFWQDNPIMWIHLPASPKKVLLPYYDAIADLIILGRDHSKKYFGIEPSTIIQPYSKSQIDWLMQNTEMWPIACASFVGILDNHYPPNKLIQFCKLHTFVFPQIISKTPLNNALLVFTDGSSTGMAAYTLTDTTIKFQTNLNSAQLVELQALIAVLSAFPNQPLNIYTDSAYLAHSIPLLETVAQIKHISETAKLFLQCQQLIYNRSIPFYIGHVRAHSGLPGPIAQGNQRADLATKIVASNINTAGKRTADGSEFEKRTADGSEFESPKKKAKVE

SEQ ID NO: 6508 - protein, 2086 aa, synthetic construct
MPAAKRVKLDGGDKKYSIGLDIGTNSVGWAVITDEYKVPSKKFKVLGNTDRHSIKKNLIGALLFDSGETAEATRLKRTARRRYTRRKNRICYLQEIFSNEMAKVDDSFFHRLEESFLVEEDKKHERHPIFGNIVDEVAYHEKYPTIYHLRKKLVDSTDKADLRLIYLALAHMIKFRGHFLIEGDLNPDNSDVDKLFIQLVQTYNQLFEENPINASGVDAKAILSARLSKSRRLENLIAQLPGEKKNGLFGNLIALSLGLTPNFKSNFDLAEDAKLQLSKDTYDDDLDNLLAQIGDQYADLFLAAKNLSDAILLSDILRVNTEITKAPLSASMIKRYDEHHQDLTLLKALVRQQLPEKYKEIFFDQSKNGYAGYIDGGASQEEFYKFIKPILEKMDGTEELLVKLNREDLLRKQRTFDNGSIPHQIHLGELHAILRRQEDFYPFLKDNREKIEKILTFRIPYYVGPLARGNSRFAWMTRKSEETITPWNFEEVVDKGASAQSFIERMTNFDKNLPNEKVLPKHSLLYEYFTVYNELTKVKYVTEGMRKPAFLSGEQKKAIVDLLFKTNRKVTVKQLKEDYFKKIECFDSVEISGVEDRFNASLGTYHDLLKIIKDKDFLDNEENEDILEDIVLTLTLFEDREMIEERLKTYAHLFDDKVMKQLKRRRYTGWGRLSRKLINGIRDKQSGKTILDFLKSDGFANRNFMQLIHDDSLTFKEDIQKAQVSGQGDSLHEHIANLAGSPAIKKGILQTVKVVDELVKVMGRHKPENIVIEMARENQTTQKGQKNSRERMKRIEEGIKELGSQILKEHPVENTQLQNEKLYLYYLQNGRDMYVDQELDINRLSDYDVDHIVPQSFLKDDSIDNKVLTRSDKARGKSDNVPSEEVVKKMKNYWRQLLNAKLITQRKFDNLTKAERGGLSELDKAGFIKRQLVETRQITKHVAQILDSRMNTKYDENDKLIREVKVITLKSKLVSDFRKDFQFYKVREINNYHHAHDAYLNAVVGTALIKKYPKLESEFVYGDYKVYDVRKMIAKSEQEIGKATAKYFFYSNIMNFFKTEITLANGEIRKRPLIETNGETGEIVWDKGRDFATVRKVLSMPQVNIVKKTEVQTGGFSKESILPKRNSDKLIARKKDWDPKKYGGFDSPTVAYSVLVVAKVEKGKSKKLKSVKELLGITIMERSSFEKNPIDFLEAKGYKEVKKDLIIKLPKYSLFELENGRKRMLASAGELQKGNELALPSKYVNFLYLASHYEKLKGSPEDNEQKQLFVEQHKHYLDEIIEQISEFSKRVILADANLDKVLSAYNKHRDKPIREQAENIIHLFTLTNLGAPAAFKYFDTTIDRKRYTSTKEVLDATLIHQSITGLYETRIDLSQLGGDGGPAPAPAPGGTLQLDDEYRLYSPLVKPDQNIQFWLEQFPQAWAETAGMGLAKQVPPQVIQLKASATPVSVRQYPLSKEAQEGIRPHVQRLIQQGILVPVQSPWNTPLLPVRKPGTNDYRPVQDLREVNKRVQDIHPTVPNPYNLLCALPPQRSWYTVLDLKDAFFCLRLHPTSQPLFAFEWRDPGTGRTGQLTWTRLPQGFKNSPTIFNEALHRDLANFRIQHPQVTLLQYVDDLLLAGATKQDCLEGTKALLLELSDLGYRASAKKAQICRREVTYLGYSLRDGQRWLTEARKKTVVQIPAPTTAKQVREFLGTAGFCRLWIPGFATLAAPLYPLTKPKGEFSWAPEHQKAFDAIKKALLSAPALALPDVTKPFTLYVDERKGVARGVLTQTLGPWRRPVAYLSKKLDPVASGWPVCLKAIAAVAILVKDADKLTLGQNITVIAPHALENIVRQPPDRWMTNARMTHYQSLLLTERVTFAPPAALNPATLLPEETDEPVTHDCHQLLIEETGVRKDLTDIPLTGEVLTWFTDGSSYVVEGKRMAGAAVVDGTRTIWASSLPEGTSAQKAELMALTQALRLAEGKSINIYTDSRYAFATAHVHGAIYKQRGWLTSAGREIKNKEEILSLLEALHLPKRLAIIHCPGHQKAKDPISRGNQMADRVAKQAAQGVNLLAGKRTADGSEFEKRTADGSEFESPKKKAKVE

SEQ ID NO: 6509 - protein, 2086 aa, synthetic construct; identical to SEQ ID NO: 6508

SEQ ID NO: 6510 - protein, 2083 aa, synthetic construct
MPAAKRVKLDGGDKKYSIGLDIGTNSVGWAVITDEYKVPSKKFKVLGNTDRHSIKKNLIGALLFDSGETAEATRLKRTARRRYTRRKNRICYLQEIFSNEMAKVDDSFFHRLEESFLVEEDKKHERHPIFGNIVDEVAYHEKYPTIYHLRKKLVDSTDKADLRLIYLALAHMIKFRGHFLIEGDLNPDNSDVDKLFIQLVQTYNQLFEENPINASGVDAKAILSARLSKSRRLENLIAQLPGEKKNGLFGNLIALSLGLTPNFKSNFDLAEDAKLQLSKDTYDDDLDNLLAQIGDQYADLFLAAKNLSDAILLSDILRVNTEITKAPLSASMIKRYDEHHQDLTLLKALVRQQLPEKYKEIFFDQSKNGYAGYIDGGASQEEFYKFIKPILEKMDGTEELLVKLNREDLLRKQRTFDNGSIPHQIHLGELHAILRRQEDFYPFLKDNREKIEKILTFRIPYYVGPLARGNSRFAWMTRKSEETITPWNFEEVVDKGASAQSFIERMTNFDKNLPNEKVLPKHSLLYEYFTVYNELTKVKYVTEGMRKPAFLSGEQKKAIVDLLFKTNRKVTVKQLKEDYFKKIECFDSVEISGVEDRFNASLGTYHDLLKIIKDKDFLDNEENEDILEDIVLTLTLFEDREMIEERLKTYAHLFDDKVMKQLKRRRYTGWGRLSRKLINGIRDKQSGKTILDFLKSDGFANRNFMQLIHDDSLTFKEDIQKAQVSGQGDSLHEHIANLAGSPAIKKGILQTVKVVDELVKVMGRHKPENIVIEMARENQTTQKGQKNSRERMKRIEEGIKELGSQILKEHPVENTQLQNEKLYLYYLQNGRDMYVDQELDINRLSDYDVDHIVPQSFLKDDSIDNKVLTRSDKARGKSDNVPSEEVVKKMKNYWRQLLNAKLITQRKFDNLTKAERGGLSELDKAGFIKRQLVETRQITKHVAQILDSRMNTKYDENDKLIREVKVITLKSKLVSDFRKDFQFYKVREINNYHHAHDAYLNAVVGTALIKKYPKLESEFVYGDYKVYDVRKMIAKSEQEIGKATAKYFFYSNIMNFFKTEITLANGEIRKRPLIETNGETGEIVWDKGRDFATVRKVLSMPQVNIVKKTEVQTGGFSKESILPKRNSDKLIARKKDWDPKKYGGFDSPTVAYSVLVVAKVEKGKSKKLKSVKELLGITIMERSSFEKNPIDFLEAKGYKEVKKDLIIKLPKYSLFELENGRKRMLASAGELQKGNELALPSKYVNFLYLASHYEKLKGSPEDNEQKQLFVEQHKHYLDEIIEQISEFSKRVILADANLDKVLSAYNKHRDKPIREQAENIIHLFTLTNLGAPAAFKYFDTTIDRKRYTSTKEVLDATLIHQSITGLYETRIDLSQLGGDGGPAPAPAPGGVPWLMKKPLQLTVLVPLHEYQERLLQQTALPKEQKELLQKLFLKYDALWQHWENQVGHRRIKPHNIATGTLAPRPQKQYPINPKAKPSIQIVIDDLLKQGVLIQQNSTMNTPVYPVPKPDGKWRMVLDYREVNKTIPLIAAQNQHSAGILSSIYRGKYKTTLDLTNGFWAHPITPESYWLTAFTWQGKQYCWTRLPQGFLNSPALFNADVVDLLKEIPNVQAYVDDIYISHDDPQEHLEQLEKIFSILLNAGYVVSLKKSEIAQREVEFLGFNITKEGRGLTDTFKQKLLNITPPKDLKQLQSILGLLNFARNFIPNYSELVKPLYTIVAPANGKFISWTEDNSNQLQHIISVLNQADNLEERNPETRLIIKVNSSPSAGYIRYYNEGSKRPIMYVNYIFSKAEAKFTQTEKLLTTMHKGLIKAMDLAMGQEILVYSPIVSMTKIQRTPLPERKALPVRWITWMTYLEDPRIQFHYDKSLPELQQIPNVTEDVIAKTKHPSEFAMVFYTDGSAIKHPDVNKSHSAGMGIAQVQFIPEYKIVHQWSIPLGDHTAQLAEIAAVEFACKKALKISGPVLIVTDSFYVAESANKELPYWKSNGFLNNKKKPLRHVSKWKSIAECLQLKPDIIIMHEKGHQQPMTTLHTEGNNLADKLATQGSYVVHAGKRTADGSEFEKRTADGSEFESPKKKAKVE

SEQ ID NO: 6511 - protein, 2172 aa, synthetic construct
MPAAKRVKLDGGDKKYSIGLDIGTNSVGWAVITDEYKVPSKKFKVLGNTDRHSIKKNLIGALLFDSGETAEATRLKRTARRRYTRRKNRICYLQEIFSNEMAKVDDSFFHRLEESFLVEEDKKHERHPIFGNIVDEVAYHEKYPTIYHLRKKLVDSTDKADLRLIYLALAHMIKFRGHFLIEGDLNPDNSDVDKLFIQLVQTYNQLFEENPINASGVDAKAILSARLSKSRRLENLIAQLPGEKKNGLFGNLIALSLGLTPNFKSNFDLAEDAKLQLSKDTYDDDLDNLLAQIGDQYADLFLAAKNLSDAILLSDILRVNTEITKAPLSASMIKRYDEHHQDLTLLKALVRQQLPEKYKEIFFDQSKNGYAGYIDGGASQEEFYKFIKPILEKMDGTEELLVKLNREDLLRKQRTFDNGSIPHQIHLGELHAILRRQEDFYPFLKDNREKIEKILTFRIPYYVGPLARGNSRFAWMTRKSEETITPWNFEEVVDKGASAQSFIERMTNFDKNLPNEKVLPKHSLLYEYFTVYNELTKVKYVTEGMRKPAFLSGEQKKAIVDLLFKTNRKVTVKQLKEDYFKKIECFDSVEISGVEDRFNASLGTYHDLLKIIKDKDFLDNEENEDILEDIVLTLTLFEDREMIEERLKTYAHLFDDKVMKQLKRRRYTGWGRLSRKLINGIRDKQSGKTILDFLKSDGFANRNFMQLIHDDSLTFKEDIQKAQVSGQGDSLHEHIANLAGSPAIKKGILQTVKVVDELVKVMGRHKPENIVIEMARENQTTQKGQKNSRERMKRIEEGIKELGSQILKEHPVENTQLQNEKLYLYYLQNGRDMYVDQELDINRLSDYDVDHIVPQSFLKDDSIDNKVLTRSDKARGKSDNVPSEEVVKKMKNYWRQLLNAKLITQRKFDNLTKAERGGLSELDKAGFIKRQLVETRQITKHVAQILDSRMNTKYDENDKLIREVKVITLKSKLVSDFRKDFQFYKVREINNYHHAHDAYLNAVVGTALIKKYPKLESEFVYGDYKVYDVRKMIAKSEQEIGKATAKYFFYSNIMNFFKTEITLANGEIRKRPLIETNGETGEIVWDKGRDFATVRKVLSMPQVNIVKKTEVQTGGFSKESILPKRNSDKLIARKKDWDPKKYGGFDSPTVAYSVLVVAKVEKGKSKKLKSVKELLGITIMERSSFEKNPIDFLEAKGYKEVKKDLIIKLPKYSLFELENGRKRMLASAGELQKGNELALPSKYVNFLYLASHYEKLKGSPEDNEQKQLFVEQHKHYLDEIIEQISEFSKRVILADANLDKVLSAYNKHRDKPIREQAENIIHLFTLTNLGAPAAFKYFDTTIDRKRYTSTKEVLDATLIHQSITGLYETRIDLSQLGGDGGPAPAPAPGGMDPLQLLQPLEAEIKGTKLKAHWNSGATITCVPQAFLEEEVPIKNIWIKTIHGEKEQPVYYLTFKIQGRKVEAEVISSPYDYILVSPSDIPWLMKKPLQLTTLVPLQEYEERLLKQTMLTGSYKEKLQSLFLKYDALWQHWENQVGHRRIKPHHIATGTVNPRPQKQYPINPKAKASIQTVINDLLKQGVLIQQNSIMNTPVYPVPKPDGKWRMVLDYREVNKTIPLIAAQNQHSAGILSSIFRGKYKTTLDLSNGFWAHSITPESYWLTAFTWLGQQYCWTRLPQGFLNSPALFNADVVDLLKEVPNVQVYVDDIYISHDDPREHLEQLEKVFSLLLNAGYVVSLKKSEIAQHEVEFLGFNITKEGRGLTETFKQKLLNITPPRDLKQLQSILGKLNFARNFIPNFSELVKPLYNIIATAPGKYITWTTDNSQQLQNIISMLNSAENLEERNPEVRLIMKVNTSPSAGYIRFYNEFAKRPIMYLNYVYTKAEVKFTNTEKLLTTIHKGLIKALDLGMGQEILVYSPIVSMTKIQKTPLPERKALPIRWITWMSYLEDPRIQFHYDKTLPELQQVPTVTDDIIAKIKHPSEFSMVFYTDGSAIKHPNVNKSHNAGMGIAQVQFKPEFTVINTWSIPLGDHTAQLAEVAAVEFACKKALKIDGPVLIVTDSFYVAESVNKELPYWQSNGFFNNKKKPLKHVSKWKSIADCIQLKPDIIIIHEKGHQPTASTFHTEGNNLADKLATQGSYVVNAGKRTADGSEFEKRTADGSEFESPKKKAKVE

SEQ ID NO: 6512 - protein, 2092 aa, synthetic construct
MPAAKRVKLDGGDKKYSIGLDIGTNSVGWAVITDEYKVPSKKFKVLGNTDRHSIKKNLIGALLFDSGETAEATRLKRTARRRYTRRKNRICYLQEIFSNEMAKVDDSFFHRLEESFLVEEDKKHERHPIFGNIVDEVAYHEKYPTIYHLRKKLVDSTDKADLRLIYLALAHMIKFRGHFLIEGDLNPDNSDVDKLFIQLVQTYNQLFEENPINASGVDAKAILSARLSKSRRLENLIAQLPGEKKNGLFGNLIALSLGLTPNFKSNFDLAEDAKLQLSKDTYDDDLDNLLAQIGDQYADLFLAAKNLSDAILLSDILRVNTEITKAPLSASMIKRYDEHHQDLTLLKALVRQQLPEKYKEIFFDQSKNGYAGYIDGGASQEEFYKFIKPILEKMDGTEELLVKLNREDLLRKQRTFDNGSIPHQIHLGELHAILRRQEDFYPFLKDNREKIEKILTFRIPYYVGPLARGNSRFAWMTRKSEETITPWNFEEVVDKGASAQSFIERMTNFDKNLPNEKVLPKHSLLYEYFTVYNELTKVKYVTEGMRKPAFLSGEQKKAIVDLLFKTNRKVTVKQLKEDYFKKIECFDSVEISGVEDRFNASLGTYHDLLKIIKDKDFLDNEENEDILEDIVLTLTLFEDREMIEERLKTYAHLFDDKVMKQLKRRRYTGWGRLSRKLINGIRDKQSGKTILDFLKSDGFANRNFMQLIHDDSLTFKEDIQKAQVSGQGDSLHEHIANLAGSPAIKKGILQTVKVVDELVKVMGRHKPENIVIEMARENQTTQKGQKNSRERMKRIEEGIKELGSQILKEHPVENTQLQNEKLYLYYLQNGRDMYVDQELDINRLSDYDVDHIVPQSFLKDDSIDNKVLTRSDKARGKSDNVPSEEVVKKMKNYWRQLLNAKLITQRKFDNLTKAERGGLSELDKAGFIKRQLVETRQITKHVAQILDSRMNTKYDENDKLIREVKVITLKSKLVSDFRKDFQFYKVREINNYHHAHDAYLNAVVGTALIKKYPKLESEFVYGDYKVYDVRKMIAKSEQEIGKATAKYFFYSNIMNFFKTEITLANGEIRKRPLIETNGETGEIVWDKGRDFATVRKVLSMPQVNIVKKTEVQTGGFSKESILPKRNSDKLIARKKDWDPKKYGGFDSPTVAYSVLVVAKVEKGKSKKLKSVKELLGITIMERSSFEKNPIDFLEAKGYKEVKKDLIIKLPKYSLFELENGRKRMLASAGELQKGNELALPSKYVNFLYLASHYEKLKGSPEDNEQKQLFVEQHKHYLDEIIEQISEFSKRVILADANLDKVLSAYNKHRDKPIREQAENIIHLFTLTNLGAPAAFKYFDTTIDRKRYTSTKEVLDATLIHQSITGLYETRIDLSQLGGDGGPAPAPAPGGTLNIEDEYRLHETSKEPDVPLGSTWLSDFPQAWAETGGMGLAVRQAPLIIPLKATSTPVSIKQYPMSQEARLGIKPHIQRLLDQGILVPCQSPWNTPLLPVKKPGTNDYRPVQDLREVNKRVEDIHPTVPNPYNLLSGLPPSHQWYTVLDLKDAFFCLRLHPTSQPLFAFEWRDPEMGISGQLTWTRLPQGFKNSPTLFNEALHRDLADFRIQHPDLILLQYVDDLLLAATSEQDCQRGTRALLQTLGNLGYRASAKKAQICQKQVKYLGYLLKEGQRWLTEARKETVMGQPTPKTPRQLREFLGKAGFCRLFIPGFAEMAAPLYPLTKPGTLFNWGPDQQKAYQEIKQALLTAPALGLPDLTKPFELFVDEKQGYAKGVLTQKLGPWRRPVAYLSKKLDPVAAGWPPCLRMVAAIAVLTKDAGKLTMGQPLVILAPHAVEALVKQPPDRWLSNARMTHYQAMLLDTDRVQFGPVVALNPATLLPLPEKEAPHDCLEILAETHGTRPDLTDQPIPDADYTWYTDGSSFLQEGQRRAGAAVTTETEVIWARALPAGTSAQRAELIALTQALKMAEGKKLNVYTDSRYAFATAHVHGEIYRRRGWLTSEGREIKNKNEILALLKALFLPKRLSIIHCPGHQKGNSAEARGNRMADQAAREAAMKAVLETSTLLAGKRTADGSEFEKRTADGSEFESPKKKAKVE

SEQ ID NO: 6513 - protein, 2096 aa, synthetic construct
MPAAKRVKLDGGDKKYSIGLDIGTNSVGWAVITDEYKVPSKKFKVLGNTDRHSIKKNLIGALLFDSGETAEATRLKRTARRRYTRRKNRICYLQEIFSNEMAKVDDSFFHRLEESFLVEEDKKHERHPIFGNIVDEVAYHEKYPTIYHLRKKLVDSTDKADLRLIYLALAHMIKFRGHFLIEGDLNPDNSDVDKLFIQLVQTYNQLFEENPINASGVDAKAILSARLSKSRRLENLIAQLPGEKKNGLFGNLIALSLGLTPNFKSNFDLAEDAKLQLSKDTYDDDLDNLLAQIGDQYADLFLAAKNLSDAILLSDILRVNTEITKAPLSASMIKRYDEHHQDLTLLKALVRQQLPEKYKEIFFDQSKNGYAGYIDGGASQEEFYKFIKPILEKMDGTEELLVKLNREDLLRKQRTFDNGSIPHQIHLGELHAILRRQEDFYPFLKDNREKIEKILTFRIPYYVGPLARGNSRFAWMTRKSEETITPWNFEEVVDKGASAQSFIERMTNFDKNLPNEKVLPKHSLLYEYFTVYNELTKVKYVTEGMRKPAFLSGEQKKAIVDLLFKTNRKVTVKQLKEDYFKKIECFDSVEISGVEDRFNASLGTYHDLLKIIKDKDFLDNEENEDILEDIVLTLTLFEDREMIEERLKTYAHLFDDKVMKQLKRRRYTGWGRLSRKLINGIRDKQSGKTILDFLKSDGFANRNFMQLIHDDSLTFKEDIQKAQVSGQGDSLHEHIANLAGSPAIKKGILQTVKVVDELVKVMGRHKPENIVIEMARENQTTQKGQKNSRERMKRIEEGIKELGSQILKEHPVENTQLQNEKLYLYYLQNGRDMYVDQELDINRLSDYDVDHIVPQSFLKDDSIDNKVLTRSDKARGKSDNVPSEEVVKKMKNYWRQLLNAKLITQRKFDNLTKAERGGLSELDKAGFIKRQLVETRQITKHVAQILDSRMNTKYDENDKLIREVKVITLKSKLVSDFRKDFQFYKVREINNYHHAHDAYLNAVVGTALIKKYPKLESEFVYGDYKVYDVRKMIAKSEQEIGKATAKYFFYSNIMNFFKTEITLANGEIRKRPLIETNGETGEIVWDKGRDFATVRKVLSMPQVNIVKKTEVQTGGFSKESILPKRNSDKLIARKKDWDPKKYGGFDSPTVAYSVLVVAKVEKGKSKKLKSVKELLGITIMERSSFEKNPIDFLEAKGYKEVKKDLIIKLPKYSLFELENGRKRMLASAGELQKGNELALPSKYVNFLYLASHYEKLKGSPEDNEQKQLFVEQHKHYLDEIIEQISEFSKRVILADANLDKVLSAYNKHRDKPIREQAENIIHLFTLTNLGAPAAFKYFDTTIDRKRYTSTKEVLDATLIHQSITGLYETRIDLSQLGGDGGPAPAPAPAPGGTAPLEEEYRLFLEAPIQNVTLLEQWKREIPKVWAEINPPGLASTQAPIHVQLLSTALPVRVRQYPITLEAKRSLRETIRKFRAAGILRPVHSPWNTPLLPVRKSGTSEYRMVQDLREVNKRVETIHPTVPNPYTLLSLLPPDRIWYSVLDLKDAFFCIPLAPESQLIFAFEWADAEEGESGQLTWTRLPQGFKNSPTLFDEALNRDLQGFRLDHPSVSLLQYVDDLLIAADTQAACLSATRDLLMTLAELGYRVSGKKAQLCQEEVTYLGFKIHKGSRSLSNSRTQAILQIPVPKTKRQVREFLGTIGYCRLWIPGFAELAQPLYAATRGGNDPLVWGEKEEEAFQSLKLALTQPPALALPSLDKPFQLFVEETSGAAKGVLTQALGPWKRPVAYLSKRLDPVAAGWPRCLRAIAAAALLTREASKLTFGQDIEITSSHNLESLLRSPPDKWLTNARITQYQVLLLDPPRVRFKQTAALNPATLLPETDDTLPIHHCLDTLDSLTSTRPDLTDQPLAQAEATLFTDGSSYIRDGKRYAGAAVVTLDSVIWAEPLPIGTSAQKAELIALTKALEWSKDKSVNIYTDSRYAFATLHVHGMIYRERGLLTAGGKAIKNAPEILALLTAVWLPKRVAVMHCKGHQKDDAPTSTGNRRADEVAREVAIRPLSTQATISAGKRTADGSEFEKRTADGSEFESPKKKAKVE

SEQ ID NO: 6514 - protein, 2096 aa, synthetic construct
MPAAKRVKLDGGDKKYSIGLDIGTNSVGWAVITDEYKVPSKKFKVLGNTDRHSIKKNLIGALLFDSGETAEATRLKRTARRRYTRRKNRICYLQEIFSNEMAKVDDSFFHRLEESFLVEEDKKHERHPIFGNIVDEVAYHEKYPTIYHLRKKLVDSTDKADLRLIYLALAHMIKFRGHFLIEGDLNPDNSDVDKLFIQLVQTYNQLFEENPINASGVDAKAILSARLSKSRRLENLIAQLPGEKKNGLFGNLIALSLGLTPNFKSNFDLAEDAKLQLSKDTYDDDLDNLLAQIGDQYADLFLAAKNLSDAILLSDILRVNTEITKAPLSASMIKRYDEHHQDLTLLKALVRQQLPEKYKEIFFDQSKNGYAGYIDGGASQEEFYKFIKPILEKMDGTEELLVKLNREDLLRKQRTFDNGSIPHQIHLGELHAILRRQEDFYPFLKDNREKIEKILTFRIPYYVGPLARGNSRFAWMTRKSEETITPWNFEEVVDKGASAQSFIERMTNFDKNLPNEKVLPKHSLLYEYFTVYNELTKVKYVTEGMRKPAFLSGEQKKAIVDLLFKTNRKVTVKQLKEDYFKKIECFDSVEISGVEDRFNASLGTYHDLLKIIKDKDFLDNEENEDILEDIVLTLTLFEDREMIEERLKTYAHLFDDKVMKQLKRRRYTGWGRLSRKLINGIRDKQSGKTILDFLKSDGFANRNFMQLIHDDSLTFKEDIQKAQVSGQGDSLHEHIANLAGSPAIKKGILQTVKVVDELVKVMGRHKPENIVIEMARENQTTQKGQKNSRERMKRIEEGIKELGSQILKEHPVENTQLQNEKLYLYYLQNGRDMYVDQELDINRLSDYDVDHIVPQSFLKDDSIDNKVLTRSDKARGKSDNVPSEEVVKKMKNYWRQLLNAKLITQRKFDNLTKAERGGLSELDKAGFIKRQLVETRQITKHVAQILDSRMNTKYDENDKLIREVKVITLKSKLVSDFRKDFQFYKVREINNYHHAHDAYLNAVVGTALIKKYPKLESEFVYGDYKVYDVRKMIAKSEQEIGKATAKYFFYSNIMNFFKTEITLANGEIRKRPLIETNGETGEIVWDKGRDFATVRKVLSMPQVNIVKKTEVQTGGFSKESILPKRNSDKLIARKKDWDPKKYGGFDSPTVAYSVLVVAKVEKGKSKKLKSVKELLGITIMERSSFEKNPIDFLEAKGYKEVKKDLIIKLPKYSLFELENGRKRMLASAGELQKGNELALPSKYVNFLYLASHYEKLKGSPEDNEQKQLFVEQHKHYLDEIIEQISEFSKRVILADANLDKVLSAYNKHRDKPIREQAENIIHLFTLTNLGAPAAFKYFDTTIDRKRYTSTKEVLDATLIHQSITGLYETRIDLSQLGGDGGPAPAPAPAPGGTAPLEEEYRLFLEAPIQNVTLLEQWKREIPKVWAEINPPGLASTQAPIHVQLLSTALPVRVRQYPITLEAKRSLRETIRKFRAAGILRPVHSPWNTPLLPVRKSGTSEYRMVQDLREVNKRVETIHPTVPNPYTLLSLLPPDRIWYSVLDLKDAFFCIPLAPESQLIFAFEWADAEEGESGQLTWTRLPQGFKNSPTLFNEALNRDLQGFRLDHPSVSLLQYVDDLLIAADTQAACLSATRDLLMTLAELGYRVSGKKAQLCQEEVTYLGFKIHKGSRSLSNSRTQAILQIPVPKTKRQVREFLGTIGYCRLWIPGFAELAQPLYAATRPGNDPLVWGEKEEEAFQSLKLALTQPPALALPSLDKPFQLFVEETSGAAKGVLTQALGPWKRPVAYLSKRLDPVAAGWPRCLRAIAAAALLTREASKLTFGQDIEITSSHNLESLLRSPPDKWLTNARITQYQVLLLDPPRVRFKQTAALNPATLLPETDDTLPIHHCLDTLDSLTSTRPDLTDQPLAQAEATLFTDGSSYIRDGKRYAGAAVVTLDSVIWAEPLPIGTSAQKAELIALTKALEWSKDKSVNIYTDSRYAFATLHVHGMIYRERGWLTAGGKAIKNAPEILALLTAVWLPKRVAVMHCKGHQKDDAPTSTGNRRADEVAREVAIRPLSTQATISAGKRTADGSEFEKRTADGSEFESPKKKAKVE

SEQ ID NO: 6515 - protein, 2100 aa, synthetic construct
MPAAKRVKLDGGDKKYSIGLDIGTNSVGWAVITDEYKVPSKKFKVLGNTDRHSIKKNLIGALLFDSGETAEATRLKRTARRRYTRRKNRICYLQEIFSNEMAKVDDSFFHRLEESFLVEEDKKHERHPIFGNIVDEVAYHEKYPTIYHLRKKLVDSTDKADLRLIYLALAHMIKFRGHFLIEGDLNPDNSDVDKLFIQLVQTYNQLFEENPINASGVDAKAILSARLSKSRRLENLIAQLPGEKKNGLFGNLIALSLGLTPNFKSNFDLAEDAKLQLSKDTYDDDLDNLLAQIGDQYADLFLAAKNLSDAILLSDILRVNTEITKAPLSASMIKRYDEHHQDLTLLKALVRQQLPEKYKEIFFDQSKNGYAGYIDGGASQEEFYKFIKPILEKMDGTEELLVKLNREDLLRKQRTFDNGSIPHQIHLGELHAILRRQEDFYPFLKDNREKIEKILTFRIPYYVGPLARGNSRFAWMTRKSEETITPWNFEEVVDKGASAQSFIERMTNFDKNLPNEKVLPKHSLLYEYFTVYNELTKVKYVTEGMRKPAFLSGEQKKAIVDLLFKTNRKVTVKQLKEDYFKKIECFDSVEISGVEDRFNASLGTYHDLLKIIKDKDFLDNEENEDILEDIVLTLTLFEDREMIEERLKTYAHLFDDKVMKQLKRRRYTGWGRLSRKLINGIRDKQSGKTILDFLKSDGFANRNFMQLIHDDSLTFKEDIQKAQVSGQGDSLHEHIANLAGSPAIKKGILQTVKVVDELVKVMGRHKPENIVIEMARENQTTQKGQKNSRERMKRIEEGIKELGSQILKEHPVENTQLQNEKLYLYYLQNGRDMYVDQELDINRLSDYDVDHIVPQSFLKDDSIDNKVLTRSDKARGKSDNVPSEEVVKKMKNYWRQLLNAKLITQRKFDNLTKAERGGLSELDKAGFIKRQLVETRQITKHVAQILDSRMNTKYDENDKLIREVKVITLKSKLVSDFRKDFQFYKVREINNYHHAHDAYLNAVVGTALIKKYPKLESEFVYGDYKVYDVRKMIAKSEQEIGKATAKYFFYSNIMNFFKTEITLANGEIRKRPLIETNGETGEIVWDKGRDFATVRKVLSMPQVNIVKKTEVQTGGFSKESILPKRNSDKLIARKKDWDPKKYGGFDSPTVAYSVLVVAKVEKGKSKKLKSVKELLGITIMERSSFEKNPIDFLEAKGYKEVKKDLIIKLPKYSLFELENGRKRMLASAGELQKGNELALPSKYVNFLYLASHYEKLKGSPEDNEQKQLFVEQHKHYLDEIIEQISEFSKRVILADANLDKVLSAYNKHRDKPIREQAENIIHLFTLTNLGAPAAFKYFDTTIDRKRYTSTKEVLDATLIHQSITGLYETRIDLSQLGGDGGPAPAPAPAPGGTVSLQDEHRLFDIPVTTSLPDVWLQDFPQAWAETGGLGRAKCQAPIIIDLKPTAVPVSIKQYPMSLEAHMGIRQHIIKFLELGVLRPCRSPWNTPLLPVKKPGTQDYRPVQDLREINKRTVDIHPTVPNPYNLLSTLKPDYSWYTVLDLKDAFFCLPLAPQSQELFAFEWKDPERGISGQLTWTRLPQGFKNSPTLFNEALHRDLTDFRTQHPEVTLLQYVDDLLLAAPTKKACTQGTRHLLQELGEKGYRASAKKAQICQTKVTYLGYILSEGKRWLTPGRIETVARIPPPRNPREVREFLGTAGFCRLWIPGFAELAAPLYALTKPSTPFTWQTEHQLAFEALKKALLSAPALGLPDTSKPFTLFLDERQGIAKGVLTQKLGPWKRPVAYLSKKLDPVAAGWPPCLRIMAATAMLVKDSAKLTLGQPLTVITPHTLEAIVRQPPDRWITNARLTHYQALLLDTDRVQFGPPVTLNPATLLPVPENQPSPHDCRQVLAETHGTREDLKDQELPDADHTWYTDGSSYLDSGTRRAGAAVVDGHNTIWAQSLPPGTSAQKAELIALTKALELSKGKKANIYTDSRYAFATAHTHGSIYERRGWLTSEGKEIKNKAEIIALLKALFLPQEVAIIHCPGHQKGQDPVAVGNRQADRVARQAAMAEVLTLATEPDNTSHITAGKRTADGSEFEKRTADGSEFESPKKKAKVE

SEQ ID NO: 6516 - protein, 2085 aa, synthetic construct
MPAAKRVKLDGGDKKYSIGLDIGTNSVGWAVITDEYKVPSKKFKVLGNTDRHSIKKNLIGALLFDSGETAEATRLKRTARRRYTRRKNRICYLQEIFSNEMAKVDDSFFHRLEESFLVEEDKKHERHPIFGNIVDEVAYHEKYPTIYHLRKKLVDSTDKADLRLIYLALAHMIKFRGHFLIEGDLNPDNSDVDKLFIQLVQTYNQLFEENPINASGVDAKAILSARLSKSRRLENLIAQLPGEKKNGLFGNLIALSLGLTPNFKSNFDLAEDAKLQLSKDTYDDDLDNLLAQIGDQYADLFLAAKNLSDAILLSDILRVNTEITKAPLSASMIKRYDEHHQDLTLLKALVRQQLPEKYKEIFFDQSKNGYAGYIDGGASQEEFYKFIKPILEKMDGTEELLVKLNREDLLRKQRTFDNGSIPHQIHLGELHAILRRQEDFYPFLKDNREKIEKILTFRIPYYVGPLARGNSRFAWMTRKSEETITPWNFEEVVDKGASAQSFIERMTNFDKNLPNEKVLPKHSLLYEYFTVYNELTKVKYVTEGMRKPAFLSGEQKKAIVDLLFKTNRKVTVKQLKEDYFKKIECFDSVEISGVEDRFNASLGTYHDLLKIIKDKDFLDNEENEDILEDIVLTLTLFEDREMIEERLKTYAHLFDDKVMKQLKRRRYTGWGRLSRKLINGIRDKQSGKTILDFLKSDGFANRNFMQLIHDDSLTFKEDIQKAQVSGQGDSLHEHIANLAGSPAIKKGILQTVKVVDELVKVMGRHKPENIVIEMARENQTTQKGQKNSRERMKRIEEGIKELGSQILKEHPVENTQLQNEKLYLYYLQNGRDMYVDQELDINRLSDYDVDHIVPQSFLKDDSIDNKVLTRSDKARGKSDNVPSEEVVKKMKNYWRQLLNAKLITQRKFDNLTKAERGGLSELDKAGFIKRQLVETRQITKHVAQILDSRMNTKYDENDKLIREVKVITLKSKLVSDFRKDFQFYKVREINNYHHAHDAYLNAVVGTALIKKYPKLESEFVYGDYKVYDVRKMIAKSEQEIGKATAKYFFYSNIMNFFKTEITLANGEIRKRPLIETNGETGEIVWDKGRDFATVRKVLSMPQVNIVKKTEVQTGGFSKESILPKRNSDKLIARKKDWDPKKYGGFDSPTVAYSVLVVAKVEKGKSKKLKSVKELLGITIMERSSFEKNPIDFLEAKGYKEVKKDLIIKLPKYSLFELENGRKRMLASAGELQKGNELALPSKYVNFLYLASHYEKLKGSPEDNEQKQLFVEQHKHYLDEIIEQISEFSKRVILADANLDKVLSAYNKHRDKPIREQAENIIHLFTLTNLGAPAAFKYFDTTIDRKRYTSTKEVLDATLIHQSITGLYETRIDLSQLGGDGGPAPAPAPAPGGVPWILKKPLELTIKLDLEEQQGTLLNNSILSKKGKEELKQLFEKYSALWQSWENQVGHRRIRPHKIATGTVKPTPQKQYHINPKAKPDIQIVINDLLKQGVLIQKESTMNTPVYPVPKPNGRWRMVLDYRAVNKVTPLIAVQNQHSYGILGSLFKGRYKTTIDLSNGFWAHPIVPEDYWITAFTWQGKQYCWTVLPQGFLNSPGLFNGDVVDLLQGIPNVEVYVDDVYISHDSEKEHLEYLDILFNRLKEAGYIISLKKSNIANSIVDFLGFQITNEGRGLTDTFKEKLENITAPTTLKQLQSILGKLNFARNFIPDFTELIAPLYALIPKSPKNYVPWQIEHSTTLETLITKLNGAEYLQGRKGDKTLIMKVNASYTTGYIRYYNEGEKKPISYVSIVFSKTELKFTELEKLLTTVHKGLLKALDLSMGQNIHVYSPIVSMQNIQKTPQTAKKALASRWLSWLSYLEDPRIRFFYDPQMPALKDLPAVDTGKDNKKHPSNFQHIFYTDGSAITSPTKEGHLNAGMGIVYFINKDGNLQKQQEWSISLGNHTAQFAEIAAFEFALKKCLPLGGNILVVTDSNYVAKAYNEELDVWASNGFVNNRKKPLKHISKWKSVADLKRLRPDVVVTHEPGHQKLDSSPHAYGNNLADQLATQASFKVHAGKRTADGSEFEKRTADGSEFESPKKKAKVE

SEQ ID NO: 6517 - protein, 2093 aa, synthetic construct
MPAAKRVKLDGGDKKYSIGLDIGTNSVGWAVITDEYKVPSKKFKVLGNTDRHSIKKNLIGALLFDSGETAEATRLKRTARRRYTRRKNRICYLQEIFSNEMAKVDDSFFHRLEESFLVEEDKKHERHPIFGNIVDEVAYHEKYPTIYHLRKKLVDSTDKADLRLIYLALAHMIKFRGHFLIEGDLNPDNSDVDKLFIQLVQTYNQLFEENPINASGVDAKAILSARLSKSRRLENLIAQLPGEKKNGLFGNLIALSLGLTPNFKSNFDLAEDAKLQLSKDTYDDDLDNLLAQIGDQYADLFLAAKNLSDAILLSDILRVNTEITKAPLSASMIKRYDEHHQDLTLLKALVRQQLPEKYKEIFFDQSKNGYAGYIDGGASQEEFYKFIKPILEKMDGTEELLVKLNREDLLRKQRTFDNGSIPHQIHLGELHAILRRQEDFYPFLKDNREKIEKILTFRIPYYVGPLARGNSRFAWMTRKSEETITPWNFEEVVDKGASAQSFIERMTNFDKNLPNEKVLPKHSLLYEYFTVYNELTKVKYVTEGMRKPAFLSGEQKKAIVDLLFKTNRKVTVKQLKEDYFKKIECFDSVEISGVEDRFNASLGTYHDLLKIIKDKDFLDNEENEDILEDIVLTLTLFEDREMIEERLKTYAHLFDDKVMKQLKRRRYTGWGRLSRKLINGIRDKQSGKTILDFLKSDGFANRNFMQLIHDDSLTFKEDIQKAQVSGQGDSLHEHIANLAGSPAIKKGILQTVKVVDELVKVMGRHKPENIVIEMARENQTTQKGQKNSRERMKRIEEGIKELGSQILKEHPVENTQLQNEKLYLYYLQNGRDMYVDQELDINRLSDYDVDHIVPQSFLKDDSIDNKVLTRSDKARGKSDNVPSEEVVKKMKNYWRQLLNAKLITQRKFDNLTKAERGGLSELDKAGFIKRQLVETRQITKHVAQILDSRMNTKYDENDKLIREVKVITLKSKLVSDFRKDFQFYKVREINNYHHAHDAYLNAVVGTALIKKYPKLESEFVYGDYKVYDVRKMIAKSEQEIGKATAKYFFYSNIMNFFKTEITLANGEIRKRPLIETNGETGEIVWDKGRDFATVRKVLSMPQVNIVKKTEVQTGGFSKESILPKRNSDKLIARKKDWDPKKYGGFDSPTVAYSVLVVAKVEKGKSKKLKSVKELLGITIMERSSFEKNPIDFLEAKGYKEVKKDLIIKLPKYSLFELENGRKRMLASAGELQKGNELALPSKYVNFLYLASHYEKLKGSPEDNEQKQLFVEQHKHYLDEIIEQISEFSKRVILADANLDKVLSAYNKHRDKPIREQAENIIHLFTLTNLGAPAAFKYFDTTIDRKRYTSTKEVLDATLIHQSITGLYETRIDLSQLGGDGGPAPAPAPAPGGTLQLEEEYRLFEPESTQKQEMDIWLKNFPQAWAETGGMGTAHCQAPVLIQLKATATPISIRQYPMPHEAYQGIKPHIRRMLDQGILKPCQSPWNTPLLPVKKPGTEDYRPVQDLREVNKRVEDIHPTVPNPYNLLSTLPPSHPWYTVLDLKDAFFCLRLHSESQLLFAFEWRDPEIGLSGQLTWTRLPQGFKNSPTLFNEALHSDLADFRVRYPALVLLQYVDDLLLAAATRTECLEGTKALLETLGNKGYRASAKKAQICLQEVTYLGYSLKDGQRWLTKARKEAILSIPVPKNSRQVREFLGTAGYCRLWIPGFAELAAPLYPLTRPGTLFQWGTEQQLAFEDIKKALLSSPALGLPDITKPFELFIDENSGFAKGVLVQKLGPWKRPVAYLSKKLDTVASGWPPCLRMVAAIAILVKDAGKLTLGQPLTILTSHPVEALVRQPPNKWLSNARMTHYQAMLLDAERVHFGPTVSLNPATLLPLPSGGNHHDCLQILAETHGTRPDLTDQPLPDADLTWYTDGSSFIRNGEREAGAAVTTESEVIWAAPLPPGTSAQRAELIALTQALKMAEGKKLTVYTDSRYAFATTHVHGEIYRRRGWLTSEGKEIKNKNEILALLEALFLPKRLSIIHCPGHQKGDSPQAKGNRLADDTAKKAATETHSSLTVLPAGKRTADGSEFEKRTADGSEFESPKKKAKVE

SEQ ID NO: 6518 - protein, 2085 aa, synthetic construct
MPAAKRVKLDGGDKKYSIGLDIGTNSVGWAVITDEYKVPSKKFKVLGNTDRHSIKKNLIGALLFDSGETAEATRLKRTARRRYTRRKNRICYLQEIFSNEMAKVDDSFFHRLEESFLVEEDKKHERHPIFGNIVDEVAYHEKYPTIYHLRKKLVDSTDKADLRLIYLALAHMIKFRGHFLIEGDLNPDNSDVDKLFIQLVQTYNQLFEENPINASGVDAKAILSARLSKSRRLENLIAQLPGEKKNGLFGNLIALSLGLTPNFKSNFDLAEDAKLQLSKDTYDDDLDNLLAQIGDQYADLFLAAKNLSDAILLSDILRVNTEITKAPLSASMIKRYDEHHQDLTLLKALVRQQLPEKYKEIFFDQSKNGYAGYIDGGASQEEFYKFIKPILEKMDGTEELLVKLNREDLLRKQRTFDNGSIPHQIHLGELHAILRRQEDFYPFLKDNREKIEKILTFRIPYYVGPLARGNSRFAWMTRKSEETITPWNFEEVVDKGASAQSFIERMTNFDKNLPNEKVLPKHSLLYEYFTVYNELTKVKYVTEGMRKPAFLSGEQKKAIVDLLFKTNRKVTVKQLKEDYFKKIECFDSVEISGVEDRFNASLGTYHDLLKIIKDKDFLDNEENEDILEDIVLTLTLFEDREMIEERLKTYAHLFDDKVMKQLKRRRYTGWGRLSRKLINGIRDKQSGKTILDFLKSDGFANRNFMQLIHDDSLTFKEDIQKAQVSGQGDSLHEHIANLAGSPAIKKGILQTVKVVDELVKVMGRHKPENIVIEMARENQTTQKGQKNSRERMKRIEEGIKELGSQILKEHPVENTQLQNEKLYLYYLQNGRDMYVDQELDINRLSDYDVDHIVPQSFLKDDSIDNKVLTRSDKARGKSDNVPSEEVVKKMKNYWRQLLNAKLITQRKFDNLTKAERGGLSELDKAGFIKRQLVETRQITKHVAQILDSRMNTKYDENDKLIREVKVITLKSKLVSDFRKDFQFYKVREINNYHHAHDAYLNAVVGTALIKKYPKLESEFVYGDYKVYDVRKMIAKSEQEIGKATAKYFFYSNIMNFFKTEITLANGEIRKRPLIETNGETGEIVWDKGRDFATVRKVLSMPQVNIVKKTEVQTGGFSKESILPKRNSDKLIARKKDWDPKKYGGFDSPTVAYSVLVVAKVEKGKSKKLKSVKELLGITIMERSSFEKNPIDFLEAKGYKEVKKDLIIKLPKYSLFELENGRKRMLASAGELQKGNELALPSKYVNFLYLASHYEKLKGSPEDNEQKQLFVEQHKHYLDEIIEQISEFSKRVILADANLDKVLSAYNKHRDKPIREQAENIIHLFTLTNLGAPAAFKYFDTTIDRKRYTSTKEVLDATLIHQSITGLYETRIDLSQLGGDGGPAPAPAPAPGGVPWLTQQPLQLTILVPLQEYQEKILSKTALPEDQKQQLKTLFVKYDNLWQHWENQVGHRKIRPHNIATGDYPPRPQKQYPINPKAKPSIQIVIDDLLKQGVLTPQNSTMNTPVYPVPKPDGRWRMVLDYREVNKTIPLTAAQNQHSAGILATIVRQKYKTTLDLANGFWAHPITPESYWLTAFTWQGKQYCWTRLPQGFLNSPALFNADVVDLLKEIPNVQVYVDDIYLSHDDPKEHVQQLEKVFQILLQAGYVVSLKKSEIGQKTVEFLGFNITKEGRGLTDTFKTKLLNITPPKDLKQLQSILGKLNFARNFIPNFAELVQPLYNLIAPAKGKYIEWSEENTKQLNMVIEALNTASNLEERLPEQRLVIKVNTSPSAGYVRYYNETGKKPIMYLNYVFSKAELKFSMLEKLLTTMHKALIKAMDLAMGQEILVYSPIVSMTKIQKTPLPERKALPIRWITWMTYLEDPRIQFHYDKTLPELKHIPDVYTSSQSPVKHPSQYEGVFYTDGSAIKSPDPTKSNNAGMGIVHATYKPEYQVLNQWSIPLGNHTAQMAEIAAVEFACKKALKIPGPVLVITDSFYVAESANKELPYWKSNGFVNNKKKPLKHISKWKSIAECLSMKPDITIQHEKGISLQIPVFILKGNALADKLATQGSYVVNAGKRTADGSEFEKRTADGSEFESPKKKAKVE

SEQ ID NO: 6519 - protein, 2216 aa, synthetic construct
MPAAKRVKLDGGDKKYSIGLDIGTNSVGWAVITDEYKVPSKKFKVLGNTDRHSIKKNLIGALLFDSGETAEATRLKRTARRRYTRRKNRICYLQEIFSNEMAKVDDSFFHRLEESFLVEEDKKHERHPIFGNIVDEVAYHEKYPTIYHLRKKLVDSTDKADLRLIYLALAHMIKFRGHFLIEGDLNPDNSDVDKLFIQLVQTYNQLFEENPINASGVDAKAILSARLSKSRRLENLIAQLPGEKKNGLFGNLIALSLGLTPNFKSNFDLAEDAKLQLSKDTYDDDLDNLLAQIGDQYADLFLAAKNLSDAILLSDILRVNTEITKAPLSASMIKRYDEHHQDLTLLKALVRQQLPEKYKEIFFDQSKNGYAGYIDGGASQEEFYKFIKPILEKMDGTEELLVKLNREDLLRKQRTFDNGSIPHQIHLGELHAILRRQEDFYPFLKDNREKIEKILTFRIPYYVGPLARGNSRFAWMTRKSEETITPWNFEEVVDKGASAQSFIERMTNFDKNLPNEKVLPKHSLLYEYFTVYNELTKVKYVTEGMRKPAFLSGEQKKAIVDLLFKTNRKVTVKQLKEDYFKKIECFDSVEISGVEDRFNASLGTYHDLLKIIKDKDFLDNEENEDILEDIVLTLTLFEDREMIEERLKTYAHLFDDKVMKQLKRRRYTGWGRLSRKLINGIRDKQSGKTILDFLKSDGFANRNFMQLIHDDSLTFKEDIQKAQVSGQGDSLHEHIANLAGSPAIKKGILQTVKVVDELVKVMGRHKPENIVIEMARENQTTQKGQKNSRERMKRIEEGIKELGSQILKEHPVENTQLQNEKLYLYYLQNGRDMYVDQELDINRLSDYDVDHIVPQSFLKDDSIDNKVLTRSDKARGKSDNVPSEEVVKKMKNYWRQLLNAKLITQRKFDNLTKAERGGLSELDKAGFIKRQLVETRQITKHVAQILDSRMNTKYDENDKLIREVKVITLKSKLVSDFRKDFQFYKVREINNYHHAHDAYLNAVVGTALIKKYPKLESEFVYGDYKVYDVRKMIAKSEQEIGKATAKYFFYSNIMNFFKTEITLANGEIRKRPLIETNGETGEIVWDKGRDFATVRKVLSMPQVNIVKKTEVQTGGFSKESILPKRNSDKLIARKKDWDPKKYGGFDSPTVAYSVLVVAKVEKGKSKKLKSVKELLGITIMERSSFEKNPIDFLEAKGYKEVKKDLIIKLPKYSLFELENGRKRMLASAGELQKGNELALPSKYVNFLYLASHYEKLKGSPEDNEQKQLFVEQHKHYLDEIIEQISEFSKRVILADANLDKVLSAYNKHRDKPIREQAENIIHLFTLTNLGAPAAFKYFDTTIDRKRYTSTKEVLDATLIHQSITGLYETRIDLSQLGGDGGPAPAPAPAPGGTLGDQGSRGSDPLPEPRVTLTVEGIPTEFLVNTGAEHSVLTKPMGKMGSKRTVVAGATGSKVYPWTTKRLLKIGQKQVTHSFLVIPECPAPLLGRDLLTKLKAQIQFSTEGPQVTWEDRPAMCLVLNLEEEYRLHEKPVPPSIDPSWLQLFPMVWAEKAGMGLANQVPPVVVELKSDASPVAVRQYPMSKEAREGIRPHIQRFLDLGILVPCQSPWNTPLLPVKKPGTNDYRPVQDLREVNKRVQDIHPTVPNPYNLLSSLPPSHTWYSVLDLKDAFFCLKLHPNSQPLFAFEWRDPEKGNTGQLTWTRLPQGFKNSPTLFDEALHRDLASFRALNPQVVMLQYVDDLLVAAPTYRDCKEGTRRLLQELSKLGYRVSAKKAQLCREEVTYLGYLLKGGKRWLTPARKATVMKIPTPTTPRQVREFLGTAGFCRLWIPGFASLAAPLYPLTREKVPFTWTEAHQEAFGRIKEALLSAPALALPDLTKPFALYVDEKEGVARGVLTQTLGPWRRPVAYLSKKLDPVASGWPTCLKAIAAVALLLKDADKLTLGQNVLVIAPHNLESIVRQPPDRWMTNARMTHYQSLLLNERVSFAPPAILNPATLLPVESDDTPIHICSEILAEETGTRPDLRDQPLPGVPAWYTDGSSFIMDGRRQAGAAIVDNKRTVWASNLPEGTSAQKAELIALTQALRLAEGKSINIYTDSRYAFATAHVHGAIYKQRGLLTSAGKDIKNKEEILALLEAIHLPKRVAIIHCPGHQRGTDPVATGNRKADEAAKQAAQSTRILTETTKNAGKRTADGSEFEKRTADGSEFESPKKKAKVE

SEQ ID NO: 6520 - protein, 2125 aa, synthetic construct
MPAAKRVKLDGGDKKYSIGLDIGTNSVGWAVITDEYKVPSKKFKVLGNTDRHSIKKNLIGALLFDSGETAEATRLKRTARRRYTRRKNRICYLQEIFSNEMAKVDDSFFHRLEESFLVEEDKKHERHPIFGNIVDEVAYHEKYPTIYHLRKKLVDSTDKADLRLIYLALAHMIKFRGHFLIEGDLNPDNSDVDKLFIQLVQTYNQLFEENPINASGVDAKAILSARLSKSRRLENLIAQLPGEKKNGLFGNLIALSLGLTPNFKSNFDLAEDAKLQLSKDTYDDDLDNLLAQIGDQYADLFLAAKNLSDAILLSDILRVNTEITKAPLSASMIKRYDEHHQDLTLLKALVRQQLPEKYKEIFFDQSKNGYAGYIDGGASQEEFYKFIKPILEKMDGTEELLVKLNREDLLRKQRTFDNGSIPHQIHLGELHAILRRQEDFYPFLKDNREKIEKILTFRIPYYVGPLARGNSRFAWMTRKSEETITPWNFEEVVDKGASAQSFIERMTNFDKNLPNEKVLPKHSLLYEYFTVYNELTKVKYVTEGMRKPAFLSGEQKKAIVDLLFKTNRKVTVKQLKEDYFKKIECFDSVEISGVEDRFNASLGTYHDLLKIIKDKDFLDNEENEDILEDIVLTLTLFEDREMIEERLKTYAHLFDDKVMKQLKRRRYTGWGRLSRKLINGIRDKQSGKTILDFLKSDGFANRNFMQLIHDDSLTFKEDIQKAQVSGQGDSLHEHIANLAGSPAIKKGILQTVKVVDELVKVMGRHKPENIVIEMARENQTTQKGQKNSRERMKRIEEGIKELGSQILKEHPVENTQLQNEKLYLYYLQNGRDMYVDQELDINRLSDYDVDHIVPQSFLKDDSIDNKVLTRSDKARGKSDNVPSEEVVKKMKNYWRQLLNAKLITQRKFDNLTKAERGGLSELDKAGFIKRQLVETRQITKHVAQILDSRMNTKYDENDKLIREVKVITLKSKLVSDFRKDFQFYKVREINNYHHAHDAYLNAVVGTALIKKYPKLESEFVYGDYKVYDVRKMIAKSEQEIGKATAKYFFYSNIMNFFKTEITLANGEIRKRPLIETNGETGEIVWDKGRDFATVRKVLSMPQVNIVKKTEVQTGGFSKESILPKRNSDKLIARKKDWDPKKYGGFDSPTVAYSVLVVAKVEKGKSKKLKSVKELLGITIMERSSFEKNPIDFLEAKGYKEVKKDLIIKLPKYSLFELENGRKRMLASAGELQKGNELALPSKYVNFLYLASHYEKLKGSPEDNEQKQLFVEQHKHYLDEIIEQISEFSKRVILADANLDKVLSAYNKHRDKPIREQAENIIHLFTLTNLGAPAAFKYFDTTIDRKRYTSTKEVLDATLIHQSITGLYETRIDLSQLGGDGGPAPAPAPAPGGLLGRDLLTKLKAQIQFSTEGPQVTWEDRPAMCLVLNLEEEYRLHEKPVPPSIDPSWLQLFPMVWAEKAGMGLANQVPPVVVELKSDASPVAVRQYPMSKEAREGIRPHIQRFLDLGILVPCQSPWNTPLLPVKKPGTNDYRPVQDLREVNKRVQDIHPTVPNPYNLLSSLPPSHTWYSVLDLKDAFFCLKLHPNSQPLFAFEWRDPEKGNTGQLTWTRLPQGFKNSPTLFNEALHRDLASFRALNPQVVMLQYVDDLLVAAPTYRDCKEGTRRLLQELSKLGYRVSAKKAQLCREEVTYLGYLLKGGKRWLTPARKATVMKIPTPTTPRQVREFLGTAGFCRLWIPGFASLAAPLYPLTRPKVPFTWTEAHQEAFGRIKEALLSAPALALPDLTKPFALYVDEKEGVARGVLTQTLGPWRRPVAYLSKKLDPVASGWPTCLKAIAAVALLLKDADKLTLGQNVLVIAPHNLESIVRQPPDRWMTNARMTHYQSLLLNERVSFAPPAILNPATLLPVESDDTPIHICSEILAEETGTRPDLRDQPLPGVPAWYTDGSSFIMDGRRQAGAAIVDNKRTVWASNLPEGTSAQKAELIALTQALRLAEGKSINIYTDSRYAFATAHVHGAIYKQRGWLTSAGKDIKNKEEILALLEAIHLPKRVAIIHCPGHQRGTDPVATGNRKADEAAKQAAQSTRILTETTKNAGKRTADGSEFEKRTADGSEFESPKKKAKVE

SEQ ID NO: 6521 - protein, 2216 aa, synthetic construct
MPAAKRVKLDGGDKKYSIGLDIGTNSVGWAVITDEYKVPSKKFKVLGNTDRHSIKKNLIGALLFDSGETAEATRLKRTARRRYTRRKNRICYLQEIFSNEMAKVDDSFFHRLEESFLVEEDKKHERHPIFGNIVDEVAYHEKYPTIYHLRKKLVDSTDKADLRLIYLALAHMIKFRGHFLIEGDLNPDNSDVDKLFIQLVQTYNQLFEENPINASGVDAKAILSARLSKSRRLENLIAQLPGEKKNGLFGNLIALSLGLTPNFKSNFDLAEDAKLQLSKDTYDDDLDNLLAQIGDQYADLFLAAKNLSDAILLSDILRVNTEITKAPLSASMIKRYDEHHQDLTLLKALVRQQLPEKYKEIFFDQSKNGYAGYIDGGASQEEFYKFIKPILEKMDGTEELLVKLNREDLLRKQRTFDNGSIPHQIHLGELHAILRRQEDFYPFLKDNREKIEKILTFRIPYYVGPLARGNSRFAWMTRKSEETITPWNFEEVVDKGASAQSFIERMTNFDKNLPNEKVLPKHSLLYEYFTVYNELTKVKYVTEGMRKPAFLSGEQKKAIVDLLFKTNRKVTVKQLKEDYFKKIECFDSVEISGVEDRFNASLGTYHDLLKIIKDKDFLDNEENEDILEDIVLTLTLFEDREMIEERLKTYAHLFDDKVMKQLKRRRYTGWGRLSRKLINGIRDKQSGKTILDFLKSDGFANRNFMQLIHDDSLTFKEDIQKAQVSGQGDSLHEHIANLAGSPAIKKGILQTVKVVDELVKVMGRHKPENIVIEMARENQTTQKGQKNSRERMKRIEEGIKELGSQILKEHPVENTQLQNEKLYLYYLQNGRDMYVDQELDINRLSDYDVDHIVPQSFLKDDSIDNKVLTRSDKARGKSDNVPSEEVVKKMKNYWRQLLNAKLITQRKFDNLTKAERGGLSELDKAGFIKRQLVETRQITKHVAQILDSRMNTKYDENDKLIREVKVITLKSKLVSDFRKDFQFYKVREINNYHHAHDAYLNAVVGTALIKKYPKLESEFVYGDYKVYDVRKMIAKSEQEIGKATAKYFFYSNIMNFFKTEITLANGEIRKRPLIETNGETGEIVWDKGRDFATVRKVLSMPQVNIVKKTEVQTGGFSKESILPKRNSDKLIARKKDWDPKKYGGFDSPTVAYSVLVVAKVEKGKSKKLKSVKELLGITIMERSSFEKNPIDFLEAKGYKEVKKDLIIKLPKYSLFELENGRKRMLASAGELQKGNELALPSKYVNFLYLASHYEKLKGSPEDNEQKQLFVEQHKHYLDEIIEQISEFSKRVILADANLDKVLSAYNKHRDKPIREQAENIIHLFTLTNLGAPAAFKYFDTTIDRKRYTSTKEVLDATLIHQSITGLYETRIDLSQLGGDGGPAPAPAPAPGGTLGDQGSRGSDPLPEPRVTLTVEGIPTEFLVNTGAEHSVLTKPMGKMGSKRTVVAGATGSKVYPWTTKRLLKIGQKQVTHSFLVIPECPAPLLGRDLLTKLKAQIQFSTEGPQVTWEDRPAMCLVLNLEEEYRLHEKPVPPSIDPSWLQLFPMVWAEKAGMGLANQVPPVVVELKSDASPVAVRQYPMSKEAREGIRPHIQRFLDLGILVPCQSPWNTPLLPVKKPGTNDYRPVQDLREVNKRVQDIHPTVPNPYNLLSSLPPSHTWYSVLDLKDAFFCLKLHPNSQPLFAFEWRDPEKGNTGQLTWTRLPQGFKNSPTLFNEALHRDLASFRALNPQVVMLQYVDDLLVAAPTYRDCKEGTRRLLQELSKLGYRVSAKKAQLCREEVTYLGYLLKGGKRWLTPARKATVMKIPTPTTPRQVREFLGTAGFCRLWIPGFASLAAPLYPLTRPKVPFTWTEAHQEAFGRIKEALLSAPALALPDLTKPFALYVDEKEGVARGVLTQTLGPWRRPVAYLSKKLDPVASGWPTCLKAIAAVALLLKDADKLTLGQNVLVIAPHNLESIVRQPPDRWMTNARMTHYQSLLLNERVSFAPPAILNPATLLPVESDDTPIHICSEILAEETGTRPDLRDQPLPGVPAWYTDGSSFIMDGRRQAGAAIVDNKRTVWASNLPEGTSAQKAELIALTQALRLAEGKSINIYTDSRYAFATAHVHGAIYKQRGWLTSAGKDIKNKEEILALLEAIHLPKRVAIIHCPGHQRGTDPVATGNRKADEAAKQAAQSTRILTETTKNAGKRTADGSEFEKRTADGSEFESPKKKAKVE

SEQ ID NO: 6522 - protein, 2094 aa, synthetic construct
MPAAKRVKLDGGDKKYSIGLDIGTNSVGWAVITDEYKVPSKKFKVLGNTDRHSIKKNLIGALLFDSGETAEATRLKRTARRRYTRRKNRICYLQEIFSNEMAKVDDSFFHRLEESFLVEEDKKHERHPIFGNIVDEVAYHEKYPTIYHLRKKLVDSTDKADLRLIYLALAHMIKFRGHFLIEGDLNPDNSDVDKLFIQLVQTYNQLFEENPINASGVDAKAILSARLSKSRRLENLIAQLPGEKKNGLFGNLIALSLGLTPNFKSNFDLAEDAKLQLSKDTYDDDLDNLLAQIGDQYADLFLAAKNLSDAILLSDILRVNTEITKAPLSASMIKRYDEHHQDLTLLKALVRQQLPEKYKEIFFDQSKNGYAGYIDGGASQEEFYKFIKPILEKMDGTEELLVKLNREDLLRKQRTFDNGSIPHQIHLGELHAILRRQEDFYPFLKDNREKIEKILTFRIPYYVGPLARGNSRFAWMTRKSEETITPWNFEEVVDKGASAQSFIERMTNFDKNLPNEKVLPKHSLLYEYFTVYNELTKVKYVTEGMRKPAFLSGEQKKAIVDLLFKTNRKVTVKQLKEDYFKKIECFDSVEISGVEDRFNASLGTYHDLLKIIKDKDFLDNEENEDILEDIVLTLTLFEDREMIEERLKTYAHLFDDKVMKQLKRRRYTGWGRLSRKLINGIRDKQSGKTILDFLKSDGFANRNFMQLIHDDSLTFKEDIQKAQVSGQGDSLHEHIANLAGSPAIKKGILQTVKVVDELVKVMGRHKPENIVIEMARENQTTQKGQKNSRERMKRIEEGIKELGSQILKEHPVENTQLQNEKLYLYYLQNGRDMYVDQELDINRLSDYDVDHIVPQSFLKDDSIDNKVLTRSDKARGKSDNVPSEEVVKKMKNYWRQLLNAKLITQRKFDNLTKAERGGLSELDKAGFIKRQLVETRQITKHVAQILDSRMNTKYDENDKLIREVKVITLKSKLVSDFRKDFQFYKVREINNYHHAHDAYLNAVVGTALIKKYPKLESEFVYGDYKVYDVRKMIAKSEQEIGKATAKYFFYSNIMNFFKTEITLANGEIRKRPLIETNGETGEIVWDKGRDFATVRKVLSMPQVNIVKKTEVQTGGFSKESILPKRNSDKLIARKKDWDPKKYGGFDSPTVAYSVLVVAKVEKGKSKKLKSVKELLGITIMERSSFEKNPIDFLEAKGYKEVKKDLIIKLPKYSLFELENGRKRMLASAGELQKGNELALPSKYVNFLYLASHYEKLKGSPEDNEQKQLFVEQHKHYLDEIIEQISEFSKRVILADANLDKVLSAYNKHRDKPIREQAENIIHLFTLTNLGAPAAFKYFDTTIDRKRYTSTKEVLDATLIHQSITGLYETRIDLSQLGGDGGPAPAPAPAPGGLGIEDEYRLHETSTEPDVSLGSTWLSDFPQAWAETGGMGLAVRQAPLIIPLKATSTPVSIQQYPMSHEARLGIKPHIQRLLDQGILVPCQSPWNTPLLPVKKPGTNDYRPVQDLREVNKRVEDIHPTVPNPYNLLSGLPPSHQWYTVLDLKDAFFCLRLHPTSQPLFAFEWRDPGMGISGQLTWTRLPQGFKNSPTLFNEALHRDLADFRIQHPDLILLQYVDDILLAATSELDCQQGTRALLQTLGDLGYRASAKKAQICQKQVKYLGYLLREGQRWLTEARKETVMGQPVPKTPRQLREFLGKAGFCRLFIPGFAEMAAPLYPLTKPGTLFSWGPDQQKAYQEIKQALLTAPALGLPDLTKPFELFVDEKQGYAKGVLTQKLGPWRRPVAYLSKKLDPVAAGWPPCLRMVAAIAVLTKDAGKLTMGQPLVILAPHAVEALVKQPPDRWLSNARMTHYQAMLLDTDRVQFGPVVALNPATLLPLPEEGAPHDCLEILAETHGTRPDLTDQPIPDADHTWYTDGSSFLQEGQRKAGAAVTTETEVIWAGALPAGTSAQRAELIALTQALKMAEGKRLNVYTDSRYAFATAHIHGEIYRRRGWLTSEGREIKNKSEILALLKALFLPKRLSIIHCLGHQKGDSAEARGNRLADQAAREAAIKTPPDTSTLLIAGKRTADGSEFEKRTADGSEFESPKKKAKVE

SEQ ID NO: 6523 - protein, 2094 aa, synthetic construct; identical to SEQ ID NO: 6522

SEQ ID NO: 6524 - protein, 2094 aa, synthetic construct
MPAAKRVKLDGGDKKYSIGLDIGTNSVGWAVITDEYKVPSKKFKVLGNTDRHSIKKNLIGALLFDSGETAEATRLKRTARRRYTRRKNRICYLQEIFSNEMAKVDDSFFHRLEESFLVEEDKKHERHPIFGNIVDEVAYHEKYPTIYHLRKKLVDSTDKADLRLIYLALAHMIKFRGHFLIEGDLNPDNSDVDKLFIQLVQTYNQLFEENPINASGVDAKAILSARLSKSRRLENLIAQLPGEKKNGLFGNLIALSLGLTPNFKSNFDLAEDAKLQLSKDTYDDDLDNLLAQIGDQYADLFLAAKNLSDAILLSDILRVNTEITKAPLSASMIKRYDEHHQDLTLLKALVRQQLPEKYKEIFFDQSKNGYAGYIDGGASQEEFYKFIKPILEKMDGTEELLVKLNREDLLRKQRTFDNGSIPHQIHLGELHAILRRQEDFYPFLKDNREKIEKILTFRIPYYVGPLARGNSRFAWMTRKSEETITPWNFEEVVDKGASAQSFIERMTNFDKNLPNEKVLPKHSLLYEYFTVYNELTKVKYVTEGMRKPAFLSGEQKKAIVDLLFKTNRKVTVKQLKEDYFKKIECFDSVEISGVEDRFNASLGTYHDLLKIIKDKDFLDNEENEDILEDIVLTLTLFEDREMIEERLKTYAHLFDDKVMKQLKRRRYTGWGRLSRKLINGIRDKQSGKTILDFLKSDGFANRNFMQLIHDDSLTFKEDIQKAQVSGQGDSLHEHIANLAGSPAIKKGILQTVKVVDELVKVMGRHKPENIVIEMARENQTTQKGQKNSRERMKRIEEGIKELGSQILKEHPVENTQLQNEKLYLYYLQNGRDMYVDQELDINRLSDYDVDHIVPQSFLKDDSIDNKVLTRSDKARGKSDNVPSEEVVKKMKNYWRQLLNAKLITQRKFDNLTKAERGGLSELDKAGFIKRQLVETRQITKHVAQILDSRMNTKYDENDKLIREVKVITLKSKLVSDFRKDFQFYKVREINNYHHAHDAYLNAVVGTALIKKYPKLESEFVYGDYKVYDVRKMIAKSEQEIGKATAKYFFYSNIMNFFKTEITLANGEIRKRPLIETNGETGEIVWDKGRDFATVRKVLSMPQVNIVKKTEVQTGGFSKESILPKRNSDKLIARKKDWDPKKYGGFDSPTVAYSVLVVAKVEKGKSKKLKSVKELLGITIMERSSFEKNPIDFLEAKGYKEVKKDLIIKLPKYSLFELENGRKRMLASAGELQKGNELALPSKYVNFLYLASHYEKLKGSPEDNEQKQLFVEQHKHYLDEIIEQISEFSKRVILADANLDKVLSAYNKHRDKPIREQAENIIHLFTLTNLGAPAAFKYFDTTIDRKRYTSTKEVLDATLIHQSITGLYETRIDLSQLGGDGGPAPAPAPAPGGTLNIEDEHRLHETSKEPDVSLGSTWLSDFPQAWAETGGMGLAVRQAPLIIPLKATSTPVSIKQYPMSQEARLGIKPHIQRLLDQGILVPCQSPWNTPLLPVKKPGTNDYRPVQDLREVNKRVEDIHPTVPNPYNLLSGLPPSHQWYTVLDLKDAFFCLRLHPTSQPLFAFEWRDPEMGISGQLTWTRLPQGFKNSPTLFDEALHRDLADFRIQHPDLILLQYVDDLLLAATSELDCQQGTRALLQTLGNLGYRASAKKAQICQKQVKYLGYLLKEGQRWLTEARKETVMGQPTPKTPRQLREFLGTAGFCRLWIPGFAEMAAPLYPLTKTGTLFNWGPDQQKAYQEIKQALLTAPALGLPDLTKPFELFVDEKQGYAKGVLTQKLGPWRRPVAYLSKKLDPVAAGWPPCLRMVAAIAVLTKDAGKLTMGQPLVILAPHAVEALVKQPPDRWLSNARMTHYQALLLDTDRVQFGPVVALNPATLLPLPEEGLQHNCLDILAEAHGTRPDLTDQPLPDADHTWYTDGSSLLQEGQRKAGAAVTTETEVIWAKALPAGTSAQRAELIALTQALKMAEGKKLNVYTDSRYAFATAHIHGEIYRRRGLLTSEGKEIKNKDEILALLKALFLPKRLSIIHCPGHQKGHSAEARGNRMADQAARKAAITETPDTSTLLAGKRTADGSEFEKRTADGSEFESPKKKAKVE

SEQ ID NO: 6525 - protein, 2086 aa, synthetic construct
MPAAKRVKLDGGDKKYSIGLDIGTNSVGWAVITDEYKVPSKKFKVLGNTDRHSIKKNLIGALLFDSGETAEATRLKRTARRRYTRRKNRICYLQEIFSNEMAKVDDSFFHRLEESFLVEEDKKHERHPIFGNIVDEVAYHEKYPTIYHLRKKLVDSTDKADLRLIYLALAHMIKFRGHFLIEGDLNPDNSDVDKLFIQLVQTYNQLFEENPINASGVDAKAILSARLSKSRRLENLIAQLPGEKKNGLFGNLIALSLGLTPNFKSNFDLAEDAKLQLSKDTYDDDLDNLLAQIGDQYADLFLAAKNLSDAILLSDILRVNTEITKAPLSASMIKRYDEHHQDLTLLKALVRQQLPEKYKEIFFDQSKNGYAGYIDGGASQEEFYKFIKPILEKMDGTEELLVKLNREDLLRKQRTFDNGSIPHQIHLGELHAILRRQEDFYPFLKDNREKIEKILTFRIPYYVGPLARGNSRFAWMTRKSEETITPWNFEEVVDKGASAQSFIERMTNFDKNLPNEKVLPKHSLLYEYFTVYNELTKVKYVTEGMRKPAFLSGEQKKAIVDLLFKTNRKVTVKQLKEDYFKKIECFDSVEISGVEDRFNASLGTYHDLLKIIKDKDFLDNEENEDILEDIVLTLTLFEDREMIEERLKTYAHLFDDKVMKQLKRRRYTGWGRLSRKLINGIRDKQSGKTILDFLKSDGFANRNFMQLIHDDSLTFKEDIQKAQVSGQGDSLHEHIANLAGSPAIKKGILQTVKVVDELVKVMGRHKPENIVIEMARENQTTQKGQKNSRERMKRIEEGIKELGSQILKEHPVENTQLQNEKLYLYYLQNGRDMYVDQELDINRLSDYDVDHIVPQSFLKDDSIDNKVLTRSDKARGKSDNVPSEEVVKKMKNYWRQLLNAKLITQRKFDNLTKAERGGLSELDKAGFIKRQLVETRQITKHVAQILDSRMNTKYDENDKLIREVKVITLKSKLVSDFRKDFQFYKVREINNYHHAHDAYLNAVVGTALIKKYPKLESEFVYGDYKVYDVRKMIAKSEQEIGKATAKYFFYSNIMNFFKTEITLANGEIRKRPLIETNGETGEIVWDKGRDFATVRKVLSMPQVNIVKKTEVQTGGFSKESILPKRNSDKLIARKKDWDPKKYGGFDSPTVAYSVLVVAKVEKGKSKKLKSVKELLGITIMERSSFEKNPIDFLEAKGYKEVKKDLIIKLPKYSLFELENGRKRMLASAGELQKGNELALPSKYVNFLYLASHYEKLKGSPEDNEQKQLFVEQHKHYLDEIIEQISEFSKRVILADANLDKVLSAYNKHRDKPIREQAENIIHLFTLTNLGAPAAFKYFDTTIDRKRYTSTKEVLDATLIHQSITGLYETRIDLSQLGGDGGPAPAPAPAPGGLDDEYRLYSPLVKPDQNIQFWLEQFPQAWAETAGMGLAKQVPPQVIQLKASATPVSVRQYPLSKEAQEGIRPHVQRLIQQGILVPVQSPWNTPLLPVRKPGTNDYRPVQDLREVNKRVQDIHPTVPNPYNLLCALPPQRSWYTVLDLKDAFFCLRLHPTSQPLFAFEWRDPGTGRTGQLTWTRLPQGFKNSPTIFNEALHRDLANFRIQHPQVTLLQYVDDLLLAGATKQDCLEGTKALLLELSDLGYRASAKKAQICRREVTYLGYSLRDGQRWLTEARKKTVVQIPAPTTAKQVREFLGKAGFCRLFIPGFATLAAPLYPLTKPKGEFSWAPEHQKAFDAIKKALLSAPALALPDVTKPFTLYVDERKGVARGVLTQTLGPWRRPVAYLSKKLDPVASGWPVCLKAIAAVAILVKDADKLTLGQNITVIAPHALENIVRQPPDRWMTNARMTHYQSLLLTERVTFAPPAALNPATLLPEETDEPVTHDCHQLLIEETGVRKDLTDIPLTGEVLTWFTDGSSYVVEGKRMAGAAVVDGTRTIWASSLPEGTSAQKAELMALTQALRLAEGKSINIYTDSRYAFATAHVHGAIYKQRGWLTSAGREIKNKEEILSLLEALHLPKRLAIIHCPGHQKAKDPISRGNQMADRVAKQAAQGVNLLPAGKRTADGSEFEKRTADGSEFESPKKKAKVE

SEQ ID NO: 6526 - protein, 2088 aa, synthetic construct
MPAAKRVKLDGGDKKYSIGLDIGTNSVGWAVITDEYKVPSKKFKVLGNTDRHSIKKNLIGALLFDSGETAEATRLKRTARRRYTRRKNRICYLQEIFSNEMAKVDDSFFHRLEESFLVEEDKKHERHPIFGNIVDEVAYHEKYPTIYHLRKKLVDSTDKADLRLIYLALAHMIKFRGHFLIEGDLNPDNSDVDKLFIQLVQTYNQLFEENPINASGVDAKAILSARLSKSRRLENLIAQLPGEKKNGLFGNLIALSLGLTPNFKSNFDLAEDAKLQLSKDTYDDDLDNLLAQIGDQYADLFLAAKNLSDAILLSDILRVNTEITKAPLSASMIKRYDEHHQDLTLLKALVRQQLPEKYKEIFFDQSKNGYAGYIDGGASQEEFYKFIKPILEKMDGTEELLVKLNREDLLRKQRTFDNGSIPHQIHLGELHAILRRQEDFYPFLKDNREKIEKILTFRIPYYVGPLARGNSRFAWMTRKSEETITPWNFEEVVDKGASAQSFIERMTNFDKNLPNEKVLPKHSLLYEYFTVYNELTKVKYVTEGMRKPAFLSGEQKKAIVDLLFKTNRKVTVKQLKEDYFKKIECFDSVEISGVEDRFNASLGTYHDLLKIIKDKDFLDNEENEDILEDIVLTLTLFEDREMIEERLKTYAHLFDDKVMKQLKRRRYTGWGRLSRKLINGIRDKQSGKTILDFLKSDGFANRNFMQLIHDDSLTFKEDIQKAQVSGQGDSLHEHIANLAGSPAIKKGILQTVKVVDELVKVMGRHKPENIVIEMARENQTTQKGQKNSRERMKRIEEGIKELGSQILKEHPVENTQLQNEKLYLYYLQNGRDMYVDQELDINRLSDYDVDHIVPQSFLKDDSIDNKVLTRSDKARGKSDNVPSEEVVKKMKNYWRQLLNAKLITQRKFDNLTKAERGGLSELDKAGFIKRQLVETRQITKHVAQILDSRMNTKYDENDKLIREVKVITLKSKLVSDFRKDFQFYKVREINNYHHAHDAYLNAVVGTALIKKYPKLESEFVYGDYKVYDVRKMIAKSEQEIGKATAKYFFYSNIMNFFKTEITLANGEIRKRPLIETNGETGEIVWDKGRDFATVRKVLSMPQVNIVKKTEVQTGGFSKESILPKRNSDKLIARKKDWDPKKYGGFDSPTVAYSVLVVAKVEKGKSKKLKSVKELLGITIMERSSFEKNPIDFLEAKGYKEVKKDLIIKLPKYSLFELENGRKRMLASAGELQKGNELALPSKYVNFLYLASHYEKLKGSPEDNEQKQLFVEQHKHYLDEIIEQISEFSKRVILADANLDKVLSAYNKHRDKPIREQAENIIHLFTLTNLGAPAAFKYFDTTIDRKRYTSTKEVLDATLIHQSITGLYETRIDLSQLGGDGGPAPAPAPAPGGTLQLDDEYRLYSPLVKPDQNIQFWLEQFPQAWAETAGMGLAKQVPPQVIQLKASATPVSVRQYPLSKEAQEGIRPHVQRLIQQGILVPVQSPWNTPLLPVRKPGTNDYRPVQDLREVNKRVQDIHPTVPNPYNLLCALPPQRSWYTVLDLKDAFFCLRLHPTSQPLFAFEWRDPGTGRTGQLTWTRLPQGFKNSPTIFDEALHRDLANFRIQHPQVTLLQYVDDLLLAGATKQDCLEGTKALLLELSDLGYRASAKKAQICRREVTYLGYSLRDGQRWLTEARKKTVVQIPAPTTAKQVREFLGTAGFCRLWIPGFATLAAPLYPLTKEKGEFSWAPEHQKAFDAIKKALLSAPALALPDVTKPFTLYVDERKGVARGVLTQTLGPWRRPVAYLSKKLDPVASGWPVCLKAIAAVAILVKDADKLTLGQNITVIAPHALENIVRQPPDRWMTNARMTHYQSLLLTERVTFAPPAALNPATLLPEETDEPVTHDCHQLLIEETGVRKDLTDIPLTGEVLTWFTDGSSYVVEGKRMAGAAVVDGTRTIWASSLPEGTSAQKAELMALTQALRLAEGKSINIYTDSRYAFATAHVHGAIYKQRGLLTSAGREIKNKEEILSLLEALHLPKRLAIIHCPGHQKAKDPISRGNQMADRVAKQAAQGVNLLAGKRTADGSEFEKRTADGSEFESPKKKAKVE

SEQ ID NO: 6527 - protein, 2086 aa, synthetic construct; identical to SEQ ID NO: 6525

SEQ ID NO: 6528 - protein, 2088 aa, synthetic construct; identical to SEQ ID NO: 6526

SEQ ID NO: 6529 - protein, 2085 aa, synthetic construct
MPAAKRVKLDGGDKKYSIGLDIGTNSVGWAVITDEYKVPSKKFKVLGNTDRHSIKKNLIGALLFDSGETAEATRLKRTARRRYTRRKNRICYLQEIFSNEMAKVDDSFFHRLEESFLVEEDKKHERHPIFGNIVDEVAYHEKYPTIYHLRKKLVDSTDKADLRLIYLALAHMIKFRGHFLIEGDLNPDNSDVDKLFIQLVQTYNQLFEENPINASGVDAKAILSARLSKSRRLENLIAQLPGEKKNGLFGNLIALSLGLTPNFKSNFDLAEDAKLQLSKDTYDDDLDNLLAQIGDQYADLFLAAKNLSDAILLSDILRVNTEITKAPLSASMIKRYDEHHQDLTLLKALVRQQLPEKYKEIFFDQSKNGYAGYIDGGASQEEFYKFIKPILEKMDGTEELLVKLNREDLLRKQRTFDNGSIPHQIHLGELHAILRRQEDFYPFLKDNREKIEKILTFRIPYYVGPLARGNSRFAWMTRKSEETITPWNFEEVVDKGASAQSFIERMTNFDKNLPNEKVLPKHSLLYEYFTVYNELTKVKYVTEGMRKPAFLSGEQKKAIVDLLFKTNRKVTVKQLKEDYFKKIECFDSVEISGVEDRFNASLGTYHDLLKIIKDKDFLDNEENEDILEDIVLTLTLFEDREMIEERLKTYAHLFDDKVMKQLKRRRYTGWGRLSRKLINGIRDKQSGKTILDFLKSDGFANRNFMQLIHDDSLTFKEDIQKAQVSGQGDSLHEHIANLAGSPAIKKGILQTVKVVDELVKVMGRHKPENIVIEMARENQTTQKGQKNSRERMKRIEEGIKELGSQILKEHPVENTQLQNEKLYLYYLQNGRDMYVDQELDINRLSDYDVDHIVPQSFLKDDSIDNKVLTRSDKARGKSDNVPSEEVVKKMKNYWRQLLNAKLITQRKFDNLTKAERGGLSELDKAGFIKRQLVETRQITKHVAQILDSRMNTKYDENDKLIREVKVITLKSKLVSDFRKDFQFYKVREINNYHHAHDAYLNAVVGTALIKKYPKLESEFVYGDYKVYDVRKMIAKSEQEIGKATAKYFFYSNIMNFFKTEITLANGEIRKRPLIETNGETGEIVWDKGRDFATVRKVLSMPQVNIVKKTEVQTGGFSKESILPKRNSDKLIARKKDWDPKKYGGFDSPTVAYSVLVVAKVEKGKSKKLKSVKELLGITIMERSSFEKNPIDFLEAKGYKEVKKDLIIKLPKYSLFELENGRKRMLASAGELQKGNELALPSKYVNFLYLASHYEKLKGSPEDNEQKQLFVEQHKHYLDEIIEQISEFSKRVILADANLDKVLSAYNKHRDKPIREQAENIIHLFTLTNLGAPAAFKYFDTTIDRKRYTSTKEVLDATLIHQSITGLYETRIDLSQLGGDGGPAPAPAPAPGGIPWLMKKPLQLTTLVPLQEYEERLLKQTMLTGSYKEKLQSLFLKYDALWQHWENQVGHRRIKPHHIATGTVNPRPQKQYPINPKAKASIQTVINDLLKQGVLIQQNSIMNTPVYPVPKPDGKWRMVLDYREVNKTIPLIAAQNQHSAGILSSIFRGKYKTTLDLSNGFWAHSITPESYWLTAFTWLGQQYCWTRLPQGFLNSPALFNADVVDLLKEVPNVQVYVDDIYISHDDPREHLEQLEKVFSLLLNAGYVVSLKKSEIAQHEVEFLGFNITKEGRGLTETFKQKLLNITPPRDLKQLQSILGKLNFARNFIPNFSELVKPLYNIIATAPGKYITWTTDNSQQLQNIISMLNSAENLEERNPEVRLIMKVNTSPSAGYIRFYNEFAKRPIMYLNYVYTKAEVKFTNTEKLLTTIHKGLIKALDLGMGQEILVYSPIVSMTKIQKTPLPERKALPIRWITWMSYLEDPRIQFHYDKTLPELQQVPTVTDDIIAKIKHPSEFSMVFYTDGSAIKHPNVNKSHNAGMGIAQVQFKPEFTVINTWSIPLGDHTAQLAEVAAVEFACKKALKIDGPVLIVTDSFYVAESVNKELPYWQSNGFFNNKKKPLKHVSKWKSIADCIQLKPDIIIIHEKGHQPTASTFHTEGNNLADKLATQGSYVVNAGKRTADGSEFEKRTADGSEFESPKKKAKVE

SEQ ID NO: 6530 - protein, 2098 aa, synthetic construct
MPAAKRVKLDGGDKKYSIGLDIGTNSVGWAVITDEYKVPSKKFKVLGNTDRHSIKKNLIGALLFDSGETAEATRLKRTARRRYTRRKNRICYLQEIFSNEMAKVDDSFFHRLEESFLVEEDKKHERHPIFGNIVDEVAYHEKYPTIYHLRKKLVDSTDKADLRLIYLALAHMIKFRGHFLIEGDLNPDNSDVDKLFIQLVQTYNQLFEENPINASGVDAKAILSARLSKSRRLENLIAQLPGEKKNGLFGNLIALSLGLTPNFKSNFDLAEDAKLQLSKDTYDDDLDNLLAQIGDQYADLFLAAKNLSDAILLSDILRVNTEITKAPLSASMIKRYDEHHQDLTLLKALVRQQLPEKYKEIFFDQSKNGYAGYIDGGASQEEFYKFIKPILEKMDGTEELLVKLNREDLLRKQRTFDNGSIPHQIHLGELHAILRRQEDFYPFLKDNREKIEKILTFRIPYYVGPLARGNSRFAWMTRKSEETITPWNFEEVVDKGASAQSFIERMTNFDKNLPNEKVLPKHSLLYEYFTVYNELTKVKYVTEGMRKPAFLSGEQKKAIVDLLFKTNRKVTVKQLKEDYFKKIECFDSVEISGVEDRFNASLGTYHDLLKIIKDKDFLDNEENEDILEDIVLTLTLFEDREMIEERLKTYAHLFDDKVMKQLKRRRYTGWGRLSRKLINGIRDKQSGKTILDFLKSDGFANRNFMQLIHDDSLTFKEDIQKAQVSGQGDSLHEHIANLAGSPAIKKGILQTVKVVDELVKVMGRHKPENIVIEMARENQTTQKGQKNSRERMKRIEEGIKELGSQILKEHPVENTQLQNEKLYLYYLQNGRDMYVDQELDINRLSDYDVDHIVPQSFLKDDSIDNKVLTRSDKARGKSDNVPSEEVVKKMKNYWRQLLNAKLITQRKFDNLTKAERGGLSELDKAGFIKRQLVETRQITKHVAQILDSRMNTKYDENDKLIREVKVITLKSKLVSDFRKDFQFYKVREINNYHHAHDAYLNAVVGTALIKKYPKLESEFVYGDYKVYDVRKMIAKSEQEIGKATAKYFFYSNIMNFFKTEITLANGEIRKRPLIETNGETGEIVWDKGRDFATVRKVLSMPQVNIVKKTEVQTGGFSKESILPKRNSDKLIARKKDWDPKKYGGFDSPTVAYSVLVVAKVEKGKSKKLKSVKELLGITIMERSSFEKNPIDFLEAKGYKEVKKDLIIKLPKYSLFELENGRKRMLASAGELQKGNELALPSKYVNFLYLASHYEKLKGSPEDNEQKQLFVEQHKHYLDEIIEQISEFSKRVILADANLDKVLSAYNKHRDKPIREQAENIIHLFTLTNLGAPAAFKYFDTTIDRKRYTSTKEVLDATLIHQSITGLYETRIDLSQLGGDGGPAPAPAPAPAPGGTAPLEEEYRLFLEAPIQNVTLLEQWKREIPKVWAEINPPGLASTQAPIHVQLLSTALPVRVRQYPITLEAKRSLRETIRKFRAAGILRPVHSPWNTPLLPVRKSGTSEYRMVQDLREVNKRVETIHPTVPNPYTLLSLLPPDRIWYSVLDLKDAFFCIPLAPESQLIFAFEWADAEEGESGQLTWTRLPQGFKNSPTLFNEALNRDLQGFRLDHPSVSLLQYVDDLLIAADTQAACLSATRDLLMTLAELGYRVSGKKAQLCQEEVTYLGFKIHKGSRSLSNSRTQAILQIPVPKTKRQVREFLGTIGYCRLWIPGFAELAQPLYAATRPGNDPLVWGEKEEEAFQSLKLALTQPPALALPSLDKPFQLFVEETSGAAKGVLTQALGPWKRPVAYLSKRLDPVAAGWPRCLRAIAAAALLTREASKLTFGQDIEITSSHNLESLLRSPPDKWLTNARITQYQVLLLDPPRVRFKQTAALNPATLLPETDDTLPIHHCLDTLDSLTSTRPDLTDQPLAQAEATLFTDGSSYIRDGKRYAGAAVVTLDSVIWAEPLPIGTSAQKAELIALTKALEWSKDKSVNIYTDSRYAFATLHVHGMIYRERGWLTAGGKAIKNAPEILALLTAVWLPKRVAVMHCKGHQKDDAPTSTGNRRADEVAREVAIRPLSTQATISAGKRTADGSEFEKRTADGSEFESPKKKAKVE

SEQ ID NO: 6531 - protein, 2098 aa, synthetic construct
MPAAKRVKLDGGDKKYSIGLDIGTNSVGWAVITDEYKVPSKKFKVLGNTDRHSIKKNLIGALLFDSGETAEATRLKRTARRRYTRRKNRICYLQEIFSNEMAKVDDSFFHRLEESFLVEEDKKHERHPIFGNIVDEVAYHEKYPTIYHLRKKLVDSTDKADLRLIYLALAHMIKFRGHFLIEGDLNPDNSDVDKLFIQLVQTYNQLFEENPINASGVDAKAILSARLSKSRRLENLIAQLPGEKKNGLFGNLIALSLGLTPNFKSNFDLAEDAKLQLSKDTYDDDLDNLLAQIGDQYADLFLAAKNLSDAILLSDILRVNTEITKAPLSASMIKRYDEHHQDLTLLKALVRQQLPEKYKEIFFDQSKNGYAGYIDGGASQEEFYKFIKPILEKMDGTEELLVKLNREDLLRKQRTFDNGSIPHQIHLGELHAILRRQEDFYPFLKDNREKIEKILTFRIPYYVGPLARGNSRFAWMTRKSEETITPWNFEEVVDKGASAQSFIERMTNFDKNLPNEKVLPKHSLLYEYFTVYNELTKVKYVTEGMRKPAFLSGEQKKAIVDLLFKTNRKVTVKQLKEDYFKKIECFDSVEISGVEDRFNASLGTYHDLLKIIKDKDFLDNEENEDILEDIVLTLTLFEDREMIEERLKTYAHLFDDKVMKQLKRRRYTGWGRLSRKLINGIRDKQSGKTILDFLKSDGFANRNFMQLIHDDSLTFKEDIQKAQVSGQGDSLHEHIANLAGSPAIKKGILQTVKVVDELVKVMGRHKPENIVIEMARENQTTQKGQKNSRERMKRIEEGIKELGSQILKEHPVENTQLQNEKLYLYYLQNGRDMYVDQELDINRLSDYDVDHIVPQSFLKDDSIDNKVLTRSDKARGKSDNVPSEEVVKKMKNYWRQLLNAKLITQRKFDNLTKAERGGLSELDKAGFIKRQLVETRQITKHVAQILDSRMNTKYDENDKLIREVKVITLKSKLVSDFRKDFQFYKVREINNYHHAHDAYLNAVVGTALIKKYPKLESEFVYGDYKVYDVRKMIAKSEQEIGKATAKYFFYSNIMNFFKTEITLANGEIRKRPLIETNGETGEIVWDKGRDFATVRKVLSMPQVNIVKKTEVQTGGFSKESILPKRNSDKLIARKKDWDPKKYGGFDSPTVAYSVLVVAKVEKGKSKKLKSVKELLGITIMERSSFEKNPIDFLEAKGYKEVKKDLIIKLPKYSLFELENGRKRMLASAGELQKGNELALPSKYVNFLYLASHYEKLKGSPEDNEQKQLFVEQHKHYLDEIIEQISEFSKRVILADANLDKVLSAYNKHRDKPIREQAENIIHLFTLTNLGAPAAFKYFDTTIDRKRYTSTKEVLDATLIHQSITGLYETRIDLSQLGGDGGPAPAPAPAPAPGGTAPLEEEYRLFLEAPIQNVTLLEQWKREIPKVWAEINPPGLASTQAPIHVQLLSTALPVRVRQYPITLEAKRSLRETIRKFRAAGILRPVHSPWNTPLLPVRKSGTSEYRMVQDLREVNKRVETIHPTVPNPYTLLSLLPPDRIWYSVLDLKDAFFCIPLAPESQLIFAFEWADAEEGESGQLTWTRLPQGFKNSPTLFNEALNRDLQGFRLDHPSVSLLQYVDDLLIAADTQAACLSATRDLLMTLAELGYRVSGKKAQLCQEEVTYLGFKIHKGSRSLSNSRTQAILQIPVPKTKRQVREFLGKIGYCRLFIPGFAELAQPLYAATRPGNDPLVWGEKEEEAFQSLKLALTQPPALALPSLDKPFQLFVEETSGAAKGVLTQALGPWKRPVAYLSKRLDPVAAGWPRCLRAIAAAALLTREASKLTFGQDIEITSSHNLESLLRSPPDKWLTNARITQYQVLLLDPPRVRFKQTAALNPATLLPETDDTLPIHHCLDTLDSLTSTRPDLTDQPLAQAEATLFTDGSSYIRDGKRYAGAAVVTLDSVIWAEPLPIGTSAQKAELIALTKALEWSKDKSVNIYTDSRYAFATLHVHGMIYRERGWLTAGGKAIKNAPEILALLTAVWLPKRVAVMHCKGHQKDDAPTSTGNRRADEVAREVAIRPLSTQATISAGKRTADGSEFEKRTADGSEFESPKKKAKVE

SEQ ID NO: 6532 - protein, 2102 aa, synthetic construct
MPAAKRVKLDGGDKKYSIGLDIGTNSVGWAVITDEYKVPSKKFKVLGNTDRHSIKKNLIGALLFDSGETAEATRLKRTARRRYTRRKNRICYLQEIFSNEMAKVDDSFFHRLEESFLVEEDKKHERHPIFGNIVDEVAYHEKYPTIYHLRKKLVDSTDKADLRLIYLALAHMIKFRGHFLIEGDLNPDNSDVDKLFIQLVQTYNQLFEENPINASGVDAKAILSARLSKSRRLENLIAQLPGEKKNGLFGNLIALSLGLTPNFKSNFDLAEDAKLQLSKDTYDDDLDNLLAQIGDQYADLFLAAKNLSDAILLSDILRVNTEITKAPLSASMIKRYDEHHQDLTLLKALVRQQLPEKYKEIFFDQSKNGYAGYIDGGASQEEFYKFIKPILEKMDGTEELLVKLNREDLLRKQRTFDNGSIPHQIHLGELHAILRRQEDFYPFLKDNREKIEKILTFRIPYYVGPLARGNSRFAWMTRKSEETITPWNFEEVVDKGASAQSFIERMTNFDKNLPNEKVLPKHSLLYEYFTVYNELTKVKYVTEGMRKPAFLSGEQKKAIVDLLFKTNRKVTVKQLKEDYFKKIECFDSVEISGVEDRFNASLGTYHDLLKIIKDKDFLDNEENEDILEDIVLTLTLFEDREMIEERLKTYAHLFDDKVMKQLKRRRYTGWGRLSRKLINGIRDKQSGKTILDFLKSDGFANRNFMQLIHDDSLTFKEDIQKAQVSGQGDSLHEHIANLAGSPAIKKGILQTVKVVDELVKVMGRHKPENIVIEMARENQTTQKGQKNSRERMKRIEEGIKELGSQILKEHPVENTQLQNEKLYLYYLQNGRDMYVDQELDINRLSDYDVDHIVPQSFLKDDSIDNKVLTRSDKARGKSDNVPSEEVVKKMKNYWRQLLNAKLITQRKFDNLTKAERGGLSELDKAGFIKRQLVETRQITKHVAQILDSRMNTKYDENDKLIREVKVITLKSKLVSDFRKDFQFYKVREINNYHHAHDAYLNAVVGTALIKKYPKLESEFVYGDYKVYDVRKMIAKSEQEIGKATAKYFFYSNIMNFFKTEITLANGEIRKRPLIETNGETGEIVWDKGRDFATVRKVLSMPQVNIVKKTEVQTGGFSKESILPKRNSDKLIARKKDWDPKKYGGFDSPTVAYSVLVVAKVEKGKSKKLKSVKELLGITIMERSSFEKNPIDFLEAKGYKEVKKDLIIKLPKYSLFELENGRKRMLASAGELQKGNELALPSKYVNFLYLASHYEKLKGSPEDNEQKQLFVEQHKHYLDEIIEQISEFSKRVILADANLDKVLSAYNKHRDKPIREQAENIIHLFTLTNLGAPAAFKYFDTTIDRKRYTSTKEVLDATLIHQSITGLYETRIDLSQLGGDGGPAPAPAPAPAPGGTVSLQDEHRLFDIPVTTSLPDVWLQDFPQAWAETGGLGRAKCQAPIIIDLKPTAVPVSIKQYPMSLEAHMGIRQHIIKFLELGVLRPCRSPWNTPLLPVKKPGTQDYRPVQDLREINKRTVDIHPTVPNPYNLLSTLKPDYSWYTVLDLKDAFFCLPLAPQSQELFAFEWKDPERGISGQLTWTRLPQGFKNSPTLFNEALHRDLTDFRTQHPEVTLLQYVDDLLLAAPTKKACTQGTRHLLQELGEKGYRASAKKAQICQTKVTYLGYILSEGKRWLTPGRIETVARIPPPRNPREVREFLGTAGFCRLWIPGFAELAAPLYALTKPSTPFTWQTEHQLAFEALKKALLSAPALGLPDTSKPFTLFLDERQGIAKGVLTQKLGPWKRPVAYLSKKLDPVAAGWPPCLRIMAATAMLVKDSAKLTLGQPLTVITPHTLEAIVRQPPDRWITNARLTHYQALLLDTDRVQFGPPVTLNPATLLPVPENQPSPHDCRQVLAETHGTREDLKDQELPDADHTWYTDGSSYLDSGTRRAGAAVVDGHNTIWAQSLPPGTSAQKAELIALTKALELSKGKKANIYTDSRYAFATAHTHGSIYERRGWLTSEGKEIKNKAEIIALLKALFLPQEVAIIHCPGHQKGQDPVAVGNRQADRVARQAAMAEVLTLATEPDNTSHITAGKRTADGSEFEKRTADGSEFESPKKKAKVE

SEQ ID NO: 6533 - protein, 2173 aa, synthetic construct
MPAAKRVKLDGGDKKYSIGLDIGTNSVGWAVITDEYKVPSKKFKVLGNTDRHSIKKNLIGALLFDSGETAEATRLKRTARRRYTRRKNRICYLQEIFSNEMAKVDDSFFHRLEESFLVEEDKKHERHPIFGNIVDEVAYHEKYPTIYHLRKKLVDSTDKADLRLIYLALAHMIKFRGHFLIEGDLNPDNSDVDKLFIQLVQTYNQLFEENPINASGVDAKAILSARLSKSRRLENLIAQLPGEKKNGLFGNLIALSLGLTPNFKSNFDLAEDAKLQLSKDTYDDDLDNLLAQIGDQYADLFLAAKNLSDAILLSDILRVNTEITKAPLSASMIKRYDEHHQDLTLLKALVRQQLPEKYKEIFFDQSKNGYAGYIDGGASQEEFYKFIKPILEKMDGTEELLVKLNREDLLRKQRTFDNGSIPHQIHLGELHAILRRQEDFYPFLKDNREKIEKILTFRIPYYVGPLARGNSRFAWMTRKSEETITPWNFEEVVDKGASAQSFIERMTNFDKNLPNEKVLPKHSLLYEYFTVYNELTKVKYVTEGMRKPAFLSGEQKKAIVDLLFKTNRKVTVKQLKEDYFKKIECFDSVEISGVEDRFNASLGTYHDLLKIIKDKDFLDNEENEDILEDIVLTLTLFEDREMIEERLKTYAHLFDDKVMKQLKRRRYTGWGRLSRKLINGIRDKQSGKTILDFLKSDGFANRNFMQLIHDDSLTFKEDIQKAQVSGQGDSLHEHIANLAGSPAIKKGILQTVKVVDELVKVMGRHKPENIVIEMARENQTTQKGQKNSRERMKRIEEGIKELGSQILKEHPVENTQLQNEKLYLYYLQNGRDMYVDQELDINRLSDYDVDHIVPQSFLKDDSIDNKVLTRSDKARGKSDNVPSEEVVKKMKNYWRQLLNAKLITQRKFDNLTKAERGGLSELDKAGFIKRQLVETRQITKHVAQILDSRMNTKYDENDKLIREVKVITLKSKLVSDFRKDFQFYKVREINNYHHAHDAYLNAVVGTALIKKYPKLESEFVYGDYKVYDVRKMIAKSEQEIGKATAKYFFYSNIMNFFKTEITLANGEIRKRPLIETNGETGEIVWDKGRDFATVRKVLSMPQVNIVKKTEVQTGGFSKESILPKRNSDKLIARKKDWDPKKYGGFDSPTVAYSVLVVAKVEKGKSKKLKSVKELLGITIMERSSFEKNPIDFLEAKGYKEVKKDLIIKLPKYSLFELENGRKRMLASAGELQKGNELALPSKYVNFLYLASHYEKLKGSPEDNEQKQLFVEQHKHYLDEIIEQISEFSKRVILADANLDKVLSAYNKHRDKPIREQAENIIHLFTLTNLGAPAAFKYFDTTIDRKRYTSTKEVLDATLIHQSITGLYETRIDLSQLGGDGGPAPAPAPAPAPGGMDLLKPLTVERKGVKIKGYWNSQADITCVPKDLLQGEEPVRQQNVTTIHGTQEGDVYYVNLKIDGRRINTEVIGTTLDYAIITPGDVPWILKKPLELTIKLDLEEQQGTLLNNSILSKKGKEELKQLFEKYSALWQSWENQVGHRRIRPHKIATGTVKPTPQKQYHINPKAKPDIQIVINDLLKQGVLIQKESTMNTPVYPVPKPNGRWRMVLDYRAVNKVTPLIAVQNQHSYGILGSLFKGRYKTTIDLSNGFWAHPIVPEDYWITAFTWQGKQYCWTVLPQGFLNSPGLFTGDVVDLLQGIPNVEVYVDDVYISHDSEKEHLEYLDILFNRLKEAGYIISLKKSNIANSIVDFLGFQITNEGRGLTDTFKEKLENITAPTTLKQLQSILGLLNFARNFIPDFTELIAPLYALIPKSTKNYVPWQIEHSTTLETLITKLNGAEYLQGRKGDKTLIMKVNASYTTGYIRYYNEGEKKPISYVSIVFSKTELKFTELEKLLTTVHKGLLKALDLSMGQNIHVYSPIVSMQNIQKTPQTAKKALASRWLSWLSYLEDPRIRFFYDPQMPALKDLPAVDTGKDNKKHPSNFQHIFYTDGSAITSPTKEGHLNAGMGIVYFINKDGNLQKQQEWSISLGNHTAQFAEIAAFEFALKKCLPLGGNILVVTDSNYVAKAYNEELDVWASNGFVNNRKKPLKHISKWKSVADLKRLRPDVVVTHEPGHQKLDSSPHAYGNNLADQLATQASFKVHAGKRTADGSEFEKRTADGSEFESPKKKAKVE

SEQ ID NO: 6534 - protein, 2173 aa, synthetic construct
MPAAKRVKLDGGDKKYSIGLDIGTNSVGWAVITDEYKVPSKKFKVLGNTDRHSIKKNLIGALLFDSGETAEATRLKRTARRRYTRRKNRICYLQEIFSNEMAKVDDSFFHRLEESFLVEEDKKHERHPIFGNIVDEVAYHEKYPTIYHLRKKLVDSTDKADLRLIYLALAHMIKFRGHFLIEGDLNPDNSDVDKLFIQLVQTYNQLFEENPINASGVDAKAILSARLSKSRRLENLIAQLPGEKKNGLFGNLIALSLGLTPNFKSNFDLAEDAKLQLSKDTYDDDLDNLLAQIGDQYADLFLAAKNLSDAILLSDILRVNTEITKAPLSASMIKRYDEHHQDLTLLKALVRQQLPEKYKEIFFDQSKNGYAGYIDGGASQEEFYKFIKPILEKMDGTEELLVKLNREDLLRKQRTFDNGSIPHQIHLGELHAILRRQEDFYPFLKDNREKIEKILTFRIPYYVGPLARGNSRFAWMTRKSEETITPWNFEEVVDKGASAQSFIERMTNFDKNLPNEKVLPKHSLLYEYFTVYNELTKVKYVTEGMRKPAFLSGEQKKAIVDLLFKTNRKVTVKQLKEDYFKKIECFDSVEISGVEDRFNASLGTYHDLLKIIKDKDFLDNEENEDILEDIVLTLTLFEDREMIEERLKTYAHLFDDKVMKQLKRRRYTGWGRLSRKLINGIRDKQSGKTILDFLKSDGFANRNFMQLIHDDSLTFKEDIQKAQVSGQGDSLHEHIANLAGSPAIKKGILQTVKVVDELVKVMGRHKPENIVIEMARENQTTQKGQKNSRERMKRIEEGIKELGSQILKEHPVENTQLQNEKLYLYYLQNGRDMYVDQELDINRLSDYDVDHIVPQSFLKDDSIDNKVLTRSDKARGKSDNVPSEEVVKKMKNYWRQLLNAKLITQRKFDNLTKAERGGLSELDKAGFIKRQLVETRQITKHVAQILDSRMNTKYDENDKLIREVKVITLKSKLVSDFRKDFQFYKVREINNYHHAHDAYLNAVVGTALIKKYPKLESEFVYGDYKVYDVRKMIAKSEQEIGKATAKYFFYSNIMNFFKTEITLANGEIRKRPLIETNGETGEIVWDKGRDFATVRKVLSMPQVNIVKKTEVQTGGFSKESILPKRNSDKLIARKKDWDPKKYGGFDSPTVAYSVLVVAKVEKGKSKKLKSVKELLGITIMERSSFEKNPIDFLEAKGYKEVKKDLIIKLPKYSLFELENGRKRMLASAGELQKGNELALPSKYVNFLYLASHYEKLKGSPEDNEQKQLFVEQHKHYLDEIIEQISEFSKRVILADANLDKVLSAYNKHRDKPIREQAENIIHLFTLTNLGAPAAFKYFDTTIDRKRYTSTKEVLDATLIHQSITGLYETRIDLSQLGGDGGPAPAPAPAPAPGGMDLLKPLTVERKGVKIKGYWNSQADITCVPKDLLQGEEPVRQQNVTTIHGTQEGDVYYVNLKIDGRRINTEVIGTTLDYAIITPGDVPWILKKPLELTIKLDLEEQQGTLLNNSILSKKGKEELKQLFEKYSALWQSWENQVGHRRIRPHKIATGTVKPTPQKQYHINPKAKPDIQIVINDLLKQGVLIQKESTMNTPVYPVPKPNGRWRMVLDYRAVNKVTPLIAVQNQHSYGILGSLFKGRYKTTIDLSNGFWAHPIVPEDYWITAFTWQGKQYCWTVLPQGFLNSPGLFNGDVVDLLQGIPNVEVYVDDVYISHDSEKEHLEYLDILFNRLKEAGYIISLKKSNIANSIVDFLGFQITNEGRGLTDTFKEKLENITAPTTLKQLQSILGLLNFARNFIPDFTELIAPLYALIPKSPKNYVPWQIEHSTTLETLITKLNGAEYLQGRKGDKTLIMKVNASYTTGYIRYYNEGEKKPISYVSIVFSKTELKFTELEKLLTTVHKGLLKALDLSMGQNIHVYSPIVSMQNIQKTPQTAKKALASRWLSWLSYLEDPRIRFFYDPQMPALKDLPAVDTGKDNKKHPSNFQHIFYTDGSAITSPTKEGHLNAGMGIVYFINKDGNLQKQQEWSISLGNHTAQFAEIAAFEFALKKCLPLGGNILVVTDSNYVAKAYNEELDVWASNGFVNNRKKPLKHISKWKSVADLKRLRPDVVVTHEPGHQKLDSSPHAYGNNLADQLATQASFKVHAGKRTADGSEFEKRTADGSEFESPKKKAKVE

SEQ ID NO: 6535 - protein, 2095 aa, synthetic construct
MPAAKRVKLDGGDKKYSIGLDIGTNSVGWAVITDEYKVPSKKFKVLGNTDRHSIKKNLIGALLFDSGETAEATRLKRTARRRYTRRKNRICYLQEIFSNEMAKVDDSFFHRLEESFLVEEDKKHERHPIFGNIVDEVAYHEKYPTIYHLRKKLVDSTDKADLRLIYLALAHMIKFRGHFLIEGDLNPDNSDVDKLFIQLVQTYNQLFEENPINASGVDAKAILSARLSKSRRLENLIAQLPGEKKNGLFGNLIALSLGLTPNFKSNFDLAEDAKLQLSKDTYDDDLDNLLAQIGDQYADLFLAAKNLSDAILLSDILRVNTEITKAPLSASMIKRYDEHHQDLTLLKALVRQQLPEKYKEIFFDQSKNGYAGYIDGGASQEEFYKFIKPILEKMDGTEELLVKLNREDLLRKQRTFDNGSIPHQIHLGELHAILRRQEDFYPFLKDNREKIEKILTFRIPYYVGPLARGNSRFAWMTRKSEETITPWNFEEVVDKGASAQSFIERMTNFDKNLPNEKVLPKHSLLYEYFTVYNELTKVKYVTEGMRKPAFLSGEQKKAIVDLLFKTNRKVTVKQLKEDYFKKIECFDSVEISGVEDRFNASLGTYHDLLKIIKDKDFLDNEENEDILEDIVLTLTLFEDREMIEERLKTYAHLFDDKVMKQLKRRRYTGWGRLSRKLINGIRDKQSGKTILDFLKSDGFANRNFMQLIHDDSLTFKEDIQKAQVSGQGDSLHEHIANLAGSPAIKKGILQTVKVVDELVKVMGRHKPENIVIEMARENQTTQKGQKNSRERMKRIEEGIKELGSQILKEHPVENTQLQNEKLYLYYLQNGRDMYVDQELDINRLSDYDVDHIVPQSFLKDDSIDNKVLTRSDKARGKSDNVPSEEVVKKMKNYWRQLLNAKLITQRKFDNLTKAERGGLSELDKAGFIKRQLVETRQITKHVAQILDSRMNTKYDENDKLIREVKVITLKSKLVSDFRKDFQFYKVREINNYHHAHDAYLNAVVGTALIKKYPKLESEFVYGDYKVYDVRKMIAKSEQEIGKATAKYFFYSNIMNFFKTEITLANGEIRKRPLIETNGETGEIVWDKGRDFATVRKVLSMPQVNIVKKTEVQTGGFSKESILPKRNSDKLIARKKDWDPKKYGGFDSPTVAYSVLVVAKVEKGKSKKLKSVKELLGITIMERSSFEKNPIDFLEAKGYKEVKKDLIIKLPKYSLFELENGRKRMLASAGELQKGNELALPSKYVNFLYLASHYEKLKGSPEDNEQKQLFVEQHKHYLDEIIEQISEFSKRVILADANLDKVLSAYNKHRDKPIREQAENIIHLFTLTNLGAPAAFKYFDTTIDRKRYTSTKEVLDATLIHQSITGLYETRIDLSQLGGDGGPAPAPAPAPAPGGTLQLEEEYRLFEPESTQKQEMDIWLKNFPQAWAETGGMGTAHCQAPVLIQLKATATPISIRQYPMPHEAYQGIKPHIRRMLDQGILKPCQSPWNTPLLPVKKPGTEDYRPVQDLREVNKRVEDIHPTVPNPYNLLSTLPPSHPWYTVLDLKDAFFCLRLHSESQLLFAFEWRDPEIGLSGQLTWTRLPQGFKNSPTLFDEALHSDLADFRVRYPALVLLQYVDDLLLAAATRTECLEGTKALLETLGNKGYRASAKKAQICLQEVTYLGYSLKDGQRWLTKARKEAILSIPVPKNSRQVREFLGTAGYCRLWIPGFAELAAPLYPLTRPGTLFQWGTEQQLAFEDIKKALLSSPALGLPDITKPFELFIDENSGFAKGVLVQKLGPWKRPVAYLSKKLDTVASGWPPCLRMVAAIAILVKDAGKLTLGQPLTILTSHPVEALVRQPPNKWLSNARMTHYQAMLLDAERVHFGPTVSLNPATLLPLPSGGNHHDCLQILAETHGTRPDLTDQPLPDADLTWYTDGSSFIRNGEREAGAAVTTESEVIWAAPLPPGTSAQRAELIALTQALKMAEGKKLTVYTDSRYAFATTHVHGEIYRRRGLLTSEGKEIKNKNEILALLEALFLPKRLSIIHCPGHQKGDSPQAKGNRLADDTAKKAATETHSSLTVLPAGKRTADGSEFEKRTADGSEFESPKKKAKVE

SEQ ID NO: 6536 - protein, 2176 aa, synthetic construct
MPAAKRVKLDGGDKKYSIGLDIGTNSVGWAVITDEYKVPSKKFKVLGNTDRHSIKKNLIGALLFDSGETAEATRLKRTARRRYTRRKNRICYLQEIFSNEMAKVDDSFFHRLEESFLVEEDKKHERHPIFGNIVDEVAYHEKYPTIYHLRKKLVDSTDKADLRLIYLALAHMIKFRGHFLIEGDLNPDNSDVDKLFIQLVQTYNQLFEENPINASGVDAKAILSARLSKSRRLENLIAQLPGEKKNGLFGNLIALSLGLTPNFKSNFDLAEDAKLQLSKDTYDDDLDNLLAQIGDQYADLFLAAKNLSDAILLSDILRVNTEITKAPLSASMIKRYDEHHQDLTLLKALVRQQLPEKYKEIFFDQSKNGYAGYIDGGASQEEFYKFIKPILEKMDGTEELLVKLNREDLLRKQRTFDNGSIPHQIHLGELHAILRRQEDFYPFLKDNREKIEKILTFRIPYYVGPLARGNSRFAWMTRKSEETITPWNFEEVVDKGASAQSFIERMTNFDKNLPNEKVLPKHSLLYEYFTVYNELTKVKYVTEGMRKPAFLSGEQKKAIVDLLFKTNRKVTVKQLKEDYFKKIECFDSVEISGVEDRFNASLGTYHDLLKIIKDKDFLDNEENEDILEDIVLTLTLFEDREMIEERLKTYAHLFDDKVMKQLKRRRYTGWGRLSRKLINGIRDKQSGKTILDFLKSDGFANRNFMQLIHDDSLTFKEDIQKAQVSGQGDSLHEHIANLAGSPAIKKGILQTVKVVDELVKVMGRHKPENIVIEMARENQTTQKGQKNSRERMKRIEEGIKELGSQILKEHPVENTQLQNEKLYLYYLQNGRDMYVDQELDINRLSDYDVDHIVPQSFLKDDSIDNKVLTRSDKARGKSDNVPSEEVVKKMKNYWRQLLNAKLITQRKFDNLTKAERGGLSELDKAGFIKRQLVETRQITKHVAQILDSRMNTKYDENDKLIREVKVITLKSKLVSDFRKDFQFYKVREINNYHHAHDAYLNAVVGTALIKKYPKLESEFVYGDYKVYDVRKMIAKSEQEIGKATAKYFFYSNIMNFFKTEITLANGEIRKRPLIETNGETGEIVWDKGRDFATVRKVLSMPQVNIVKKTEVQTGGFSKESILPKRNSDKLIARKKDWDPKKYGGFDSPTVAYSVLVVAKVEKGKSKKLKSVKELLGITIMERSSFEKNPIDFLEAKGYKEVKKDLIIKLPKYSLFELENGRKRMLASAGELQKGNELALPSKYVNFLYLASHYEKLKGSPEDNEQKQLFVEQHKHYLDEIIEQISEFSKRVILADANLDKVLSAYNKHRDKPIREQAENIIHLFTLTNLGAPAAFKYFDTTIDRKRYTSTKEVLDATLIHQSITGLYETRIDLSQLGGDGGPAPAPAPAPAPGGMNPLQLLQPLPAEIKGTKLLAHWNSGATITCIPESFLEDEQPIKKTLIKTIHGEKQQNVYYVTFKVKGRKVEAEVIASPYEYILLSPTDVPWLTQQPLQLTILVPLQEYQEKILSKTALPEDQKQQLKTLFVKYDNLWQHWENQVGHRKIRPHNIATGDYPPRPQKQYPINPKAKPSIQIVIDDLLKQGVLTPQNSTMNTPVYPVPKPDGRWRMVLDYREVNKTIPLTAAQNQHSAGILATIVRQKYKTTLDLANGFWAHPITPESYWLTAFTWQGKQYCWTRLPQGFLNSPALFNADVVDLLKEIPNVQVYVDDIYLSHDDPKEHVQQLEKVFQILLQAGYVVSLKKSEIGQKTVEFLGFNITKEGRGLTDTFKTKLLNITPPKDLKQLQSILGLLNFARNFIPNFAELVQPLYNLIAPAKGKYIEWSEENTKQLNMVIEALNTASNLEERLPEQRLVIKVNTSPSAGYVRYYNETGKKPIMYLNYVFSKAELKFSMLEKLLTTMHKALIKAMDLAMGQEILVYSPIVSMTKIQKTPLPERKALPIRWITWMTYLEDPRIQFHYDKTLPELKHIPDVYTSSQSPVKHPSQYEGVFYTDGSAIKSPDPTKSNNAGMGIVHATYKPEYQVLNQWSIPLGNHTAQMAEIAAVEFACKKALKIPGPVLVITDSFYVAESANKELPYWKSNGFVNNKKKPLKHISKWKSIAECLSMKPDITIQHEKGISLQIPVFILKGNALADKLATQGSYVVNAGKRTADGSEFEKRTADGSEFESPKKKAKVE

SEQ ID NO: 6537 - protein, 2009 aa, synthetic construct
MPAAKRVKLDGGDKKYSIGLDIGTNSVGWAVITDEYKVPSKKFKVLGNTDRHSIKKNLIGALLFDSGETAEATRLKRTARRRYTRRKNRICYLQEIFSNEMAKVDDSFFHRLEESFLVEEDKKHERHPIFGNIVDEVAYHEKYPTIYHLRKKLVDSTDKADLRLIYLALAHMIKFRGHFLIEGDLNPDNSDVDKLFIQLVQTYNQLFEENPINASGVDAKAILSARLSKSRRLENLIAQLPGEKKNGLFGNLIALSLGLTPNFKSNFDLAEDAKLQLSKDTYDDDLDNLLAQIGDQYADLFLAAKNLSDAILLSDILRVNTEITKAPLSASMIKRYDEHHQDLTLLKALVRQQLPEKYKEIFFDQSKNGYAGYIDGGASQEEFYKFIKPILEKMDGTEELLVKLNREDLLRKQRTFDNGSIPHQIHLGELHAILRRQEDFYPFLKDNREKIEKILTFRIPYYVGPLARGNSRFAWMTRKSEETITPWNFEEVVDKGASAQSFIERMTNFDKNLPNEKVLPKHSLLYEYFTVYNELTKVKYVTEGMRKPAFLSGEQKKAIVDLLFKTNRKVTVKQLKEDYFKKIECFDSVEISGVEDRFNASLGTYHDLLKIIKDKDFLDNEENEDILEDIVLTLTLFEDREMIEERLKTYAHLFDDKVMKQLKRRRYTGWGRLSRKLINGIRDKQSGKTILDFLKSDGFANRNFMQLIHDDSLTFKEDIQKAQVSGQGDSLHEHIANLAGSPAIKKGILQTVKVVDELVKVMGRHKPENIVIEMARENQTTQKGQKNSRERMKRIEEGIKELGSQILKEHPVENTQLQNEKLYLYYLQNGRDMYVDQELDINRLSDYDVDHIVPQSFLKDDSIDNKVLTRSDKARGKSDNVPSEEVVKKMKNYWRQLLNAKLITQRKFDNLTKAERGGLSELDKAGFIKRQLVETRQITKHVAQILDSRMNTKYDENDKLIREVKVITLKSKLVSDFRKDFQFYKVREINNYHHAHDAYLNAVVGTALIKKYPKLESEFVYGDYKVYDVRKMIAKSEQEIGKATAKYFFYSNIMNFFKTEITLANGEIRKRPLIETNGETGEIVWDKGRDFATVRKVLSMPQVNIVKKTEVQTGGFSKESILPKRNSDKLIARKKDWDPKKYGGFDSPTVAYSVLVVAKVEKGKSKKLKSVKELLGITIMERSSFEKNPIDFLEAKGYKEVKKDLIIKLPKYSLFELENGRKRMLASAGELQKGNELALPSKYVNFLYLASHYEKLKGSPEDNEQKQLFVEQHKHYLDEIIEQISEFSKRVILADANLDKVLSAYNKHRDKPIREQAENIIHLFTLTNLGAPAAFKYFDTTIDRKRYTSTKEVLDATLIHQSITGLYETRIDLSQLGGDGGPAPAPAPAPAPGGGLEHLPPPPEVSQFPLNPERLQALTDLVSRALEAKHIEPYQGPGNNPIFPVKKPNGKWRFIHDLRATNSVTRDLASPSPGPPDLTSLPQGLPHLRTIDLTDAFFQIPLPTIFQPYFAFTLPQPNNYGPGTRYSWRVLPQGFKNSPTLFQQQLSHILTPVRKTFPNSLIIQYMDDILLASPAPGELAALTDKVTNALTKEGLPLSPEKTQATPGPIHFLGQVISQDCITYETLPSINVKSTWSLAELQSMLGELQWVSKGTPVLRSSLHQLYLALRGHRDPRDTIKLTSIQVQALRTIQKALTLNCRSRLVNQLPILALIMLRPTGTTAVLFQTKQKWPLVWLHTPHPATSLRPWGQLLANAVIILDKYSLQHYGQVCKSFHHNISNQALTYYLHTSDQSSVAILLQHSHRFHNLGAQPSGPWRSLLQMPQIFQNIDVLRPPFTISPVVINHAPCLFSDGSASKAAFIIWDRQVIHQQVLSLPSTCSAQAGELFGLLAGLQKSQPWVALNIFLDSKFLIGHLRRMAWGAFPGPSTQCELHTQLLPLLQGKTVYVHHVRSHTLLQDPISRLNEATDALMLAPLLPLAGKRTADGSEFEKRTADGSEFESPKKKAKVE

SEQ ID NO: 6538 - protein, 2127 aa, synthetic construct
MPAAKRVKLDGGDKKYSIGLDIGTNSVGWAVITDEYKVPSKKFKVLGNTDRHSIKKNLIGALLFDSGETAEATRLKRTARRRYTRRKNRICYLQEIFSNEMAKVDDSFFHRLEESFLVEEDKKHERHPIFGNIVDEVAYHEKYPTIYHLRKKLVDSTDKADLRLIYLALAHMIKFRGHFLIEGDLNPDNSDVDKLFIQLVQTYNQLFEENPINASGVDAKAILSARLSKSRRLENLIAQLPGEKKNGLFGNLIALSLGLTPNFKSNFDLAEDAKLQLSKDTYDDDLDNLLAQIGDQYADLFLAAKNLSDAILLSDILRVNTEITKAPLSASMIKRYDEHHQDLTLLKALVRQQLPEKYKEIFFDQSKNGYAGYIDGGASQEEFYKFIKPILEKMDGTEELLVKLNREDLLRKQRTFDNGSIPHQIHLGELHAILRRQEDFYPFLKDNREKIEKILTFRIPYYVGPLARGNSRFAWMTRKSEETITPWNFEEVVDKGASAQSFIERMTNFDKNLPNEKVLPKHSLLYEYFTVYNELTKVKYVTEGMRKPAFLSGEQKKAIVDLLFKTNRKVTVKQLKEDYFKKIECFDSVEISGVEDRFNASLGTYHDLLKIIKDKDFLDNEENEDILEDIVLTLTLFEDREMIEERLKTYAHLFDDKVMKQLKRRRYTGWGRLSRKLINGIRDKQSGKTILDFLKSDGFANRNFMQLIHDDSLTFKEDIQKAQVSGQGDSLHEHIANLAGSPAIKKGILQTVKVVDELVKVMGRHKPENIVIEMARENQTTQKGQKNSRERMKRIEEGIKELGSQILKEHPVENTQLQNEKLYLYYLQNGRDMYVDQELDINRLSDYDVDHIVPQSFLKDDSIDNKVLTRSDKARGKSDNVPSEEVVKKMKNYWRQLLNAKLITQRKFDNLTKAERGGLSELDKAGFIKRQLVETRQITKHVAQILDSRMNTKYDENDKLIREVKVITLKSKLVSDFRKDFQFYKVREINNYHHAHDAYLNAVVGTALIKKYPKLESEFVYGDYKVYDVRKMIAKSEQEIGKATAKYFFYSNIMNFFKTEITLANGEIRKRPLIETNGETGEIVWDKGRDFATVRKVLSMPQVNIVKKTEVQTGGFSKESILPKRNSDKLIARKKDWDPKKYGGFDSPTVAYSVLVVAKVEKGKSKKLKSVKELLGITIMERSSFEKNPIDFLEAKGYKEVKKDLIIKLPKYSLFELENGRKRMLASAGELQKGNELALPSKYVNFLYLASHYEKLKGSPEDNEQKQLFVEQHKHYLDEIIEQISEFSKRVILADANLDKVLSAYNKHRDKPIREQAENIIHLFTLTNLGAPAAFKYFDTTIDRKRYTSTKEVLDATLIHQSITGLYETRIDLSQLGGDGGPAPAPAPAPAPGGLLGRDLLTKLKAQIQFSTEGPQVTWEDRPAMCLVLNLEEEYRLHEKPVPPSIDPSWLQLFPMVWAEKAGMGLANQVPPVVVELKSDASPVAVRQYPMSKEAREGIRPHIQRFLDLGILVPCQSPWNTPLLPVKKPGTNDYRPVQDLREVNKRVQDIHPTVPNPYNLLSSLPPSHTWYSVLDLKDAFFCLKLHPNSQPLFAFEWRDPEKGNTGQLTWTRLPQGFKNSPTLFDEALHRDLASFRALNPQVVMLQYVDDLLVAAPTYRDCKEGTRRLLQELSKLGYRVSAKKAQLCREEVTYLGYLLKGGKRWLTPARKATVMKIPTPTTPRQVREFLGTAGFCRLWIPGFASLAAPLYPLTREKVPFTWTEAHQEAFGRIKEALLSAPALALPDLTKPFALYVDEKEGVARGVLTQTLGPWRRPVAYLSKKLDPVASGWPTCLKAIAAVALLLKDADKLTLGQNVLVIAPHNLESIVRQPPDRWMTNARMTHYQSLLLNERVSFAPPAILNPATLLPVESDDTPIHICSEILAEETGTRPDLRDQPLPGVPAWYTDGSSFIMDGRRQAGAAIVDNKRTVWASNLPEGTSAQKAELIALTQALRLAEGKSINIYTDSRYAFATAHVHGAIYKQRGLLTSAGKDIKNKEEILALLEAIHLPKRVAIIHCPGHQRGTDPVATGNRKADEAAKQAAQSTRILTETTKNAGKRTADGSEFEKRTADGSEFESPKKKAKVE

SEQ ID NO: 6539 - protein, 2218 aa, synthetic construct
MPAAKRVKLDGGDKKYSIGLDIGTNSVGWAVITDEYKVPSKKFKVLGNTDRHSIKKNLIGALLFDSGETAEATRLKRTARRRYTRRKNRICYLQEIFSNEMAKVDDSFFHRLEESFLVEEDKKHERHPIFGNIVDEVAYHEKYPTIYHLRKKLVDSTDKADLRLIYLALAHMIKFRGHFLIEGDLNPDNSDVDKLFIQLVQTYNQLFEENPINASGVDAKAILSARLSKSRRLENLIAQLPGEKKNGLFGNLIALSLGLTPNFKSNFDLAEDAKLQLSKDTYDDDLDNLLAQIGDQYADLFLAAKNLSDAILLSDILRVNTEITKAPLSASMIKRYDEHHQDLTLLKALVRQQLPEKYKEIFFDQSKNGYAGYIDGGASQEEFYKFIKPILEKMDGTEELLVKLNREDLLRKQRTFDNGSIPHQIHLGELHAILRRQEDFYPFLKDNREKIEKILTFRIPYYVGPLARGNSRFAWMTRKSEETITPWNFEEVVDKGASAQSFIERMTNFDKNLPNEKVLPKHSLLYEYFTVYNELTKVKYVTEGMRKPAFLSGEQKKAIVDLLFKTNRKVTVKQLKEDYFKKIECFDSVEISGVEDRFNASLGTYHDLLKIIKDKDFLDNEENEDILEDIVLTLTLFEDREMIEERLKTYAHLFDDKVMKQLKRRRYTGWGRLSRKLINGIRDKQSGKTILDFLKSDGFANRNFMQLIHDDSLTFKEDIQKAQVSGQGDSLHEHIANLAGSPAIKKGILQTVKVVDELVKVMGRHKPENIVIEMARENQTTQKGQKNSRERMKRIEEGIKELGSQILKEHPVENTQLQNEKLYLYYLQNGRDMYVDQELDINRLSDYDVDHIVPQSFLKDDSIDNKVLTRSDKARGKSDNVPSEEVVKKMKNYWRQLLNAKLITQRKFDNLTKAERGGLSELDKAGFIKRQLVETRQITKHVAQILDSRMNTKYDENDKLIREVKVITLKSKLVSDFRKDFQFYKVREINNYHHAHDAYLNAVVGTALIKKYPKLESEFVYGDYKVYDVRKMIAKSEQEIGKATAKYFFYSNIMNFFKTEITLANGEIRKRPLIETNGETGEIVWDKGRDFATVRKVLSMPQVNIVKKTEVQTGGFSKESILPKRNSDKLIARKKDWDPKKYGGFDSPTVAYSVLVVAKVEKGKSKKLKSVKELLGITIMERSSFEKNPIDFLEAKGYKEVKKDLIIKLPKYSLFELENGRKRMLASAGELQKGNELALPSKYVNFLYLASHYEKLKGSPEDNEQKQLFVEQHKHYLDEIIEQISEFSKRVILADANLDKVLSAYNKHRDKPIREQAENIIHLFTLTNLGAPAAFKYFDTTIDRKRYTSTKEVLDATLIHQSITGLYETRIDLSQLGGDGGPAPAPAPAPAPGGTLGDQGSRGSDPLPEPRVTLTVEGIPTEFLVNTGAEHSVLTKPMGKMGSKRTVVAGATGSKVYPWTTKRLLKIGQKQVTHSFLVIPECPAPLLGRDLLTKLKAQIQFSTEGPQVTWEDRPAMCLVLNLEEEYRLHEKPVPPSIDPSWLQLFPMVWAEKAGMGLANQVPPVVVELKSDASPVAVRQYPMSKEAREGIRPHIQRFLDLGILVPCQSPWNTPLLPVKKPGTNDYRPVQDLREVNKRVQDIHPTVPNPYNLLSSLPPSHTWYSVLDLKDAFFCLKLHPNSQPLFAFEWRDPEKGNTGQLTWTRLPQGFKNSPTLFNEALHRDLASFRALNPQVVMLQYVDDLLVAAPTYRDCKEGTRRLLQELSKLGYRVSAKKAQLCREEVTYLGYLLKGGKRWLTPARKATVMKIPTPTTPRQVREFLGTAGFCRLWIPGFASLAAPLYPLTRPKVPFTWTEAHQEAFGRIKEALLSAPALALPDLTKPFALYVDEKEGVARGVLTQTLGPWRRPVAYLSKKLDPVASGWPTCLKAIAAVALLLKDADKLTLGQNVLVIAPHNLESIVRQPPDRWMTNARMTHYQSLLLNERVSFAPPAILNPATLLPVESDDTPIHICSEILAEETGTRPDLRDQPLPGVPAWYTDGSSFIMDGRRQAGAAIVDNKRTVWASNLPEGTSAQKAELIALTQALRLAEGKSINIYTDSRYAFATAHVHGAIYKQRGWLTSAGKDIKNKEEILALLEAIHLPKRVAIIHCPGHQRGTDPVATGNRKADEAAKQAAQSTRILTETTKNAGKRTADGSEFEKRTADGSEFESPKKKAKVE

SEQ ID NO: 6540 - protein, 2096 aa, synthetic construct
MPAAKRVKLDGGDKKYSIGLDIGTNSVGWAVITDEYKVPSKKFKVLGNTDRHSIKKNLIGALLFDSGETAEATRLKRTARRRYTRRKNRICYLQEIFSNEMAKVDDSFFHRLEESFLVEEDKKHERHPIFGNIVDEVAYHEKYPTIYHLRKKLVDSTDKADLRLIYLALAHMIKFRGHFLIEGDLNPDNSDVDKLFIQLVQTYNQLFEENPINASGVDAKAILSARLSKSRRLENLIAQLPGEKKNGLFGNLIALSLGLTPNFKSNFDLAEDAKLQLSKDTYDDDLDNLLAQIGDQYADLFLAAKNLSDAILLSDILRVNTEITKAPLSASMIKRYDEHHQDLTLLKALVRQQLPEKYKEIFFDQSKNGYAGYIDGGASQEEFYKFIKPILEKMDGTEELLVKLNREDLLRKQRTFDNGSIPHQIHLGELHAILRRQEDFYPFLKDNREKIEKILTFRIPYYVGPLARGNSRFAWMTRKSEETITPWNFEEVVDKGASAQSFIERMTNFDKNLPNEKVLPKHSLLYEYFTVYNELTKVKYVTEGMRKPAFLSGEQKKAIVDLLFKTNRKVTVKQLKEDYFKKIECFDSVEISGVEDRFNASLGTYHDLLKIIKDKDFLDNEENEDILEDIVLTLTLFEDREMIEERLKTYAHLFDDKVMKQLKRRRYTGWGRLSRKLINGIRDKQSGKTILDFLKSDGFANRNFMQLIHDDSLTFKEDIQKAQVSGQGDSLHEHIANLAGSPAIKKGILQTVKVVDELVKVMGRHKPENIVIEMARENQTTQKGQKNSRERMKRIEEGIKELGSQILKEHPVENTQLQNEKLYLYYLQNGRDMYVDQELDINRLSDYDVDHIVPQSFLKDDSIDNKVLTRSDKARGKSDNVPSEEVVKKMKNYWRQLLNAKLITQRKFDNLTKAERGGLSELDKAGFIKRQLVETRQITKHVAQILDSRMNTKYDENDKLIREVKVITLKSKLVSDFRKDFQFYKVREINNYHHAHDAYLNAVVGTALIKKYPKLESEFVYGDYKVYDVRKMIAKSEQEIGKATAKYFFYSNIMNFFKTEITLANGEIRKRPLIETNGETGEIVWDKGRDFATVRKVLSMPQVNIVKKTEVQTGGFSKESILPKRNSDKLIARKKDWDPKKYGGFDSPTVAYSVLVVAKVEKGKSKKLKSVKELLGITIMERSSFEKNPIDFLEAKGYKEVKKDLIIKLPKYSLFELENGRKRMLASAGELQKGNELALPSKYVNFLYLASHYEKLKGSPEDNEQKQLFVEQHKHYLDEIIEQISEFSKRVILADANLDKVLSAYNKHRDKPIREQAENIIHLFTLTNLGAPAAFKYFDTTIDRKRYTSTKEVLDATLIHQSITGLYETRIDLSQLGGDGGPAPAPAPAPAPGGLGIEDEYRLHETSTEPDVSLGSTWLSDFPQAWAETGGMGLAVRQAPLIIPLKATSTPVSIQQYPMSHEARLGIKPHIQRLLDQGILVPCQSPWNTPLLPVKKPGTNDYRPVQDLREVNKRVEDIHPTVPNPYNLLSGLPPSHQWYTVLDLKDAFFCLRLHPTSQPLFAFEWRDPGMGISGQLTWTRLPQGFKNSPTLFNEALHRDLADFRIQHPDLILLQYVDDILLAATSELDCQQGTRALLQTLGDLGYRASAKKAQICQKQVKYLGYLLREGQRWLTEARKETVMGQPVPKTPRQLREFLGKAGFCRLFIPGFAEMAAPLYPLTKPGTLFSWGPDQQKAYQEIKQALLTAPALGLPDLTKPFELFVDEKQGYAKGVLTQKLGPWRRPVAYLSKKLDPVAAGWPPCLRMVAAIAVLTKDAGKLTMGQPLVILAPHAVEALVKQPPDRWLSNARMTHYQAMLLDTDRVQFGPVVALNPATLLPLPEEGAPHDCLEILAETHGTRPDLTDQPIPDADHTWYTDGSSFLQEGQRKAGAAVTTETEVIWAGALPAGTSAQRAELIALTQALKMAEGKRLNVYTDSRYAFATAHIHGEIYRRRGWLTSEGREIKNKSEILALLKALFLPKRLSIIHCLGHQKGDSAEARGNRLADQAAREAAIKTPPDTSTLLIAGKRTADGSEFEKRTADGSEFESPKKKAKVE

SEQ ID NO: 6541 - protein, 2096 aa, synthetic construct
MPAAKRVKLDGGDKKYSIGLDIGTNSVGWAVITDEYKVPSKKFKVLGNTDRHSIKKNLIGALLFDSGETAEATRLKRTARRRYTRRKNRICYLQEIFSNEMAKVDDSFFHRLEESFLVEEDKKHERHPIFGNIVDEVAYHEKYPTIYHLRKKLVDSTDKADLRLIYLALAHMIKFRGHFLIEGDLNPDNSDVDKLFIQLVQTYNQLFEENPINASGVDAKAILSARLSKSRRLENLIAQLPGEKKNGLFGNLIALSLGLTPNFKSNFDLAEDAKLQLSKDTYDDDLDNLLAQIGDQYADLFLAAKNLSDAILLSDILRVNTEITKAPLSASMIKRYDEHHQDLTLLKALVRQQLPEKYKEIFFDQSKNGYAGYIDGGASQEEFYKFIKPILEKMDGTEELLVKLNREDLLRKQRTFDNGSIPHQIHLGELHAILRRQEDFYPFLKDNREKIEKILTFRIPYYVGPLARGNSRFAWMTRKSEETITPWNFEEVVDKGASAQSFIERMTNFDKNLPNEKVLPKHSLLYEYFTVYNELTKVKYVTEGMRKPAFLSGEQKKAIVDLLFKTNRKVTVKQLKEDYFKKIECFDSVEISGVEDRFNASLGTYHDLLKIIKDKDFLDNEENEDILEDIVLTLTLFEDREMIEERLKTYAHLFDDKVMKQLKRRRYTGWGRLSRKLINGIRDKQSGKTILDFLKSDGFANRNFMQLIHDDSLTFKEDIQKAQVSGQGDSLHEHIANLAGSPAIKKGILQTVKVVDELVKVMGRHKPENIVIEMARENQTTQKGQKNSRERMKRIEEGIKELGSQILKEHPVENTQLQNEKLYLYYLQNGRDMYVDQELDINRLSDYDVDHIVPQSFLKDDSIDNKVLTRSDKARGKSDNVPSEEVVKKMKNYWRQLLNAKLITQRKFDNLTKAERGGLSELDKAGFIKRQLVETRQITKHVAQILDSRMNTKYDENDKLIREVKVITLKSKLVSDFRKDFQFYKVREINNYHHAHDAYLNAVVGTALIKKYPKLESEFVYGDYKVYDVRKMIAKSEQEIGKATAKYFFYSNIMNFFKTEITLANGEIRKRPLIETNGETGEIVWDKGRDFATVRKVLSMPQVNIVKKTEVQTGGFSKESILPKRNSDKLIARKKDWDPKKYGGFDSPTVAYSVLVVAKVEKGKSKKLKSVKELLGITIMERSSFEKNPIDFLEAKGYKEVKKDLIIKLPKYSLFELENGRKRMLASAGELQKGNELALPSKYVNFLYLASHYEKLKGSPEDNEQKQLFVEQHKHYLDEIIEQISEFSKRVILADANLDKVLSAYNKHRDKPIREQAENIIHLFTLTNLGAPAAFKYFDTTIDRKRYTSTKEVLDATLIHQSITGLYETRIDLSQLGGDGGPAPAPAPAPAPGGTLGIEDEYRLHETSTEPDVSLGSTWLSDFPQAWAETGGMGLAVRQAPLIIPLKATSTPVSIQQYPMSHEARLGIKPHIQRLLDQGILVPCQSPWNTPLLPVKKPGTNDYRPVQDLREVNKRVEDIHPTVPNPYNLLSGLPPSHQWYTVLDLKDAFFCLRLHPTSQPLFAFEWRDPGMGISGQLTWTRLPQGFKNSPTLFDEALHRDLADFRIQHPDLILLQYVDDILLAATSELDCQQGTRALLQTLGDLGYRASAKKAQICQKQVKYLGYLLREGQRWLTEARKETVMGQPVPKTPRQLREFLGTAGFCRLWIPGFAEMAAPLYPLTKTGTLFSWGPDQQKAYQEIKQALLTAPALGLPDLTKPFELFVDEKQGYAKGVLTQKLGPWRRPVAYLSKKLDPVAAGWPPCLRMVAAIAVLTKDAGKLTMGQPLVILAPHAVEALVKQPPDRWLSNARMTHYQAMLLDTDRVQFGPVVALNPATLLPLPEEGAPHDCLEILAETHGTRPDLTDQPIPDADHTWYTDGSSFLQEGQRKAGAAVTTETEVIWAGALPAGTSAQRAELIALTQALKMAEGKRLNVYTDSRYAFATAHIHGEIYRRRGLLTSEGREIKNKSEILALLKALFLPKRLSIIHCLGHQKGDSAEARGNRLADQAAREAAIKTPPDTSTLLAGKRTADGSEFEKRTADGSEFESPKKKAKVE

SEQ ID NO: 6542 - protein, 2096 aa, synthetic construct; identical to SEQ ID NO: 6540

SEQ ID NO: 6543 - protein, 2096 aa, synthetic construct
MPAAKRVKLDGGDKKYSIGLDIGTNSVGWAVITDEYKVPSKKFKVLGNTDRHSIKKNLIGALLFDSGETAEATRLKRTARRRYTRRKNRICYLQEIFSNEMAKVDDSFFHRLEESFLVEEDKKHERHPIFGNIVDEVAYHEKYPTIYHLRKKLVDSTDKADLRLIYLALAHMIKFRGHFLIEGDLNPDNSDVDKLFIQLVQTYNQLFEENPINASGVDAKAILSARLSKSRRLENLIAQLPGEKKNGLFGNLIALSLGLTPNFKSNFDLAEDAKLQLSKDTYDDDLDNLLAQIGDQYADLFLAAKNLSDAILLSDILRVNTEITKAPLSASMIKRYDEHHQDLTLLKALVRQQLPEKYKEIFFDQSKNGYAGYIDGGASQEEFYKFIKPILEKMDGTEELLVKLNREDLLRKQRTFDNGSIPHQIHLGELHAILRRQEDFYPFLKDNREKIEKILTFRIPYYVGPLARGNSRFAWMTRKSEETITPWNFEEVVDKGASAQSFIERMTNFDKNLPNEKVLPKHSLLYEYFTVYNELTKVKYVTEGMRKPAFLSGEQKKAIVDLLFKTNRKVTVKQLKEDYFKKIECFDSVEISGVEDRFNASLGTYHDLLKIIKDKDFLDNEENEDILEDIVLTLTLFEDREMIEERLKTYAHLFDDKVMKQLKRRRYTGWGRLSRKLINGIRDKQSGKTILDFLKSDGFANRNFMQLIHDDSLTFKEDIQKAQVSGQGDSLHEHIANLAGSPAIKKGILQTVKVVDELVKVMGRHKPENIVIEMARENQTTQKGQKNSRERMKRIEEGIKELGSQILKEHPVENTQLQNEKLYLYYLQNGRDMYVDQELDINRLSDYDVDHIVPQSFLKDDSIDNKVLTRSDKARGKSDNVPSEEVVKKMKNYWRQLLNAKLITQRKFDNLTKAERGGLSELDKAGFIKRQLVETRQITKHVAQILDSRMNTKYDENDKLIREVKVITLKSKLVSDFRKDFQFYKVREINNYHHAHDAYLNAVVGTALIKKYPKLESEFVYGDYKVYDVRKMIAKSEQEIGKATAKYFFYSNIMNFFKTEITLANGEIRKRPLIETNGETGEIVWDKGRDFATVRKVLSMPQVNIVKKTEVQTGGFSKESILPKRNSDKLIARKKDWDPKKYGGFDSPTVAYSVLVVAKVEKGKSKKLKSVKELLGITIMERSSFEKNPIDFLEAKGYKEVKKDLIIKLPKYSLFELENGRKRMLASAGELQKGNELALPSKYVNFLYLASHYEKLKGSPEDNEQKQLFVEQHKHYLDEIIEQISEFSKRVILADANLDKVLSAYNKHRDKPIREQAENIIHLFTLTNLGAPAAFKYFDTTIDRKRYTSTKEVLDATLIHQSITGLYETRIDLSQLGGDGGPAPAPAPAPAPGGTLNIEDEYRLHETSKGPDVPLGSTWLSDFPQAWAETGGMGLAVRQAPLIIPLKATSTPVSIKQYPMSQEARLGIKPHIQRLLDQGILVPCQSPWNTPLLPVKKPGTNDYRPVQDLREVNKRVEDIHPTVPNPYNLLSGLPPSHQWYTVLDLKDAFFCLRLHPTSQSLFAFEWRDPEMGISGQLTWTRLPQGFKNSPTLFNEALHRDLADFRIQHPDLILLQYVDDLLLAATSELDCQQGTRALLQTLGDLGYRASAKKAQICQKQVKYLGYLLKEGQRWLTEARKETVMGQPTPKTPRQLREFLGTAGFCRLWIPGFAEMAAPLYPLTKPGTLFEWGPDQQKAYQEIKQALLTAPALGLPDLTKPFELFVDEKQGYAKGVLTQKLGPWRRPVAYLSKKLDPVAAGWPPCLRMVAAIAVLTKDAGKLTMGQPLVILAPHAVEALVKQPPDRWLSNARMTHYQALLLDTDRVQFGPIVALNPATLLPLPEEGLQHDCLDILAEAHGTRPDLTDQPLPDADHTWYTDGSSFLQEGQRKAGAAVTTETEVVWAKALPAGTSAQRAELIALTQALKMAEGKKLNVYTDSRYAFATAHIHGEIYRRRGWLTSEGKEIKNKDEILALLKALFLPKRLSIIHCPGHQKGNRAEARGNRMADQAAREVATRETPETSTLLAGKRTADGSEFEKRTADGSEFESPKKKAKVE

SEQ ID NO: 6544 - protein, 2090 aa, synthetic construct
MPAAKRVKLDGGDKKYSIGLDIGTNSVGWAVITDEYKVPSKKFKVLGNTDRHSIKKNLIGALLFDSGETAEATRLKRTARRRYTRRKNRICYLQEIFSNEMAKVDDSFFHRLEESFLVEEDKKHERHPIFGNIVDEVAYHEKYPTIYHLRKKLVDSTDKADLRLIYLALAHMIKFRGHFLIEGDLNPDNSDVDKLFIQLVQTYNQLFEENPINASGVDAKAILSARLSKSRRLENLIAQLPGEKKNGLFGNLIALSLGLTPNFKSNFDLAEDAKLQLSKDTYDDDLDNLLAQIGDQYADLFLAAKNLSDAILLSDILRVNTEITKAPLSASMIKRYDEHHQDLTLLKALVRQQLPEKYKEIFFDQSKNGYAGYIDGGASQEEFYKFIKPILEKMDGTEELLVKLNREDLLRKQRTFDNGSIPHQIHLGELHAILRRQEDFYPFLKDNREKIEKILTFRIPYYVGPLARGNSRFAWMTRKSEETITPWNFEEVVDKGASAQSFIERMTNFDKNLPNEKVLPKHSLLYEYFTVYNELTKVKYVTEGMRKPAFLSGEQKKAIVDLLFKTNRKVTVKQLKEDYFKKIECFDSVEISGVEDRFNASLGTYHDLLKIIKDKDFLDNEENEDILEDIVLTLTLFEDREMIEERLKTYAHLFDDKVMKQLKRRRYTGWGRLSRKLINGIRDKQSGKTILDFLKSDGFANRNFMQLIHDDSLTFKEDIQKAQVSGQGDSLHEHIANLAGSPAIKKGILQTVKVVDELVKVMGRHKPENIVIEMARENQTTQKGQKNSRERMKRIEEGIKELGSQILKEHPVENTQLQNEKLYLYYLQNGRDMYVDQELDINRLSDYDVDHIVPQSFLKDDSIDNKVLTRSDKARGKSDNVPSEEVVKKMKNYWRQLLNAKLITQRKFDNLTKAERGGLSELDKAGFIKRQLVETRQITKHVAQILDSRMNTKYDENDKLIREVKVITLKSKLVSDFRKDFQFYKVREINNYHHAHDAYLNAVVGTALIKKYPKLESEFVYGDYKVYDVRKMIAKSEQEIGKATAKYFFYSNIMNFFKTEITLANGEIRKRPLIETNGETGEIVWDKGRDFATVRKVLSMPQVNIVKKTEVQTGGFSKESILPKRNSDKLIARKKDWDPKKYGGFDSPTVAYSVLVVAKVEKGKSKKLKSVKELLGITIMERSSFEKNPIDFLEAKGYKEVKKDLIIKLPKYSLFELENGRKRMLASAGELQKGNELALPSKYVNFLYLASHYEKLKGSPEDNEQKQLFVEQHKHYLDEIIEQISEFSKRVILADANLDKVLSAYNKHRDKPIREQAENIIHLFTLTNLGAPAAFKYFDTTIDRKRYTSTKEVLDATLIHQSITGLYETRIDLSQLGGDGGPAPAPAPAPAPGGTLQLDDEYRLYSPLVKPDQNIQFWLEQFPQAWAETAGMGLAKQVPPQVIQLKASATPVSVRQYPLSKEAQEGIRPHVQRLIQQGILVPVQSPWNTPLLPVRKPGTNDYRPVQDLREVNKRVQDIHPTVPNPYNLLCALPPQRSWYTVLDLKDAFFCLRLHPTSQPLFAFEWRDPGTGRTGQLTWTRLPQGFKNSPTIFDEALHRDLANFRIQHPQVTLLQYVDDLLLAGATKQDCLEGTKALLLELSDLGYRASAKKAQICRREVTYLGYSLRDGQRWLTEARKKTVVQIPAPTTAKQVREFLGTAGFCRLWIPGFATLAAPLYPLTKEKGEFSWAPEHQKAFDAIKKALLSAPALALPDVTKPFTLYVDERKGVARGVLTQTLGPWRRPVAYLSKKLDPVASGWPVCLKAIAAVAILVKDADKLTLGQNITVIAPHALENIVRQPPDRWMTNARMTHYQSLLLTERVTFAPPAALNPATLLPEETDEPVTHDCHQLLIEETGVRKDLTDIPLTGEVLTWFTDGSSYVVEGKRMAGAAVVDGTRTIWASSLPEGTSAQKAELMALTQALRLAEGKSINIYTDSRYAFATAHVHGAIYKQRGLLTSAGREIKNKEEILSLLEALHLPKRLAIIHCPGHQKAKDPISRGNQMADRVAKQAAQGVNLLAGKRTADGSEFEKRTADGSEFESPKKKAKVE

SEQ ID NO: 6545 - protein, 2090 aa, synthetic construct; identical to SEQ ID NO: 6544

SEQ ID NO: 6546 - protein, 2087 aa, synthetic construct
MPAAKRVKLDGGDKKYSIGLDIGTNSVGWAVITDEYKVPSKKFKVLGNTDRHSIKKNLIGALLFDSGETAEATRLKRTARRRYTRRKNRICYLQEIFSNEMAKVDDSFFHRLEESFLVEEDKKHERHPIFGNIVDEVAYHEKYPTIYHLRKKLVDSTDKADLRLIYLALAHMIKFRGHFLIEGDLNPDNSDVDKLFIQLVQTYNQLFEENPINASGVDAKAILSARLSKSRRLENLIAQLPGEKKNGLFGNLIALSLGLTPNFKSNFDLAEDAKLQLSKDTYDDDLDNLLAQIGDQYADLFLAAKNLSDAILLSDILRVNTEITKAPLSASMIKRYDEHHQDLTLLKALVRQQLPEKYKEIFFDQSKNGYAGYIDGGASQEEFYKFIKPILEKMDGTEELLVKLNREDLLRKQRTFDNGSIPHQIHLGELHAILRRQEDFYPFLKDNREKIEKILTFRIPYYVGPLARGNSRFAWMTRKSEETITPWNFEEVVDKGASAQSFIERMTNFDKNLPNEKVLPKHSLLYEYFTVYNELTKVKYVTEGMRKPAFLSGEQKKAIVDLLFKTNRKVTVKQLKEDYFKKIECFDSVEISGVEDRFNASLGTYHDLLKIIKDKDFLDNEENEDILEDIVLTLTLFEDREMIEERLKTYAHLFDDKVMKQLKRRRYTGWGRLSRKLINGIRDKQSGKTILDFLKSDGFANRNFMQLIHDDSLTFKEDIQKAQVSGQGDSLHEHIANLAGSPAIKKGILQTVKVVDELVKVMGRHKPENIVIEMARENQTTQKGQKNSRERMKRIEEGIKELGSQILKEHPVENTQLQNEKLYLYYLQNGRDMYVDQELDINRLSDYDVDHIVPQSFLKDDSIDNKVLTRSDKARGKSDNVPSEEVVKKMKNYWRQLLNAKLITQRKFDNLTKAERGGLSELDKAGFIKRQLVETRQITKHVAQILDSRMNTKYDENDKLIREVKVITLKSKLVSDFRKDFQFYKVREINNYHHAHDAYLNAVVGTALIKKYPKLESEFVYGDYKVYDVRKMIAKSEQEIGKATAKYFFYSNIMNFFKTEITLANGEIRKRPLIETNGETGEIVWDKGRDFATVRKVLSMPQVNIVKKTEVQTGGFSKESILPKRNSDKLIARKKDWDPKKYGGFDSPTVAYSVLVVAKVEKGKSKKLKSVKELLGITIMERSSFEKNPIDFLEAKGYKEVKKDLIIKLPKYSLFELENGRKRMLASAGELQKGNELALPSKYVNFLYLASHYEKLKGSPEDNEQKQLFVEQHKHYLDEIIEQISEFSKRVILADANLDKVLSAYNKHRDKPIREQAENIIHLFTLTNLGAPAAFKYFDTTIDRKRYTSTKEVLDATLIHQSITGLYETRIDLSQLGGDGGPAPAPAPAPAPGGVPWLMKKPLQLTVLVPLHEYQERLLQQTALPKEQKELLQKLFLKYDALWQHWENQVGHRRIKPHNIATGTLAPRPQKQYPINPKAKPSIQIVIDDLLKQGVLIQQNSTMNTPVYPVPKPDGKWRMVLDYREVNKTIPLIAAQNQHSAGILSSIYRGKYKTTLDLTNGFWAHPITPESYWLTAFTWQGKQYCWTRLPQGFLNSPALFNADVVDLLKEIPNVQAYVDDIYISHDDPQEHLEQLEKIFSILLNAGYVVSLKKSEIAQREVEFLGFNITKEGRGLTDTFKQKLLNITPPKDLKQLQSILGKLNFARNFIPNYSELVKPLYTIVAPANGKFISWTEDNSNQLQHIISVLNQADNLEERNPETRLIIKVNSSPSAGYIRYYNEGSKRPIMYVNYIFSKAEAKFTQTEKLLTTMHKGLIKAMDLAMGQEILVYSPIVSMTKIQRTPLPERKALPVRWITWMTYLEDPRIQFHYDKSLPELQQIPNVTEDVIAKTKHPSEFAMVFYTDGSAIKHPDVNKSHSAGMGIAQVQFIPEYKIVHQWSIPLGDHTAQLAEIAAVEFACKKALKISGPVLIVTDSFYVAESANKELPYWKSNGFLNNKKKPLRHVSKWKSIAECLQLKPDIIIMHEKGHQQPMTTLHTEGNNLADKLATQGSYVVHAGKRTADGSEFEKRTADGSEFESPKKKAKVE

SEQ ID NO: 6547 - protein, 2176 aa, synthetic construct
MPAAKRVKLDGGDKKYSIGLDIGTNSVGWAVITDEYKVPSKKFKVLGNTDRHSIKKNLIGALLFDSGETAEATRLKRTARRRYTRRKNRICYLQEIFSNEMAKVDDSFFHRLEESFLVEEDKKHERHPIFGNIVDEVAYHEKYPTIYHLRKKLVDSTDKADLRLIYLALAHMIKFRGHFLIEGDLNPDNSDVDKLFIQLVQTYNQLFEENPINASGVDAKAILSARLSKSRRLENLIAQLPGEKKNGLFGNLIALSLGLTPNFKSNFDLAEDAKLQLSKDTYDDDLDNLLAQIGDQYADLFLAAKNLSDAILLSDILRVNTEITKAPLSASMIKRYDEHHQDLTLLKALVRQQLPEKYKEIFFDQSKNGYAGYIDGGASQEEFYKFIKPILEKMDGTEELLVKLNREDLLRKQRTFDNGSIPHQIHLGELHAILRRQEDFYPFLKDNREKIEKILTFRIPYYVGPLARGNSRFAWMTRKSEETITPWNFEEVVDKGASAQSFIERMTNFDKNLPNEKVLPKHSLLYEYFTVYNELTKVKYVTEGMRKPAFLSGEQKKAIVDLLFKTNRKVTVKQLKEDYFKKIECFDSVEISGVEDRFNASLGTYHDLLKIIKDKDFLDNEENEDILEDIVLTLTLFEDREMIEERLKTYAHLFDDKVMKQLKRRRYTGWGRLSRKLINGIRDKQSGKTILDFLKSDGFANRNFMQLIHDDSLTFKEDIQKAQVSGQGDSLHEHIANLAGSPAIKKGILQTVKVVDELVKVMGRHKPENIVIEMARENQTTQKGQKNSRERMKRIEEGIKELGSQILKEHPVENTQLQNEKLYLYYLQNGRDMYVDQELDINRLSDYDVDHIVPQSFLKDDSIDNKVLTRSDKARGKSDNVPSEEVVKKMKNYWRQLLNAKLITQRKFDNLTKAERGGLSELDKAGFIKRQLVETRQITKHVAQILDSRMNTKYDENDKLIREVKVITLKSKLVSDFRKDFQFYKVREINNYHHAHDAYLNAVVGTALIKKYPKLESEFVYGDYKVYDVRKMIAKSEQEIGKATAKYFFYSNIMNFFKTEITLANGEIRKRPLIETNGETGEIVWDKGRDFATVRKVLSMPQVNIVKKTEVQTGGFSKESILPKRNSDKLIARKKDWDPKKYGGFDSPTVAYSVLVVAKVEKGKSKKLKSVKELLGITIMERSSFEKNPIDFLEAKGYKEVKKDLIIKLPKYSLFELENGRKRMLASAGELQKGNELALPSKYVNFLYLASHYEKLKGSPEDNEQKQLFVEQHKHYLDEIIEQISEFSKRVILADANLDKVLSAYNKHRDKPIREQAENIIHLFTLTNLGAPAAFKYFDTTIDRKRYTSTKEVLDATLIHQSITGLYETRIDLSQLGGDGGPAPAPAPAPAPGGMDPLQLLQPLEAEIKGTKLKAHWNSGATITCVPEAFLEDERPIQTMLIKTIHGEKQQDVYYLTFKVQGRKVEAEVLASPYDYILLNPSDVPWLMKKPLQLTVLVPLHEYQERLLQQTALPKEQKELLQKLFLKYDALWQHWENQVGHRRIKPHNIATGTLAPRPQKQYPINPKAKPSIQIVIDDLLKQGVLIQQNSTMNTPVYPVPKPDGKWRMVLDYREVNKTIPLIAAQNQHSAGILSSIYRGKYKTTLDLTNGFWAHPITPESYWLTAFTWQGKQYCWTRLPQGFLNSPALFNADVVDLLKEIPNVQAYVDDIYISHDDPQEHLEQLEKIFSILLNAGYVVSLKKSEIAQREVEFLGFNITKEGRGLTDTFKQKLLNITPPKDLKQLQSILGLLNFARNFIPNYSELVKPLYTIVAPANGKFISWTEDNSNQLQHIISVLNQADNLEERNPETRLIIKVNSSPSAGYIRYYNEGSKRPIMYVNYIFSKAEAKFTQTEKLLTTMHKGLIKAMDLAMGQEILVYSPIVSMTKIQRTPLPERKALPVRWITWMTYLEDPRIQFHYDKSLPELQQIPNVTEDVIAKTKHPSEFAMVFYTDGSAIKHPDVNKSHSAGMGIAQVQFIPEYKIVHQWSIPLGDHTAQLAEIAAVEFACKKALKISGPVLIVTDSFYVAESANKELPYWKSNGFLNNKKKPLRHVSKWKSIAECLQLKPDIIIMHEKGHQQPMTTLHTEGNNLADKLATQGSYVVHAGKRTADGSEFEKRTADGSEFESPKKKAKVE

SEQ ID NO: 6548 - protein, 2176 aa, synthetic construct
MPAAKRVKLDGGDKKYSIGLDIGTNSVGWAVITDEYKVPSKKFKVLGNTDRHSIKKNLIGALLFDSGETAEATRLKRTARRRYTRRKNRICYLQEIFSNEMAKVDDSFFHRLEESFLVEEDKKHERHPIFGNIVDEVAYHEKYPTIYHLRKKLVDSTDKADLRLIYLALAHMIKFRGHFLIEGDLNPDNSDVDKLFIQLVQTYNQLFEENPINASGVDAKAILSARLSKSRRLENLIAQLPGEKKNGLFGNLIALSLGLTPNFKSNFDLAEDAKLQLSKDTYDDDLDNLLAQIGDQYADLFLAAKNLSDAILLSDILRVNTEITKAPLSASMIKRYDEHHQDLTLLKALVRQQLPEKYKEIFFDQSKNGYAGYIDGGASQEEFYKFIKPILEKMDGTEELLVKLNREDLLRKQRTFDNGSIPHQIHLGELHAILRRQEDFYPFLKDNREKIEKILTFRIPYYVGPLARGNSRFAWMTRKSEETITPWNFEEVVDKGASAQSFIERMTNFDKNLPNEKVLPKHSLLYEYFTVYNELTKVKYVTEGMRKPAFLSGEQKKAIVDLLFKTNRKVTVKQLKEDYFKKIECFDSVEISGVEDRFNASLGTYHDLLKIIKDKDFLDNEENEDILEDIVLTLTLFEDREMIEERLKTYAHLFDDKVMKQLKRRRYTGWGRLSRKLINGIRDKQSGKTILDFLKSDGFANRNFMQLIHDDSLTFKEDIQKAQVSGQGDSLHEHIANLAGSPAIKKGILQTVKVVDELVKVMGRHKPENIVIEMARENQTTQKGQKNSRERMKRIEEGIKELGSQILKEHPVENTQLQNEKLYLYYLQNGRDMYVDQELDINRLSDYDVDHIVPQSFLKDDSIDNKVLTRSDKARGKSDNVPSEEVVKKMKNYWRQLLNAKLITQRKFDNLTKAERGGLSELDKAGFIKRQLVETRQITKHVAQILDSRMNTKYDENDKLIREVKVITLKSKLVSDFRKDFQFYKVREINNYHHAHDAYLNAVVGTALIKKYPKLESEFVYGDYKVYDVRKMIAKSEQEIGKATAKYFFYSNIMNFFKTEITLANGEIRKRPLIETNGETGEIVWDKGRDFATVRKVLSMPQVNIVKKTEVQTGGFSKESILPKRNSDKLIARKKDWDPKKYGGFDSPTVAYSVLVVAKVEKGKSKKLKSVKELLGITIMERSSFEKNPIDFLEAKGYKEVKKDLIIKLPKYSLFELENGRKRMLASAGELQKGNELALPSKYVNFLYLASHYEKLKGSPEDNEQKQLFVEQHKHYLDEIIEQISEFSKRVILADANLDKVLSAYNKHRDKPIREQAENIIHLFTLTNLGAPAAFKYFDTTIDRKRYTSTKEVLDATLIHQSITGLYETRIDLSQLGGDGGPAPAPAPAPAPGGMDPLQLLQPLEAEIKGTKLKAHWNSGATITCVPQAFLEEEVPIKNIWIKTIHGEKEQPVYYLTFKIQGRKVEAEVISSPYDYILVSPSDIPWLMKKPLQLTTLVPLQEYEERLLKQTMLTGSYKEKLQSLFLKYDALWQHWENQVGHRRIKPHHIATGTVNPRPQKQYPINPKAKASIQTVINDLLKQGVLIQQNSIMNTPVYPVPKPDGKWRMVLDYREVNKTIPLIAAQNQHSAGILSSIFRGKYKTTLDLSNGFWAHSITPESYWLTAFTWLGQQYCWTRLPQGFLNSPALFNADVVDLLKEVPNVQVYVDDIYISHDDPREHLEQLEKVFSLLLNAGYVVSLKKSEIAQHEVEFLGFNITKEGRGLTETFKQKLLNITPPRDLKQLQSILGLLNFARNFIPNFSELVKPLYNIIATAPGKYITWTTDNSQQLQNIISMLNSAENLEERNPEVRLIMKVNTSPSAGYIRFYNEFAKRPIMYLNYVYTKAEVKFTNTEKLLTTIHKGLIKALDLGMGQEILVYSPIVSMTKIQKTPLPERKALPIRWITWMSYLEDPRIQFHYDKTLPELQQVPTVTDDIIAKIKHPSEFSMVFYTDGSAIKHPNVNKSHNAGMGIAQVQFKPEFTVINTWSIPLGDHTAQLAEVAAVEFACKKALKIDGPVLIVTDSFYVAESVNKELPYWQSNGFFNNKKKPLKHVSKWKSIADCIQLKPDIIIIHEKGHQPTASTFHTEGNNLADKLATQGSYVVNAGKRTADGSEFEKRTADGSEFESPKKKAKVE

SEQ ID NO: 6549 - protein, 2094 aa, synthetic construct
MPAAKRVKLDGGDKKYSIGLDIGTNSVGWAVITDEYKVPSKKFKVLGNTDRHSIKKNLIGALLFDSGETAEATRLKRTARRRYTRRKNRICYLQEIFSNEMAKVDDSFFHRLEESFLVEEDKKHERHPIFGNIVDEVAYHEKYPTIYHLRKKLVDSTDKADLRLIYLALAHMIKFRGHFLIEGDLNPDNSDVDKLFIQLVQTYNQLFEENPINASGVDAKAILSARLSKSRRLENLIAQLPGEKKNGLFGNLIALSLGLTPNFKSNFDLAEDAKLQLSKDTYDDDLDNLLAQIGDQYADLFLAAKNLSDAILLSDILRVNTEITKAPLSASMIKRYDEHHQDLTLLKALVRQQLPEKYKEIFFDQSKNGYAGYIDGGASQEEFYKFIKPILEKMDGTEELLVKLNREDLLRKQRTFDNGSIPHQIHLGELHAILRRQEDFYPFLKDNREKIEKILTFRIPYYVGPLARGNSRFAWMTRKSEETITPWNFEEVVDKGASAQSFIERMTNFDKNLPNEKVLPKHSLLYEYFTVYNELTKVKYVTEGMRKPAFLSGEQKKAIVDLLFKTNRKVTVKQLKEDYFKKIECFDSVEISGVEDRFNASLGTYHDLLKIIKDKDFLDNEENEDILEDIVLTLTLFEDREMIEERLKTYAHLFDDKVMKQLKRRRYTGWGRLSRKLINGIRDKQSGKTILDFLKSDGFANRNFMQLIHDDSLTFKEDIQKAQVSGQGDSLHEHIANLAGSPAIKKGILQTVKVVDELVKVMGRHKPENIVIEMARENQTTQKGQKNSRERMKRIEEGIKELGSQILKEHPVENTQLQNEKLYLYYLQNGRDMYVDQELDINRLSDYDVDHIVPQSFLKDDSIDNKVLTRSDKARGKSDNVPSEEVVKKMKNYWRQLLNAKLITQRKFDNLTKAERGGLSELDKAGFIKRQLVETRQITKHVAQILDSRMNTKYDENDKLIREVKVITLKSKLVSDFRKDFQFYKVREINNYHHAHDAYLNAVVGTALIKKYPKLESEFVYGDYKVYDVRKMIAKSEQEIGKATAKYFFYSNIMNFFKTEITLANGEIRKRPLIETNGETGEIVWDKGRDFATVRKVLSMPQVNIVKKTEVQTGGFSKESILPKRNSDKLIARKKDWDPKKYGGFDSPTVAYSVLVVAKVEKGKSKKLKSVKELLGITIMERSSFEKNPIDFLEAKGYKEVKKDLIIKLPKYSLFELENGRKRMLASAGELQKGNELALPSKYVNFLYLASHYEKLKGSPEDNEQKQLFVEQHKHYLDEIIEQISEFSKRVILADANLDKVLSAYNKHRDKPIREQAENIIHLFTLTNLGAPAAFKYFDTTIDRKRYTSTKEVLDATLIHQSITGLYETRIDLSQLGGDGGPAPAPAPAPAPGGVLNLEEEYRLHEKPVPSSIDPSWLQLFPTVWAERAGMGLANQVPPVVVELRSGASPVAVRQYPMSKEAREGIRPHIQRFLDLGVLVPCQSPWNTPLLPVKKPGTNDYRPVQDLREINKRVQDIHPTVPNPYNLLSSLPPSHTWYSVLDLKDAFFCLKLHPNSQPLFAFEWRDPEKGNTGQLTWTRLPQGFKNSPTLFNEALHRDLAPFRALNPQVVLLQYVDDLLVAAPTYRDCKEGTQKLLQELSKLGYRVSAKKAQLCQKEVTYLGYLLKEGKRWLTPARKATVMKIPPPTTPRQVREFLGKAGFCRLFIPGFASLAAPLYPLTKPSIPFIWTEEHQKAFDRIKEALLSAPALALPDLTKPFTLYVDERAGVARGVLTQTLGPWRRPVAYLSKKLDPVASGWPTCLKAVAAVALLLKDADKLTLGQNVTVIASHSLESIVRQPPDRWMTNARMTHYQSLLLNERVSFAPPAVLNPATLLPVESEATPVHRCSEILAEETGTRRDLKDQPLPGVPAWYTDGSSFIAEGKRRAGAAIVDGKRTVWASSLPEGTSAQKAELVALTQALRLAEGKDINIYTDSRYAFATAHIHGAIYKQRGWLTSAGKDIKNKEEILALLEAIHLPKRVAIIHCPGHQKGNDPVATGNRRADEAAKQAALSTRVLAETTKPAGKRTADGSEFEKRTADGSEFESPKKKAKVE

SEQ ID NO: 6550 - protein, 2096 aa, synthetic construct
MPAAKRVKLDGGDKKYSIGLDIGTNSVGWAVITDEYKVPSKKFKVLGNTDRHSIKKNLIGALLFDSGETAEATRLKRTARRRYTRRKNRICYLQEIFSNEMAKVDDSFFHRLEESFLVEEDKKHERHPIFGNIVDEVAYHEKYPTIYHLRKKLVDSTDKADLRLIYLALAHMIKFRGHFLIEGDLNPDNSDVDKLFIQLVQTYNQLFEENPINASGVDAKAILSARLSKSRRLENLIAQLPGEKKNGLFGNLIALSLGLTPNFKSNFDLAEDAKLQLSKDTYDDDLDNLLAQIGDQYADLFLAAKNLSDAILLSDILRVNTEITKAPLSASMIKRYDEHHQDLTLLKALVRQQLPEKYKEIFFDQSKNGYAGYIDGGASQEEFYKFIKPILEKMDGTEELLVKLNREDLLRKQRTFDNGSIPHQIHLGELHAILRRQEDFYPFLKDNREKIEKILTFRIPYYVGPLARGNSRFAWMTRKSEETITPWNFEEVVDKGASAQSFIERMTNFDKNLPNEKVLPKHSLLYEYFTVYNELTKVKYVTEGMRKPAFLSGEQKKAIVDLLFKTNRKVTVKQLKEDYFKKIECFDSVEISGVEDRFNASLGTYHDLLKIIKDKDFLDNEENEDILEDIVLTLTLFEDREMIEERLKTYAHLFDDKVMKQLKRRRYTGWGRLSRKLINGIRDKQSGKTILDFLKSDGFANRNFMQLIHDDSLTFKEDIQKAQVSGQGDSLHEHIANLAGSPAIKKGILQTVKVVDELVKVMGRHKPENIVIEMARENQTTQKGQKNSRERMKRIEEGIKELGSQILKEHPVENTQLQNEKLYLYYLQNGRDMYVDQELDINRLSDYDVDHIVPQSFLKDDSIDNKVLTRSDKARGKSDNVPSEEVVKKMKNYWRQLLNAKLITQRKFDNLTKAERGGLSELDKAGFIKRQLVETRQITKHVAQILDSRMNTKYDENDKLIREVKVITLKSKLVSDFRKDFQFYKVREINNYHHAHDAYLNAVVGTALIKKYPKLESEFVYGDYKVYDVRKMIAKSEQEIGKATAKYFFYSNIMNFFKTEITLANGEIRKRPLIETNGETGEIVWDKGRDFATVRKVLSMPQVNIVKKTEVQTGGFSKESILPKRNSDKLIARKKDWDPKKYGGFDSPTVAYSVLVVAKVEKGKSKKLKSVKELLGITIMERSSFEKNPIDFLEAKGYKEVKKDLIIKLPKYSLFELENGRKRMLASAGELQKGNELALPSKYVNFLYLASHYEKLKGSPEDNEQKQLFVEQHKHYLDEIIEQISEFSKRVILADANLDKVLSAYNKHRDKPIREQAENIIHLFTLTNLGAPAAFKYFDTTIDRKRYTSTKEVLDATLIHQSITGLYETRIDLSQLGGDGGPAPAPAPAPAPGGTLNIEDEYRLHETSKEPDVPLGSTWLSDFPQAWAETGGMGLAVRQAPLIIPLKATSTPVSIKQYPMSQEARLGIKPHIQRLLDQGILVPCQSPWNTPLLPVKKPGTNDYRPVQDLREVNKRVEDIHPTVPNPYNLLSGLPPSHQWYTVLDLKDAFFCLRLHPTSQPLFAFEWRDPEMGISGQLTWTRLPQGFKNSPTLFDEALHRDLADFRIQHPDLILLQYVDDLLLAATSEQDCQRGTRALLQTLGNLGYRASAKKAQICQKQVKYLGYLLKEGQRWLTEARKETVMGQPTPKTPRQLREFLGTAGFCRLWIPGFAEMAAPLYPLTKTGTLFNWGPDQQKAYQEIKQALLTAPALGLPDLTKPFELFVDEKQGYAKGVLTQKLGPWRRPVAYLSKKLDPVAAGWPPCLRMVAAIAVLTKDAGKLTMGQPLVILAPHAVEALVKQPPDRWLSNARMTHYQAMLLDTDRVQFGPVVALNPATLLPLPEKEAPHDCLEILAETHGTRPDLTDQPIPDADYTWYTDGSSFLQEGQRRAGAAVTTETEVIWARALPAGTSAQRAELIALTQALKMAEGKKLNVYTDSRYAFATAHVHGEIYRRRGLLTSEGREIKNKNEILALLKALFLPKRLSIIHCPGHQKGNSAEARGNRMADQAAREAAMKAVLETSTLLAGKRTADGSEFEKRTADGSEFESPKKKAKVE

SEQ ID NO: 6551 - protein, 2096 aa, synthetic construct
MPAAKRVKLDGGDKKYSIGLDIGTNSVGWAVITDEYKVPSKKFKVLGNTDRHSIKKNLIGALLFDSGETAEATRLKRTARRRYTRRKNRICYLQEIFSNEMAKVDDSFFHRLEESFLVEEDKKHERHPIFGNIVDEVAYHEKYPTIYHLRKKLVDSTDKADLRLIYLALAHMIKFRGHFLIEGDLNPDNSDVDKLFIQLVQTYNQLFEENPINASGVDAKAILSARLSKSRRLENLIAQLPGEKKNGLFGNLIALSLGLTPNFKSNFDLAEDAKLQLSKDTYDDDLDNLLAQIGDQYADLFLAAKNLSDAILLSDILRVNTEITKAPLSASMIKRYDEHHQDLTLLKALVRQQLPEKYKEIFFDQSKNGYAGYIDGGASQEEFYKFIKPILEKMDGTEELLVKLNREDLLRKQRTFDNGSIPHQIHLGELHAILRRQEDFYPFLKDNREKIEKILTFRIPYYVGPLARGNSRFAWMTRKSEETITPWNFEEVVDKGASAQSFIERMTNFDKNLPNEKVLPKHSLLYEYFTVYNELTKVKYVTEGMRKPAFLSGEQKKAIVDLLFKTNRKVTVKQLKEDYFKKIECFDSVEISGVEDRFNASLGTYHDLLKIIKDKDFLDNEENEDILEDIVLTLTLFEDREMIEERLKTYAHLFDDKVMKQLKRRRYTGWGRLSRKLINGIRDKQSGKTILDFLKSDGFANRNFMQLIHDDSLTFKEDIQKAQVSGQGDSLHEHIANLAGSPAIKKGILQTVKVVDELVKVMGRHKPENIVIEMARENQTTQKGQKNSRERMKRIEEGIKELGSQILKEHPVENTQLQNEKLYLYYLQNGRDMYVDQELDINRLSDYDVDHIVPQSFLKDDSIDNKVLTRSDKARGKSDNVPSEEVVKKMKNYWRQLLNAKLITQRKFDNLTKAERGGLSELDKAGFIKRQLVETRQITKHVAQILDSRMNTKYDENDKLIREVKVITLKSKLVSDFRKDFQFYKVREINNYHHAHDAYLNAVVGTALIKKYPKLESEFVYGDYKVYDVRKMIAKSEQEIGKATAKYFFYSNIMNFFKTEITLANGEIRKRPLIETNGETGEIVWDKGRDFATVRKVLSMPQVNIVKKTEVQTGGFSKESILPKRNSDKLIARKKDWDPKKYGGFDSPTVAYSVLVVAKVEKGKSKKLKSVKELLGITIMERSSFEKNPIDFLEAKGYKEVKKDLIIKLPKYSLFELENGRKRMLASAGELQKGNELALPSKYVNFLYLASHYEKLKGSPEDNEQKQLFVEQHKHYLDEIIEQISEFSKRVILADANLDKVLSAYNKHRDKPIREQAENIIHLFTLTNLGAPAAFKYFDTTIDRKRYTSTKEVLDATLIHQSITGLYETRIDLSQLGGDGGPAPAPAPAPAPGGTLNIEDEYRLHETSKEPDVPLGSTWLSDFPQAWAETGGMGLAVRQAPLIIPLKATSTPVSIKQYPMSQEARLGIKPHIQRLLDQGILVPCQSPWNTPLLPVKKPGTNDYRPVQDLREVNKRVEDIHPTVPNPYNLLSGLPPSHQWYTVLDLKDAFFCLRLHPTSQPLFAFEWRDPEMGISGQLTWTRLPQGFKNSPTLFNEALHRDLADFRIQHPDLILLQYVDDLLLAATSEQDCQRGTRALLQTLGNLGYRASAKKAQICQKQVKYLGYLLKEGQRWLTEARKETVMGQPTPKTPRQLREFLGTAGFCRLWIPGFAEMAAPLYPLTKPGTLFNWGPDQQKAYQEIKQALLTAPALGLPDLTKPFELFVDEKQGYAKGVLTQKLGPWRRPVAYLSKKLDPVAAGWPPCLRMVAAIAVLTKDAGKLTMGQPLVILAPHAVEALVKQPPDRWLSNARMTHYQAMLLDTDRVQFGPVVALNPATLLPLPEKEAPHDCLEILAETHGTRPDLTDQPIPDADYTWYTDGSSFLQEGQRRAGAAVTTETEVIWARALPAGTSAQRAELIALTQALKMAEGKKLNVYTDSRYAFATAHVHGEIYRRRGWLTSEGREIKNKNEILALLKALFLPKRLSIIHCPGHQKGNSAEARGNRMADQAAREAAMKAVLETSTLLAGKRTADGSEFEKRTADGSEFESPKKKAKVE

SEQ ID NO: 6552 - protein, 2100 aa, synthetic construct
MPAAKRVKLDGGDKKYSIGLDIGTNSVGWAVITDEYKVPSKKFKVLGNTDRHSIKKNLIGALLFDSGETAEATRLKRTARRRYTRRKNRICYLQEIFSNEMAKVDDSFFHRLEESFLVEEDKKHERHPIFGNIVDEVAYHEKYPTIYHLRKKLVDSTDKADLRLIYLALAHMIKFRGHFLIEGDLNPDNSDVDKLFIQLVQTYNQLFEENPINASGVDAKAILSARLSKSRRLENLIAQLPGEKKNGLFGNLIALSLGLTPNFKSNFDLAEDAKLQLSKDTYDDDLDNLLAQIGDQYADLFLAAKNLSDAILLSDILRVNTEITKAPLSASMIKRYDEHHQDLTLLKALVRQQLPEKYKEIFFDQSKNGYAGYIDGGASQEEFYKFIKPILEKMDGTEELLVKLNREDLLRKQRTFDNGSIPHQIHLGELHAILRRQEDFYPFLKDNREKIEKILTFRIPYYVGPLARGNSRFAWMTRKSEETITPWNFEEVVDKGASAQSFIERMTNFDKNLPNEKVLPKHSLLYEYFTVYNELTKVKYVTEGMRKPAFLSGEQKKAIVDLLFKTNRKVTVKQLKEDYFKKIECFDSVEISGVEDRFNASLGTYHDLLKIIKDKDFLDNEENEDILEDIVLTLTLFEDREMIEERLKTYAHLFDDKVMKQLKRRRYTGWGRLSRKLINGIRDKQSGKTILDFLKSDGFANRNFMQLIHDDSLTFKEDIQKAQVSGQGDSLHEHIANLAGSPAIKKGILQTVKVVDELVKVMGRHKPENIVIEMARENQTTQKGQKNSRERMKRIEEGIKELGSQILKEHPVENTQLQNEKLYLYYLQNGRDMYVDQELDINRLSDYDVDHIVPQSFLKDDSIDNKVLTRSDKARGKSDNVPSEEVVKKMKNYWRQLLNAKLITQRKFDNLTKAERGGLSELDKAGFIKRQLVETRQITKHVAQILDSRMNTKYDENDKLIREVKVITLKSKLVSDFRKDFQFYKVREINNYHHAHDAYLNAVVGTALIKKYPKLESEFVYGDYKVYDVRKMIAKSEQEIGKATAKYFFYSNIMNFFKTEITLANGEIRKRPLIETNGETGEIVWDKGRDFATVRKVLSMPQVNIVKKTEVQTGGFSKESILPKRNSDKLIARKKDWDPKKYGGFDSPTVAYSVLVVAKVEKGKSKKLKSVKELLGITIMERSSFEKNPIDFLEAKGYKEVKKDLIIKLPKYSLFELENGRKRMLASAGELQKGNELALPSKYVNFLYLASHYEKLKGSPEDNEQKQLFVEQHKHYLDEIIEQISEFSKRVILADANLDKVLSAYNKHRDKPIREQAENIIHLFTLTNLGAPAAFKYFDTTIDRKRYTSTKEVLDATLIHQSITGLYETRIDLSQLGGDGGPAPAPAPAPAPAPGGTAPLEEEYRLFLEAPIQNVTLLEQWKREIPKVWAEINPPGLASTQAPIHVQLLSTALPVRVRQYPITLEAKRSLRETIRKFRAAGILRPVHSPWNTPLLPVRKSGTSEYRMVQDLREVNKRVETIHPTVPNPYTLLSLLPPDRIWYSVLDLKDAFFCIPLAPESQLIFAFEWADAEEGESGQLTWTRLPQGFKNSPTLFDEALNRDLQGFRLDHPSVSLLQYVDDLLIAADTQAACLSATRDLLMTLAELGYRVSGKKAQLCQEEVTYLGFKIHKGSRSLSNSRTQAILQIPVPKTKRQVREFLGTIGYCRLWIPGFAELAQPLYAATRGGNDPLVWGEKEEEAFQSLKLALTQPPALALPSLDKPFQLFVEETSGAAKGVLTQALGPWKRPVAYLSKRLDPVAAGWPRCLRAIAAAALLTREASKLTFGQDIEITSSHNLESLLRSPPDKWLTNARITQYQVLLLDPPRVRFKQTAALNPATLLPETDDTLPIHHCLDTLDSLTSTRPDLTDQPLAQAEATLFTDGSSYIRDGKRYAGAAVVTLDSVIWAEPLPIGTSAQKAELIALTKALEWSKDKSVNIYTDSRYAFATLHVHGMIYRERGLLTAGGKAIKNAPEILALLTAVWLPKRVAVMHCKGHQKDDAPTSTGNRRADEVAREVAIRPLSTQATISAGKRTADGSEFEKRTADGSEFESPKKKAKVE

SEQ ID NO: 6553 - protein, 2175 aa, synthetic construct
MPAAKRVKLDGGDKKYSIGLDIGTNSVGWAVITDEYKVPSKKFKVLGNTDRHSIKKNLIGALLFDSGETAEATRLKRTARRRYTRRKNRICYLQEIFSNEMAKVDDSFFHRLEESFLVEEDKKHERHPIFGNIVDEVAYHEKYPTIYHLRKKLVDSTDKADLRLIYLALAHMIKFRGHFLIEGDLNPDNSDVDKLFIQLVQTYNQLFEENPINASGVDAKAILSARLSKSRRLENLIAQLPGEKKNGLFGNLIALSLGLTPNFKSNFDLAEDAKLQLSKDTYDDDLDNLLAQIGDQYADLFLAAKNLSDAILLSDILRVNTEITKAPLSASMIKRYDEHHQDLTLLKALVRQQLPEKYKEIFFDQSKNGYAGYIDGGASQEEFYKFIKPILEKMDGTEELLVKLNREDLLRKQRTFDNGSIPHQIHLGELHAILRRQEDFYPFLKDNREKIEKILTFRIPYYVGPLARGNSRFAWMTRKSEETITPWNFEEVVDKGASAQSFIERMTNFDKNLPNEKVLPKHSLLYEYFTVYNELTKVKYVTEGMRKPAFLSGEQKKAIVDLLFKTNRKVTVKQLKEDYFKKIECFDSVEISGVEDRFNASLGTYHDLLKIIKDKDFLDNEENEDILEDIVLTLTLFEDREMIEERLKTYAHLFDDKVMKQLKRRRYTGWGRLSRKLINGIRDKQSGKTILDFLKSDGFANRNFMQLIHDDSLTFKEDIQKAQVSGQGDSLHEHIANLAGSPAIKKGILQTVKVVDELVKVMGRHKPENIVIEMARENQTTQKGQKNSRERMKRIEEGIKELGSQILKEHPVENTQLQNEKLYLYYLQNGRDMYVDQELDINRLSDYDVDHIVPQSFLKDDSIDNKVLTRSDKARGKSDNVPSEEVVKKMKNYWRQLLNAKLITQRKFDNLTKAERGGLSELDKAGFIKRQLVETRQITKHVAQILDSRMNTKYDENDKLIREVKVITLKSKLVSDFRKDFQFYKVREINNYHHAHDAYLNAVVGTALIKKYPKLESEFVYGDYKVYDVRKMIAKSEQEIGKATAKYFFYSNIMNFFKTEITLANGEIRKRPLIETNGETGEIVWDKGRDFATVRKVLSMPQVNIVKKTEVQTGGFSKESILPKRNSDKLIARKKDWDPKKYGGFDSPTVAYSVLVVAKVEKGKSKKLKSVKELLGITIMERSSFEKNPIDFLEAKGYKEVKKDLIIKLPKYSLFELENGRKRMLASAGELQKGNELALPSKYVNFLYLASHYEKLKGSPEDNEQKQLFVEQHKHYLDEIIEQISEFSKRVILADANLDKVLSAYNKHRDKPIREQAENIIHLFTLTNLGAPAAFKYFDTTIDRKRYTSTKEVLDATLIHQSITGLYETRIDLSQLGGDGGPAPAPAPAPAPAPGGMDLLKPLTVERKGVKIKGYWNSQADITCVPKDLLQGEEPVRQQNVTTIHGTQEGDVYYVNLKIDGRRINTEVIGTTLDYAIITPGDVPWILKKPLELTIKLDLEEQQGTLLNNSILSKKGKEELKQLFEKYSALWQSWENQVGHRRIRPHKIATGTVKPTPQKQYHINPKAKPDIQIVINDLLKQGVLIQKESTMNTPVYPVPKPNGRWRMVLDYRAVNKVTPLIAVQNQHSYGILGSLFKGRYKTTIDLSNGFWAHPIVPEDYWITAFTWQGKQYCWTVLPQGFLNSPGLFNGDVVDLLQGIPNVEVYVDDVYISHDSEKEHLEYLDILFNRLKEAGYIISLKKSNIANSIVDFLGFQITNEGRGLTDTFKEKLENITAPTTLKQLQSILGLLNFARNFIPDFTELIAPLYALIPKSPKNYVPWQIEHSTTLETLITKLNGAEYLQGRKGDKTLIMKVNASYTTGYIRYYNEGEKKPISYVSIVFSKTELKFTELEKLLTTVHKGLLKALDLSMGQNIHVYSPIVSMQNIQKTPQTAKKALASRWLSWLSYLEDPRIRFFYDPQMPALKDLPAVDTGKDNKKHPSNFQHIFYTDGSAITSPTKEGHLNAGMGIVYFINKDGNLQKQQEWSISLGNHTAQFAEIAAFEFALKKCLPLGGNILVVTDSNYVAKAYNEELDVWASNGFVNNRKKPLKHISKWKSVADLKRLRPDVVVTHEPGHQKLDSSPHAYGNNLADQLATQASFKVHAGKRTADGSEFEKRTADGSEFESPKKKAKVE

SEQ ID NO: 6554 - protein, 2175 aa, synthetic construct
MPAAKRVKLDGGDKKYSIGLDIGTNSVGWAVITDEYKVPSKKFKVLGNTDRHSIKKNLIGALLFDSGETAEATRLKRTARRRYTRRKNRICYLQEIFSNEMAKVDDSFFHRLEESFLVEEDKKHERHPIFGNIVDEVAYHEKYPTIYHLRKKLVDSTDKADLRLIYLALAHMIKFRGHFLIEGDLNPDNSDVDKLFIQLVQTYNQLFEENPINASGVDAKAILSARLSKSRRLENLIAQLPGEKKNGLFGNLIALSLGLTPNFKSNFDLAEDAKLQLSKDTYDDDLDNLLAQIGDQYADLFLAAKNLSDAILLSDILRVNTEITKAPLSASMIKRYDEHHQDLTLLKALVRQQLPEKYKEIFFDQSKNGYAGYIDGGASQEEFYKFIKPILEKMDGTEELLVKLNREDLLRKQRTFDNGSIPHQIHLGELHAILRRQEDFYPFLKDNREKIEKILTFRIPYYVGPLARGNSRFAWMTRKSEETITPWNFEEVVDKGASAQSFIERMTNFDKNLPNEKVLPKHSLLYEYFTVYNELTKVKYVTEGMRKPAFLSGEQKKAIVDLLFKTNRKVTVKQLKEDYFKKIECFDSVEISGVEDRFNASLGTYHDLLKIIKDKDFLDNEENEDILEDIVLTLTLFEDREMIEERLKTYAHLFDDKVMKQLKRRRYTGWGRLSRKLINGIRDKQSGKTILDFLKSDGFANRNFMQLIHDDSLTFKEDIQKAQVSGQGDSLHEHIANLAGSPAIKKGILQTVKVVDELVKVMGRHKPENIVIEMARENQTTQKGQKNSRERMKRIEEGIKELGSQILKEHPVENTQLQNEKLYLYYLQNGRDMYVDQELDINRLSDYDVDHIVPQSFLKDDSIDNKVLTRSDKARGKSDNVPSEEVVKKMKNYWRQLLNAKLITQRKFDNLTKAERGGLSELDKAGFIKRQLVETRQITKHVAQILDSRMNTKYDENDKLIREVKVITLKSKLVSDFRKDFQFYKVREINNYHHAHDAYLNAVVGTALIKKYPKLESEFVYGDYKVYDVRKMIAKSEQEIGKATAKYFFYSNIMNFFKTEITLANGEIRKRPLIETNGETGEIVWDKGRDFATVRKVLSMPQVNIVKKTEVQTGGFSKESILPKRNSDKLIARKKDWDPKKYGGFDSPTVAYSVLVVAKVEKGKSKKLKSVKELLGITIMERSSFEKNPIDFLEAKGYKEVKKDLIIKLPKYSLFELENGRKRMLASAGELQKGNELALPSKYVNFLYLASHYEKLKGSPEDNEQKQLFVEQHKHYLDEIIEQISEFSKRVILADANLDKVLSAYNKHRDKPIREQAENIIHLFTLTNLGAPAAFKYFDTTIDRKRYTSTKEVLDATLIHQSITGLYETRIDLSQLGGDGGPAPAPAPAPAPAPGGMDLLKPLTVERKGVKIKGYWNSQADITCVPKDLLQGEEPVRQQNVTTIHGTQEGDVYYVNLKIDGRRINTEVIGTTLDYAIITPGDVPWILKKPLELTIKLDLEEQQGTLLNNSILSKKGKEELKQLFEKYSALWQSWENQVGHRRIRPHKIATGTVKPTPQKQYHINPKAKPDIQIVINDLLKQGVLIQKESTMNTPVYPVPKPNGRWRMVLDYRAVNKVTPLIAVQNQHSYGILGSLFKGRYKTTIDLSNGFWAHPIVPEDYWITAFTWQGKQYCWTVLPQGFLNSPGLFNGDVVDLLQGIPNVEVYVDDVYISHDSEKEHLEYLDILFNRLKEAGYIISLKKSNIANSIVDFLGFQITNEGRGLTDTFKEKLENITAPTTLKQLQSILGKLNFARNFIPDFTELIAPLYALIPKSPKNYVPWQIEHSTTLETLITKLNGAEYLQGRKGDKTLIMKVNASYTTGYIRYYNEGEKKPISYVSIVFSKTELKFTELEKLLTTVHKGLLKALDLSMGQNIHVYSPIVSMQNIQKTPQTAKKALASRWLSWLSYLEDPRIRFFYDPQMPALKDLPAVDTGKDNKKHPSNFQHIFYTDGSAITSPTKEGHLNAGMGIVYFINKDGNLQKQQEWSISLGNHTAQFAEIAAFEFALKKCLPLGGNILVVTDSNYVAKAYNEELDVWASNGFVNNRKKPLKHISKWKSVADLKRLRPDVVVTHEPGHQKLDSSPHAYGNNLADQLATQASFKVHAGKRTADGSEFEKRTADGSEFESPKKKAKVE

SEQ ID NO: 6555 - protein, 2097 aa, synthetic construct
MPAAKRVKLDGGDKKYSIGLDIGTNSVGWAVITDEYKVPSKKFKVLGNTDRHSIKKNLIGALLFDSGETAEATRLKRTARRRYTRRKNRICYLQEIFSNEMAKVDDSFFHRLEESFLVEEDKKHERHPIFGNIVDEVAYHEKYPTIYHLRKKLVDSTDKADLRLIYLALAHMIKFRGHFLIEGDLNPDNSDVDKLFIQLVQTYNQLFEENPINASGVDAKAILSARLSKSRRLENLIAQLPGEKKNGLFGNLIALSLGLTPNFKSNFDLAEDAKLQLSKDTYDDDLDNLLAQIGDQYADLFLAAKNLSDAILLSDILRVNTEITKAPLSASMIKRYDEHHQDLTLLKALVRQQLPEKYKEIFFDQSKNGYAGYIDGGASQEEFYKFIKPILEKMDGTEELLVKLNREDLLRKQRTFDNGSIPHQIHLGELHAILRRQEDFYPFLKDNREKIEKILTFRIPYYVGPLARGNSRFAWMTRKSEETITPWNFEEVVDKGASAQSFIERMTNFDKNLPNEKVLPKHSLLYEYFTVYNELTKVKYVTEGMRKPAFLSGEQKKAIVDLLFKTNRKVTVKQLKEDYFKKIECFDSVEISGVEDRFNASLGTYHDLLKIIKDKDFLDNEENEDILEDIVLTLTLFEDREMIEERLKTYAHLFDDKVMKQLKRRRYTGWGRLSRKLINGIRDKQSGKTILDFLKSDGFANRNFMQLIHDDSLTFKEDIQKAQVSGQGDSLHEHIANLAGSPAIKKGILQTVKVVDELVKVMGRHKPENIVIEMARENQTTQKGQKNSRERMKRIEEGIKELGSQILKEHPVENTQLQNEKLYLYYLQNGRDMYVDQELDINRLSDYDVDHIVPQSFLKDDSIDNKVLTRSDKARGKSDNVPSEEVVKKMKNYWRQLLNAKLITQRKFDNLTKAERGGLSELDKAGFIKRQLVETRQITKHVAQILDSRMNTKYDENDKLIREVKVITLKSKLVSDFRKDFQFYKVREINNYHHAHDAYLNAVVGTALIKKYPKLESEFVYGDYKVYDVRKMIAKSEQEIGKATAKYFFYSNIMNFFKTEITLANGEIRKRPLIETNGETGEIVWDKGRDFATVRKVLSMPQVNIVKKTEVQTGGFSKESILPKRNSDKLIARKKDWDPKKYGGFDSPTVAYSVLVVAKVEKGKSKKLKSVKELLGITIMERSSFEKNPIDFLEAKGYKEVKKDLIIKLPKYSLFELENGRKRMLASAGELQKGNELALPSKYVNFLYLASHYEKLKGSPEDNEQKQLFVEQHKHYLDEIIEQISEFSKRVILADANLDKVLSAYNKHRDKPIREQAENIIHLFTLTNLGAPAAFKYFDTTIDRKRYTSTKEVLDATLIHQSITGLYETRIDLSQLGGDGGPAPAPAPAPAPAPGGTLQLEEEYRLFEPESTQKQEMDIWLKNFPQAWAETGGMGTAHCQAPVLIQLKATATPISIRQYPMPHEAYQGIKPHIRRMLDQGILKPCQSPWNTPLLPVKKPGTEDYRPVQDLREVNKRVEDIHPTVPNPYNLLSTLPPSHPWYTVLDLKDAFFCLRLHSESQLLFAFEWRDPEIGLSGQLTWTRLPQGFKNSPTLFNEALHSDLADFRVRYPALVLLQYVDDLLLAAATRTECLEGTKALLETLGNKGYRASAKKAQICLQEVTYLGYSLKDGQRWLTKARKEAILSIPVPKNSRQVREFLGTAGYCRLWIPGFAELAAPLYPLTRPGTLFQWGTEQQLAFEDIKKALLSSPALGLPDITKPFELFIDENSGFAKGVLVQKLGPWKRPVAYLSKKLDTVASGWPPCLRMVAAIAILVKDAGKLTLGQPLTILTSHPVEALVRQPPNKWLSNARMTHYQAMLLDAERVHFGPTVSLNPATLLPLPSGGNHHDCLQILAETHGTRPDLTDQPLPDADLTWYTDGSSFIRNGEREAGAAVTTESEVIWAAPLPPGTSAQRAELIALTQALKMAEGKKLTVYTDSRYAFATTHVHGEIYRRRGWLTSEGKEIKNKNEILALLEALFLPKRLSIIHCPGHQKGDSPQAKGNRLADDTAKKAATETHSSLTVLPAGKRTADGSEFEKRTADGSEFESPKKKAKVE

SEQ ID NO: 6556 - protein, 2089 aa, synthetic construct
MPAAKRVKLDGGDKKYSIGLDIGTNSVGWAVITDEYKVPSKKFKVLGNTDRHSIKKNLIGALLFDSGETAEATRLKRTARRRYTRRKNRICYLQEIFSNEMAKVDDSFFHRLEESFLVEEDKKHERHPIFGNIVDEVAYHEKYPTIYHLRKKLVDSTDKADLRLIYLALAHMIKFRGHFLIEGDLNPDNSDVDKLFIQLVQTYNQLFEENPINASGVDAKAILSARLSKSRRLENLIAQLPGEKKNGLFGNLIALSLGLTPNFKSNFDLAEDAKLQLSKDTYDDDLDNLLAQIGDQYADLFLAAKNLSDAILLSDILRVNTEITKAPLSASMIKRYDEHHQDLTLLKALVRQQLPEKYKEIFFDQSKNGYAGYIDGGASQEEFYKFIKPILEKMDGTEELLVKLNREDLLRKQRTFDNGSIPHQIHLGELHAILRRQEDFYPFLKDNREKIEKILTFRIPYYVGPLARGNSRFAWMTRKSEETITPWNFEEVVDKGASAQSFIERMTNFDKNLPNEKVLPKHSLLYEYFTVYNELTKVKYVTEGMRKPAFLSGEQKKAIVDLLFKTNRKVTVKQLKEDYFKKIECFDSVEISGVEDRFNASLGTYHDLLKIIKDKDFLDNEENEDILEDIVLTLTLFEDREMIEERLKTYAHLFDDKVMKQLKRRRYTGWGRLSRKLINGIRDKQSGKTILDFLKSDGFANRNFMQLIHDDSLTFKEDIQKAQVSGQGDSLHEHIANLAGSPAIKKGILQTVKVVDELVKVMGRHKPENIVIEMARENQTTQKGQKNSRERMKRIEEGIKELGSQILKEHPVENTQLQNEKLYLYYLQNGRDMYVDQELDINRLSDYDVDHIVPQSFLKDDSIDNKVLTRSDKARGKSDNVPSEEVVKKMKNYWRQLLNAKLITQRKFDNLTKAERGGLSELDKAGFIKRQLVETRQITKHVAQILDSRMNTKYDENDKLIREVKVITLKSKLVSDFRKDFQFYKVREINNYHHAHDAYLNAVVGTALIKKYPKLESEFVYGDYKVYDVRKMIAKSEQEIGKATAKYFFYSNIMNFFKTEITLANGEIRKRPLIETNGETGEIVWDKGRDFATVRKVLSMPQVNIVKKTEVQTGGFSKESILPKRNSDKLIARKKDWDPKKYGGFDSPTVAYSVLVVAKVEKGKSKKLKSVKELLGITIMERSSFEKNPIDFLEAKGYKEVKKDLIIKLPKYSLFELENGRKRMLASAGELQKGNELALPSKYVNFLYLASHYEKLKGSPEDNEQKQLFVEQHKHYLDEIIEQISEFSKRVILADANLDKVLSAYNKHRDKPIREQAENIIHLFTLTNLGAPAAFKYFDTTIDRKRYTSTKEVLDATLIHQSITGLYETRIDLSQLGGDGGPAPAPAPAPAPAPGGVPWLTQQPLQLTILVPLQEYQEKILSKTALPEDQKQQLKTLFVKYDNLWQHWENQVGHRKIRPHNIATGDYPPRPQKQYPINPKAKPSIQIVIDDLLKQGVLTPQNSTMNTPVYPVPKPDGRWRMVLDYREVNKTIPLTAAQNQHSAGILATIVRQKYKTTLDLANGFWAHPITPESYWLTAFTWQGKQYCWTRLPQGFLNSPALFNADVVDLLKEIPNVQVYVDDIYLSHDDPKEHVQQLEKVFQILLQAGYVVSLKKSEIGQKTVEFLGFNITKEGRGLTDTFKTKLLNITPPKDLKQLQSILGKLNFARNFIPNFAELVQPLYNLIAPAKGKYIEWSEENTKQLNMVIEALNTASNLEERLPEQRLVIKVNTSPSAGYVRYYNETGKKPIMYLNYVFSKAELKFSMLEKLLTTMHKALIKAMDLAMGQEILVYSPIVSMTKIQKTPLPERKALPIRWITWMTYLEDPRIQFHYDKTLPELKHIPDVYTSSQSPVKHPSQYEGVFYTDGSAIKSPDPTKSNNAGMGIVHATYKPEYQVLNQWSIPLGNHTAQMAEIAAVEFACKKALKIPGPVLVITDSFYVAESANKELPYWKSNGFVNNKKKPLKHISKWKSIAECLSMKPDITIQHEKGISLQIPVFILKGNALADKLATQGSYVVNAGKRTADGSEFEKRTADGSEFESPKKKAKVE

SEQ ID NO: 6557 - protein, 2096 aa, synthetic construct
MPAAKRVKLDGGDKKYSIGLDIGTNSVGWAVITDEYKVPSKKFKVLGNTDRHSIKKNLIGALLFDSGETAEATRLKRTARRRYTRRKNRICYLQEIFSNEMAKVDDSFFHRLEESFLVEEDKKHERHPIFGNIVDEVAYHEKYPTIYHLRKKLVDSTDKADLRLIYLALAHMIKFRGHFLIEGDLNPDNSDVDKLFIQLVQTYNQLFEENPINASGVDAKAILSARLSKSRRLENLIAQLPGEKKNGLFGNLIALSLGLTPNFKSNFDLAEDAKLQLSKDTYDDDLDNLLAQIGDQYADLFLAAKNLSDAILLSDILRVNTEITKAPLSASMIKRYDEHHQDLTLLKALVRQQLPEKYKEIFFDQSKNGYAGYIDGGASQEEFYKFIKPILEKMDGTEELLVKLNREDLLRKQRTFDNGSIPHQIHLGELHAILRRQEDFYPFLKDNREKIEKILTFRIPYYVGPLARGNSRFAWMTRKSEETITPWNFEEVVDKGASAQSFIERMTNFDKNLPNEKVLPKHSLLYEYFTVYNELTKVKYVTEGMRKPAFLSGEQKKAIVDLLFKTNRKVTVKQLKEDYFKKIECFDSVEISGVEDRFNASLGTYHDLLKIIKDKDFLDNEENEDILEDIVLTLTLFEDREMIEERLKTYAHLFDDKVMKQLKRRRYTGWGRLSRKLINGIRDKQSGKTILDFLKSDGFANRNFMQLIHDDSLTFKEDIQKAQVSGQGDSLHEHIANLAGSPAIKKGILQTVKVVDELVKVMGRHKPENIVIEMARENQTTQKGQKNSRERMKRIEEGIKELGSQILKEHPVENTQLQNEKLYLYYLQNGRDMYVDQELDINRLSDYDVDHIVPQSFLKDDSIDNKVLTRSDKARGKSDNVPSEEVVKKMKNYWRQLLNAKLITQRKFDNLTKAERGGLSELDKAGFIKRQLVETRQITKHVAQILDSRMNTKYDENDKLIREVKVITLKSKLVSDFRKDFQFYKVREINNYHHAHDAYLNAVVGTALIKKYPKLESEFVYGDYKVYDVRKMIAKSEQEIGKATAKYFFYSNIMNFFKTEITLANGEIRKRPLIETNGETGEIVWDKGRDFATVRKVLSMPQVNIVKKTEVQTGGFSKESILPKRNSDKLIARKKDWDPKKYGGFDSPTVAYSVLVVAKVEKGKSKKLKSVKELLGITIMERSSFEKNPIDFLEAKGYKEVKKDLIIKLPKYSLFELENGRKRMLASAGELQKGNELALPSKYVNFLYLASHYEKLKGSPEDNEQKQLFVEQHKHYLDEIIEQISEFSKRVILADANLDKVLSAYNKHRDKPIREQAENIIHLFTLTNLGAPAAFKYFDTTIDRKRYTSTKEVLDATLIHQSITGLYETRIDLSQLGGDGGPAPAPAPAPAPAPGGVLNLEEEYRLHEKPVPSSIDPSWLQLFPTVWAERAGMGLANQVPPVVVELRSGASPVAVRQYPMSKEAREGIRPHIQKFLDLGVLVPCRSPWNTPLLPVKKPGTNDYRPVQDLREINKRVQDIHPTVPNPYNLLSSLPPSYTWYSVLDLKDAFFCLRLHPNSQPLFAFEWKDPEKGNTGQLTWTRLPQGFKNSPTLFNEALHRDLAPFRALNPQVVLLQYVDDLLVAAPTYEDCKKGTQKLLQELSKLGYRVSAKKAQLCQREVTYLGYLLKEGKRWLTPARKATVMKIPVPTTPRQVREFLGTAGFCRLWIPGFASLAAPLYPLTKPSIPFIWTEEHQQAFDHIKKALLSAPALALPDLTKPFTLYIDERAGVARGVLTQTLGPWRRPVAYLSKKLDPVASGWPTCLKAVAAVALLLKDADKLTLGQNVTVIASHSLESIVRQPPDRWMTNARMTHYQSLLLNERVSFAPPAVLNPATLLPVESEATPVHRCSEILAEETGTRRDLEDQPLPGVPTWYTDGSSFITEGKRRAGAPIVDGKRTVWASSLPEGTSAQKAELVALTQALRLAEGKNINIYTDSRYAFATAHIHGAIYKQRGWLTSAGKDIKNKEEILALLEAIHLPRRVAIIHCPGHQRGSNPVATGNRRADEAAKQAALSTRVLAGTTKPAGKRTADGSEFEKRTADGSEFESPKKKAKVE

SEQ ID NO: 6558 - protein, 2096 aa, synthetic construct
MPAAKRVKLDGGDKKYSIGLDIGTNSVGWAVITDEYKVPSKKFKVLGNTDRHSIKKNLIGALLFDSGETAEATRLKRTARRRYTRRKNRICYLQEIFSNEMAKVDDSFFHRLEESFLVEEDKKHERHPIFGNIVDEVAYHEKYPTIYHLRKKLVDSTDKADLRLIYLALAHMIKFRGHFLIEGDLNPDNSDVDKLFIQLVQTYNQLFEENPINASGVDAKAILSARLSKSRRLENLIAQLPGEKKNGLFGNLIALSLGLTPNFKSNFDLAEDAKLQLSKDTYDDDLDNLLAQIGDQYADLFLAAKNLSDAILLSDILRVNTEITKAPLSASMIKRYDEHHQDLTLLKALVRQQLPEKYKEIFFDQSKNGYAGYIDGGASQEEFYKFIKPILEKMDGTEELLVKLNREDLLRKQRTFDNGSIPHQIHLGELHAILRRQEDFYPFLKDNREKIEKILTFRIPYYVGPLARGNSRFAWMTRKSEETITPWNFEEVVDKGASAQSFIERMTNFDKNLPNEKVLPKHSLLYEYFTVYNELTKVKYVTEGMRKPAFLSGEQKKAIVDLLFKTNRKVTVKQLKEDYFKKIECFDSVEISGVEDRFNASLGTYHDLLKIIKDKDFLDNEENEDILEDIVLTLTLFEDREMIEERLKTYAHLFDDKVMKQLKRRRYTGWGRLSRKLINGIRDKQSGKTILDFLKSDGFANRNFMQLIHDDSLTFKEDIQKAQVSGQGDSLHEHIANLAGSPAIKKGILQTVKVVDELVKVMGRHKPENIVIEMARENQTTQKGQKNSRERMKRIEEGIKELGSQILKEHPVENTQLQNEKLYLYYLQNGRDMYVDQELDINRLSDYDVDHIVPQSFLKDDSIDNKVLTRSDKARGKSDNVPSEEVVKKMKNYWRQLLNAKLITQRKFDNLTKAERGGLSELDKAGFIKRQLVETRQITKHVAQILDSRMNTKYDENDKLIREVKVITLKSKLVSDFRKDFQFYKVREINNYHHAHDAYLNAVVGTALIKKYPKLESEFVYGDYKVYDVRKMIAKSEQEIGKATAKYFFYSNIMNFFKTEITLANGEIRKRPLIETNGETGEIVWDKGRDFATVRKVLSMPQVNIVKKTEVQTGGFSKESILPKRNSDKLIARKKDWDPKKYGGFDSPTVAYSVLVVAKVEKGKSKKLKSVKELLGITIMERSSFEKNPIDFLEAKGYKEVKKDLIIKLPKYSLFELENGRKRMLASAGELQKGNELALPSKYVNFLYLASHYEKLKGSPEDNEQKQLFVEQHKHYLDEIIEQISEFSKRVILADANLDKVLSAYNKHRDKPIREQAENIIHLFTLTNLGAPAAFKYFDTTIDRKRYTSTKEVLDATLIHQSITGLYETRIDLSQLGGDGGPAPAPAPAPAPAPGGVLNLEEEYRLHEKPVPSSIDPSWLQLFPTVWAERAGMGLANQVPPVVVELRSGASPVAVRQYPMSKEAREGIRPHIQKFLDLGVLVPCRSPWNTPLLPVKKPGTNDYRPVQDLREINKRVQDIHPTVPNPYNLLSSLPPSYTWYSVLDLKDAFFCLRLHPNSQPLFAFEWKDPEKGNTGQLTWTRLPQGFKNSPTLFNEALHRDLAPFRALNPQVVLLQYVDDLLVAAPTYEDCKKGTQKLLQELSKLGYRVSAKKAQLCQREVTYLGYLLKEGKRWLTPARKATVMKIPVPTTPRQVREFLGKAGFCRLFIPGFASLAAPLYPLTKPSIPFIWTEEHQQAFDHIKKALLSAPALALPDLTKPFTLYIDERAGVARGVLTQTLGPWRRPVAYLSKKLDPVASGWPTCLKAVAAVALLLKDADKLTLGQNVTVIASHSLESIVRQPPDRWMTNARMTHYQSLLLNERVSFAPPAVLNPATLLPVESEATPVHRCSEILAEETGTRRDLEDQPLPGVPTWYTDGSSFITEGKRRAGAPIVDGKRTVWASSLPEGTSAQKAELVALTQALRLAEGKNINIYTDSRYAFATAHIHGAIYKQRGWLTSAGKDIKNKEEILALLEAIHLPRRVAIIHCPGHQRGSNPVATGNRRADEAAKQAALSTRVLAGTTKPAGKRTADGSEFEKRTADGSEFESPKKKAKVE

SEQ ID NO: 6559 - protein, 2129 aa, synthetic construct
MPAAKRVKLDGGDKKYSIGLDIGTNSVGWAVITDEYKVPSKKFKVLGNTDRHSIKKNLIGALLFDSGETAEATRLKRTARRRYTRRKNRICYLQEIFSNEMAKVDDSFFHRLEESFLVEEDKKHERHPIFGNIVDEVAYHEKYPTIYHLRKKLVDSTDKADLRLIYLALAHMIKFRGHFLIEGDLNPDNSDVDKLFIQLVQTYNQLFEENPINASGVDAKAILSARLSKSRRLENLIAQLPGEKKNGLFGNLIALSLGLTPNFKSNFDLAEDAKLQLSKDTYDDDLDNLLAQIGDQYADLFLAAKNLSDAILLSDILRVNTEITKAPLSASMIKRYDEHHQDLTLLKALVRQQLPEKYKEIFFDQSKNGYAGYIDGGASQEEFYKFIKPILEKMDGTEELLVKLNREDLLRKQRTFDNGSIPHQIHLGELHAILRRQEDFYPFLKDNREKIEKILTFRIPYYVGPLARGNSRFAWMTRKSEETITPWNFEEVVDKGASAQSFIERMTNFDKNLPNEKVLPKHSLLYEYFTVYNELTKVKYVTEGMRKPAFLSGEQKKAIVDLLFKTNRKVTVKQLKEDYFKKIECFDSVEISGVEDRFNASLGTYHDLLKIIKDKDFLDNEENEDILEDIVLTLTLFEDREMIEERLKTYAHLFDDKVMKQLKRRRYTGWGRLSRKLINGIRDKQSGKTILDFLKSDGFANRNFMQLIHDDSLTFKEDIQKAQVSGQGDSLHEHIANLAGSPAIKKGILQTVKVVDELVKVMGRHKPENIVIEMARENQTTQKGQKNSRERMKRIEEGIKELGSQILKEHPVENTQLQNEKLYLYYLQNGRDMYVDQELDINRLSDYDVDHIVPQSFLKDDSIDNKVLTRSDKARGKSDNVPSEEVVKKMKNYWRQLLNAKLITQRKFDNLTKAERGGLSELDKAGFIKRQLVETRQITKHVAQILDSRMNTKYDENDKLIREVKVITLKSKLVSDFRKDFQFYKVREINNYHHAHDAYLNAVVGTALIKKYPKLESEFVYGDYKVYDVRKMIAKSEQEIGKATAKYFFYSNIMNFFKTEITLANGEIRKRPLIETNGETGEIVWDKGRDFATVRKVLSMPQVNIVKKTEVQTGGFSKESILPKRNSDKLIARKKDWDPKKYGGFDSPTVAYSVLVVAKVEKGKSKKLKSVKELLGITIMERSSFEKNPIDFLEAKGYKEVKKDLIIKLPKYSLFELENGRKRMLASAGELQKGNELALPSKYVNFLYLASHYEKLKGSPEDNEQKQLFVEQHKHYLDEIIEQISEFSKRVILADANLDKVLSAYNKHRDKPIREQAENIIHLFTLTNLGAPAAFKYFDTTIDRKRYTSTKEVLDATLIHQSITGLYETRIDLSQLGGDGGPAPAPAPAPAPAPGGLLGRDLLTKLKAQIQFSTEGPQVTWEDRPAMCLVLNLEEEYRLHEKPVPPSIDPSWLQLFPMVWAEKAGMGLANQVPPVVVELKSDASPVAVRQYPMSKEAREGIRPHIQRFLDLGILVPCQSPWNTPLLPVKKPGTNDYRPVQDLREVNKRVQDIHPTVPNPYNLLSSLPPSHTWYSVLDLKDAFFCLKLHPNSQPLFAFEWRDPEKGNTGQLTWTRLPQGFKNSPTLFNEALHRDLASFRALNPQVVMLQYVDDLLVAAPTYRDCKEGTRRLLQELSKLGYRVSAKKAQLCREEVTYLGYLLKGGKRWLTPARKATVMKIPTPTTPRQVREFLGTAGFCRLWIPGFASLAAPLYPLTRPKVPFTWTEAHQEAFGRIKEALLSAPALALPDLTKPFALYVDEKEGVARGVLTQTLGPWRRPVAYLSKKLDPVASGWPTCLKAIAAVALLLKDADKLTLGQNVLVIAPHNLESIVRQPPDRWMTNARMTHYQSLLLNERVSFAPPAILNPATLLPVESDDTPIHICSEILAEETGTRPDLRDQPLPGVPAWYTDGSSFIMDGRRQAGAAIVDNKRTVWASNLPEGTSAQKAELIALTQALRLAEGKSINIYTDSRYAFATAHVHGAIYKQRGWLTSAGKDIKNKEEILALLEAIHLPKRVAIIHCPGHQRGTDPVATGNRKADEAAKQAAQSTRILTETTKNAGKRTADGSEFEKRTADGSEFESPKKKAKVE

SEQ ID NO: 6560 - protein, 2220 aa, synthetic construct
MPAAKRVKLDGGDKKYSIGLDIGTNSVGWAVITDEYKVPSKKFKVLGNTDRHSIKKNLIGALLFDSGETAEATRLKRTARRRYTRRKNRICYLQEIFSNEMAKVDDSFFHRLEESFLVEEDKKHERHPIFGNIVDEVAYHEKYPTIYHLRKKLVDSTDKADLRLIYLALAHMIKFRGHFLIEGDLNPDNSDVDKLFIQLVQTYNQLFEENPINASGVDAKAILSARLSKSRRLENLIAQLPGEKKNGLFGNLIALSLGLTPNFKSNFDLAEDAKLQLSKDTYDDDLDNLLAQIGDQYADLFLAAKNLSDAILLSDILRVNTEITKAPLSASMIKRYDEHHQDLTLLKALVRQQLPEKYKEIFFDQSKNGYAGYIDGGASQEEFYKFIKPILEKMDGTEELLVKLNREDLLRKQRTFDNGSIPHQIHLGELHAILRRQEDFYPFLKDNREKIEKILTFRIPYYVGPLARGNSRFAWMTRKSEETITPWNFEEVVDKGASAQSFIERMTNFDKNLPNEKVLPKHSLLYEYFTVYNELTKVKYVTEGMRKPAFLSGEQKKAIVDLLFKTNRKVTVKQLKEDYFKKIECFDSVEISGVEDRFNASLGTYHDLLKIIKDKDFLDNEENEDILEDIVLTLTLFEDREMIEERLKTYAHLFDDKVMKQLKRRRYTGWGRLSRKLINGIRDKQSGKTILDFLKSDGFANRNFMQLIHDDSLTFKEDIQKAQVSGQGDSLHEHIANLAGSPAIKKGILQTVKVVDELVKVMGRHKPENIVIEMARENQTTQKGQKNSRERMKRIEEGIKELGSQILKEHPVENTQLQNEKLYLYYLQNGRDMYVDQELDINRLSDYDVDHIVPQSFLKDDSIDNKVLTRSDKARGKSDNVPSEEVVKKMKNYWRQLLNAKLITQRKFDNLTKAERGGLSELDKAGFIKRQLVETRQITKHVAQILDSRMNTKYDENDKLIREVKVITLKSKLVSDFRKDFQFYKVREINNYHHAHDAYLNAVVGTALIKKYPKLESEFVYGDYKVYDVRKMIAKSEQEIGKATAKYFFYSNIMNFFKTEITLANGEIRKRPLIETNGETGEIVWDKGRDFATVRKVLSMPQVNIVKKTEVQTGGFSKESILPKRNSDKLIARKKDWDPKKYGGFDSPTVAYSVLVVAKVEKGKSKKLKSVKELLGITIMERSSFEKNPIDFLEAKGYKEVKKDLIIKLPKYSLFELENGRKRMLASAGELQKGNELALPSKYVNFLYLASHYEKLKGSPEDNEQKQLFVEQHKHYLDEIIEQISEFSKRVILADANLDKVLSAYNKHRDKPIREQAENIIHLFTLTNLGAPAAFKYFDTTIDRKRYTSTKEVLDATLIHQSITGLYETRIDLSQLGGDGGPAPAPAPAPAPAPGGTLGDQGSRGSDPLPEPRVTLTVEGIPTEFLVNTGAEHSVLTKPMGKMGSKRTVVAGATGSKVYPWTTKRLLKIGQKQVTHSFLVIPECPAPLLGRDLLTKLKAQIQFSTEGPQVTWEDRPAMCLVLNLEEEYRLHEKPVPPSIDPSWLQLFPMVWAEKAGMGLANQVPPVVVELKSDASPVAVRQYPMSKEAREGIRPHIQRFLDLGILVPCQSPWNTPLLPVKKPGTNDYRPVQDLREVNKRVQDIHPTVPNPYNLLSSLPPSHTWYSVLDLKDAFFCLKLHPNSQPLFAFEWRDPEKGNTGQLTWTRLPQGFKNSPTLFNEALHRDLASFRALNPQVVMLQYVDDLLVAAPTYRDCKEGTRRLLQELSKLGYRVSAKKAQLCREEVTYLGYLLKGGKRWLTPARKATVMKIPTPTTPRQVREFLGTAGFCRLWIPGFASLAAPLYPLTRPKVPFTWTEAHQEAFGRIKEALLSAPALALPDLTKPFALYVDEKEGVARGVLTQTLGPWRRPVAYLSKKLDPVASGWPTCLKAIAAVALLLKDADKLTLGQNVLVIAPHNLESIVRQPPDRWMTNARMTHYQSLLLNERVSFAPPAILNPATLLPVESDDTPIHICSEILAEETGTRPDLRDQPLPGVPAWYTDGSSFIMDGRRQAGAAIVDNKRTVWASNLPEGTSAQKAELIALTQALRLAEGKSINIYTDSRYAFATAHVHGAIYKQRGWLTSAGKDIKNKEEILALLEAIHLPKRVAIIHCPGHQRGTDPVATGNRKADEAAKQAAQSTRILTETTKNAGKRTADGSEFEKRTADGSEFESPKKKAKVE

SEQ ID NO: 6561 - protein, 2098 aa, synthetic construct
MPAAKRVKLDGGDKKYSIGLDIGTNSVGWAVITDEYKVPSKKFKVLGNTDRHSIKKNLIGALLFDSGETAEATRLKRTARRRYTRRKNRICYLQEIFSNEMAKVDDSFFHRLEESFLVEEDKKHERHPIFGNIVDEVAYHEKYPTIYHLRKKLVDSTDKADLRLIYLALAHMIKFRGHFLIEGDLNPDNSDVDKLFIQLVQTYNQLFEENPINASGVDAKAILSARLSKSRRLENLIAQLPGEKKNGLFGNLIALSLGLTPNFKSNFDLAEDAKLQLSKDTYDDDLDNLLAQIGDQYADLFLAAKNLSDAILLSDILRVNTEITKAPLSASMIKRYDEHHQDLTLLKALVRQQLPEKYKEIFFDQSKNGYAGYIDGGASQEEFYKFIKPILEKMDGTEELLVKLNREDLLRKQRTFDNGSIPHQIHLGELHAILRRQEDFYPFLKDNREKIEKILTFRIPYYVGPLARGNSRFAWMTRKSEETITPWNFEEVVDKGASAQSFIERMTNFDKNLPNEKVLPKHSLLYEYFTVYNELTKVKYVTEGMRKPAFLSGEQKKAIVDLLFKTNRKVTVKQLKEDYFKKIECFDSVEISGVEDRFNASLGTYHDLLKIIKDKDFLDNEENEDILEDIVLTLTLFEDREMIEERLKTYAHLFDDKVMKQLKRRRYTGWGRLSRKLINGIRDKQSGKTILDFLKSDGFANRNFMQLIHDDSLTFKEDIQKAQVSGQGDSLHEHIANLAGSPAIKKGILQTVKVVDELVKVMGRHKPENIVIEMARENQTTQKGQKNSRERMKRIEEGIKELGSQILKEHPVENTQLQNEKLYLYYLQNGRDMYVDQELDINRLSDYDVDHIVPQSFLKDDSIDNKVLTRSDKARGKSDNVPSEEVVKKMKNYWRQLLNAKLITQRKFDNLTKAERGGLSELDKAGFIKRQLVETRQITKHVAQILDSRMNTKYDENDKLIREVKVITLKSKLVSDFRKDFQFYKVREINNYHHAHDAYLNAVVGTALIKKYPKLESEFVYGDYKVYDVRKMIAKSEQEIGKATAKYFFYSNIMNFFKTEITLANGEIRKRPLIETNGETGEIVWDKGRDFATVRKVLSMPQVNIVKKTEVQTGGFSKESILPKRNSDKLIARKKDWDPKKYGGFDSPTVAYSVLVVAKVEKGKSKKLKSVKELLGITIMERSSFEKNPIDFLEAKGYKEVKKDLIIKLPKYSLFELENGRKRMLASAGELQKGNELALPSKYVNFLYLASHYEKLKGSPEDNEQKQLFVEQHKHYLDEIIEQISEFSKRVILADANLDKVLSAYNKHRDKPIREQAENIIHLFTLTNLGAPAAFKYFDTTIDRKRYTSTKEVLDATLIHQSITGLYETRIDLSQLGGDGGPAPAPAPAPAPAPGGTLNIEDEYRLHETSKEPDVSLGSTWLSDFPQAWAETGGMGLAVRQAPLIIPLKATSTPVSIKQYPMSQEARLGIKPHIQRLLDQGILVPCQSPWNTPLLPVKKPGTNDYRPVQDLREVNKRVEDIHPTVPNPYNLLSGLPPSHQWYTVLDLKDAFFCLRLHPTSQPLFAFEWRDPEMGISGQLTWTRLPQGFKNSPTLFNEALHRDLAGFRIQHPDLILLQYVDDLLLAATSELDCQQGTRALLQTLGDLGYRASAKKAQICQKQVKYLGYLLKEGQRWLTEARKETVMGQPIPKTPRQLREFLGTAGFCRLWIPGFAEMAAPLYPLTKPGTLFNWGPDQQKAFQEIKQALLTAPALGLPDLTKPFELFVDEKQGYAKGVLTQKLGPWRRPVAYLSKKLDPVAAGWPPCLRMVAAIAVLTKDAGKLTMGQPLVILAPHAVEALVKQPPDRWLSNARMTHYQALLLDTDRVQFGPVVALNPATLLPLPEEGLQHDCLDILAEAHGTRSDLMDQPLPDADHTWYTDGSSFLQEGQRKAGAAVTTETEVIWARALPAGTSAQRAELIALTQALKMAEGKKLNVYTDSRYAFATAHIHGEIYRRRGWLTSEGKEIKNKDEILALLKALFLPKRLSIIHCPGHQKGNSAEARGNRMADQAAREVATRETPETSTLLAGKRTADGSEFEKRTADGSEFESPKKKAKVE

SEQ ID NO: 6562 - protein, 2098 aa, synthetic construct
MPAAKRVKLDGGDKKYSIGLDIGTNSVGWAVITDEYKVPSKKFKVLGNTDRHSIKKNLIGALLFDSGETAEATRLKRTARRRYTRRKNRICYLQEIFSNEMAKVDDSFFHRLEESFLVEEDKKHERHPIFGNIVDEVAYHEKYPTIYHLRKKLVDSTDKADLRLIYLALAHMIKFRGHFLIEGDLNPDNSDVDKLFIQLVQTYNQLFEENPINASGVDAKAILSARLSKSRRLENLIAQLPGEKKNGLFGNLIALSLGLTPNFKSNFDLAEDAKLQLSKDTYDDDLDNLLAQIGDQYADLFLAAKNLSDAILLSDILRVNTEITKAPLSASMIKRYDEHHQDLTLLKALVRQQLPEKYKEIFFDQSKNGYAGYIDGGASQEEFYKFIKPILEKMDGTEELLVKLNREDLLRKQRTFDNGSIPHQIHLGELHAILRRQEDFYPFLKDNREKIEKILTFRIPYYVGPLARGNSRFAWMTRKSEETITPWNFEEVVDKGASAQSFIERMTNFDKNLPNEKVLPKHSLLYEYFTVYNELTKVKYVTEGMRKPAFLSGEQKKAIVDLLFKTNRKVTVKQLKEDYFKKIECFDSVEISGVEDRFNASLGTYHDLLKIIKDKDFLDNEENEDILEDIVLTLTLFEDREMIEERLKTYAHLFDDKVMKQLKRRRYTGWGRLSRKLINGIRDKQSGKTILDFLKSDGFANRNFMQLIHDDSLTFKEDIQKAQVSGQGDSLHEHIANLAGSPAIKKGILQTVKVVDELVKVMGRHKPENIVIEMARENQTTQKGQKNSRERMKRIEEGIKELGSQILKEHPVENTQLQNEKLYLYYLQNGRDMYVDQELDINRLSDYDVDHIVPQSFLKDDSIDNKVLTRSDKARGKSDNVPSEEVVKKMKNYWRQLLNAKLITQRKFDNLTKAERGGLSELDKAGFIKRQLVETRQITKHVAQILDSRMNTKYDENDKLIREVKVITLKSKLVSDFRKDFQFYKVREINNYHHAHDAYLNAVVGTALIKKYPKLESEFVYGDYKVYDVRKMIAKSEQEIGKATAKYFFYSNIMNFFKTEITLANGEIRKRPLIETNGETGEIVWDKGRDFATVRKVLSMPQVNIVKKTEVQTGGFSKESILPKRNSDKLIARKKDWDPKKYGGFDSPTVAYSVLVVAKVEKGKSKKLKSVKELLGITIMERSSFEKNPIDFLEAKGYKEVKKDLIIKLPKYSLFELENGRKRMLASAGELQKGNELALPSKYVNFLYLASHYEKLKGSPEDNEQKQLFVEQHKHYLDEIIEQISEFSKRVILADANLDKVLSAYNKHRDKPIREQAENIIHLFTLTNLGAPAAFKYFDTTIDRKRYTSTKEVLDATLIHQSITGLYETRIDLSQLGGDGGPAPAPAPAPAPAPGGTLNIEDEHRLHETSKEPDVSLGSTWLSDFPQAWAETGGMGLAVRQAPLIIPLKATSTPVSIKQYPMSQEARLGIKPHIQRLLDQGILVPCQSPWNTPLLPVKKPGTNDYRPVQDLREVNKRVEDIHPTVPNPYNLLSGLPPSHQWYTVLDLKDAFFCLRLHPTSQPLFAFEWRDPEMGISGQLTWTRLPQGFKNSPTLFDEALHRDLADFRIQHPDLILLQYVDDLLLAATSELDCQQGTRALLQTLGNLGYRASAKKAQICQKQVKYLGYLLKEGQRWLTEARKETVMGQPTPKTPRQLREFLGTAGFCRLWIPGFAEMAAPLYPLTKTGTLFNWGPDQQKAYQEIKQALLTAPALGLPDLTKPFELFVDEKQGYAKGVLTQKLGPWRRPVAYLSKKLDPVAAGWPPCLRMVAAIAVLTKDAGKLTMGQPLVILAPHAVEALVKQPPDRWLSNARMTHYQALLLDTDRVQFGPVVALNPATLLPLPEEGLQHNCLDILAEAHGTRPDLTDQPLPDADHTWYTDGSSLLQEGQRKAGAAVTTETEVIWAKALPAGTSAQRAELIALTQALKMAEGKKLNVYTDSRYAFATAHIHGEIYRRRGLLTSEGKEIKNKDEILALLKALFLPKRLSIIHCPGHQKGHSAEARGNRMADQAARKAAITETPDTSTLLAGKRTADGSEFEKRTADGSEFESPKKKAKVE

SEQ ID NO: 6563 - protein, 2098 aa, synthetic construct; identical to SEQ ID NO: 6562

SEQ ID NO: 6564 - protein, 2092 aa, synthetic construct
MPAAKRVKLDGGDKKYSIGLDIGTNSVGWAVITDEYKVPSKKFKVLGNTDRHSIKKNLIGALLFDSGETAEATRLKRTARRRYTRRKNRICYLQEIFSNEMAKVDDSFFHRLEESFLVEEDKKHERHPIFGNIVDEVAYHEKYPTIYHLRKKLVDSTDKADLRLIYLALAHMIKFRGHFLIEGDLNPDNSDVDKLFIQLVQTYNQLFEENPINASGVDAKAILSARLSKSRRLENLIAQLPGEKKNGLFGNLIALSLGLTPNFKSNFDLAEDAKLQLSKDTYDDDLDNLLAQIGDQYADLFLAAKNLSDAILLSDILRVNTEITKAPLSASMIKRYDEHHQDLTLLKALVRQQLPEKYKEIFFDQSKNGYAGYIDGGASQEEFYKFIKPILEKMDGTEELLVKLNREDLLRKQRTFDNGSIPHQIHLGELHAILRRQEDFYPFLKDNREKIEKILTFRIPYYVGPLARGNSRFAWMTRKSEETITPWNFEEVVDKGASAQSFIERMTNFDKNLPNEKVLPKHSLLYEYFTVYNELTKVKYVTEGMRKPAFLSGEQKKAIVDLLFKTNRKVTVKQLKEDYFKKIECFDSVEISGVEDRFNASLGTYHDLLKIIKDKDFLDNEENEDILEDIVLTLTLFEDREMIEERLKTYAHLFDDKVMKQLKRRRYTGWGRLSRKLINGIRDKQSGKTILDFLKSDGFANRNFMQLIHDDSLTFKEDIQKAQVSGQGDSLHEHIANLAGSPAIKKGILQTVKVVDELVKVMGRHKPENIVIEMARENQTTQKGQKNSRERMKRIEEGIKELGSQILKEHPVENTQLQNEKLYLYYLQNGRDMYVDQELDINRLSDYDVDHIVPQSFLKDDSIDNKVLTRSDKARGKSDNVPSEEVVKKMKNYWRQLLNAKLITQRKFDNLTKAERGGLSELDKAGFIKRQLVETRQITKHVAQILDSRMNTKYDENDKLIREVKVITLKSKLVSDFRKDFQFYKVREINNYHHAHDAYLNAVVGTALIKKYPKLESEFVYGDYKVYDVRKMIAKSEQEIGKATAKYFFYSNIMNFFKTEITLANGEIRKRPLIETNGETGEIVWDKGRDFATVRKVLSMPQVNIVKKTEVQTGGFSKESILPKRNSDKLIARKKDWDPKKYGGFDSPTVAYSVLVVAKVEKGKSKKLKSVKELLGITIMERSSFEKNPIDFLEAKGYKEVKKDLIIKLPKYSLFELENGRKRMLASAGELQKGNELALPSKYVNFLYLASHYEKLKGSPEDNEQKQLFVEQHKHYLDEIIEQISEFSKRVILADANLDKVLSAYNKHRDKPIREQAENIIHLFTLTNLGAPAAFKYFDTTIDRKRYTSTKEVLDATLIHQSITGLYETRIDLSQLGGDGGPAPAPAPAPAPAPGGTLQLDDEYRLYSPLVKPDQNIQFWLEQFPQAWAETAGMGLAKQVPPQVIQLKASATPVSVRQYPLSKEAQEGIRPHVQRLIQQGILVPVQSPWNTPLLPVRKPGTNDYRPVQDLREVNKRVQDIHPTVPNPYNLLCALPPQRSWYTVLDLKDAFFCLRLHPTSQPLFAFEWRDPGTGRTGQLTWTRLPQGFKNSPTIFDEALHRDLANFRIQHPQVTLLQYVDDLLLAGATKQDCLEGTKALLLELSDLGYRASAKKAQICRREVTYLGYSLRDGQRWLTEARKKTVVQIPAPTTAKQVREFLGTAGFCRLWIPGFATLAAPLYPLTKEKGEFSWAPEHQKAFDAIKKALLSAPALALPDVTKPFTLYVDERKGVARGVLTQTLGPWRRPVAYLSKKLDPVASGWPVCLKAIAAVAILVKDADKLTLGQNITVIAPHALENIVRQPPDRWMTNARMTHYQSLLLTERVTFAPPAALNPATLLPEETDEPVTHDCHQLLIEETGVRKDLTDIPLTGEVLTWFTDGSSYVVEGKRMAGAAVVDGTRTIWASSLPEGTSAQKAELMALTQALRLAEGKSINIYTDSRYAFATAHVHGAIYKQRGLLTSAGREIKNKEEILSLLEALHLPKRLAIIHCPGHQKAKDPISRGNQMADRVAKQAAQGVNLLAGKRTADGSEFEKRTADGSEFESPKKKAKVE

SEQ ID NO: 6565 - protein, 2092 aa, synthetic construct; identical to SEQ ID NO: 6564

SEQ ID NO: 6566 - protein, 2178 aa, synthetic construct
MPAAKRVKLDGGDKKYSIGLDIGTNSVGWAVITDEYKVPSKKFKVLGNTDRHSIKKNLIGALLFDSGETAEATRLKRTARRRYTRRKNRICYLQEIFSNEMAKVDDSFFHRLEESFLVEEDKKHERHPIFGNIVDEVAYHEKYPTIYHLRKKLVDSTDKADLRLIYLALAHMIKFRGHFLIEGDLNPDNSDVDKLFIQLVQTYNQLFEENPINASGVDAKAILSARLSKSRRLENLIAQLPGEKKNGLFGNLIALSLGLTPNFKSNFDLAEDAKLQLSKDTYDDDLDNLLAQIGDQYADLFLAAKNLSDAILLSDILRVNTEITKAPLSASMIKRYDEHHQDLTLLKALVRQQLPEKYKEIFFDQSKNGYAGYIDGGASQEEFYKFIKPILEKMDGTEELLVKLNREDLLRKQRTFDNGSIPHQIHLGELHAILRRQEDFYPFLKDNREKIEKILTFRIPYYVGPLARGNSRFAWMTRKSEETITPWNFEEVVDKGASAQSFIERMTNFDKNLPNEKVLPKHSLLYEYFTVYNELTKVKYVTEGMRKPAFLSGEQKKAIVDLLFKTNRKVTVKQLKEDYFKKIECFDSVEISGVEDRFNASLGTYHDLLKIIKDKDFLDNEENEDILEDIVLTLTLFEDREMIEERLKTYAHLFDDKVMKQLKRRRYTGWGRLSRKLINGIRDKQSGKTILDFLKSDGFANRNFMQLIHDDSLTFKEDIQKAQVSGQGDSLHEHIANLAGSPAIKKGILQTVKVVDELVKVMGRHKPENIVIEMARENQTTQKGQKNSRERMKRIEEGIKELGSQILKEHPVENTQLQNEKLYLYYLQNGRDMYVDQELDINRLSDYDVDHIVPQSFLKDDSIDNKVLTRSDKARGKSDNVPSEEVVKKMKNYWRQLLNAKLITQRKFDNLTKAERGGLSELDKAGFIKRQLVETRQITKHVAQILDSRMNTKYDENDKLIREVKVITLKSKLVSDFRKDFQFYKVREINNYHHAHDAYLNAVVGTALIKKYPKLESEFVYGDYKVYDVRKMIAKSEQEIGKATAKYFFYSNIMNFFKTEITLANGEIRKRPLIETNGETGEIVWDKGRDFATVRKVLSMPQVNIVKKTEVQTGGFSKESILPKRNSDKLIARKKDWDPKKYGGFDSPTVAYSVLVVAKVEKGKSKKLKSVKELLGITIMERSSFEKNPIDFLEAKGYKEVKKDLIIKLPKYSLFELENGRKRMLASAGELQKGNELALPSKYVNFLYLASHYEKLKGSPEDNEQKQLFVEQHKHYLDEIIEQISEFSKRVILADANLDKVLSAYNKHRDKPIREQAENIIHLFTLTNLGAPAAFKYFDTTIDRKRYTSTKEVLDATLIHQSITGLYETRIDLSQLGGDGGPAPAPAPAPAPAPGGMDPLQLLQPLEAEIKGTKLKAHWNSGATITCVPQAFLEEEVPIKNIWIKTIHGEKEQPVYYLTFKIQGRKVEAEVISSPYDYILVSPSDIPWLMKKPLQLTTLVPLQEYEERLLKQTMLTGSYKEKLQSLFLKYDALWQHWENQVGHRRIKPHHIATGTVNPRPQKQYPINPKAKASIQTVINDLLKQGVLIQQNSIMNTPVYPVPKPDGKWRMVLDYREVNKTIPLIAAQNQHSAGILSSIFRGKYKTTLDLSNGFWAHSITPESYWLTAFTWLGQQYCWTRLPQGFLNSPALFNADVVDLLKEVPNVQVYVDDIYISHDDPREHLEQLEKVFSLLLNAGYVVSLKKSEIAQHEVEFLGFNITKEGRGLTETFKQKLLNITPPRDLKQLQSILGLLNFARNFIPNFSELVKPLYNIIATAPGKYITWTTDNSQQLQNIISMLNSAENLEERNPEVRLIMKVNTSPSAGYIRFYNEFAKRPIMYLNYVYTKAEVKFTNTEKLLTTIHKGLIKALDLGMGQEILVYSPIVSMTKIQKTPLPERKALPIRWITWMSYLEDPRIQFHYDKTLPELQQVPTVTDDIIAKIKHPSEFSMVFYTDGSAIKHPNVNKSHNAGMGIAQVQFKPEFTVINTWSIPLGDHTAQLAEVAAVEFACKKALKIDGPVLIVTDSFYVAESVNKELPYWQSNGFFNNKKKPLKHVSKWKSIADCIQLKPDIIIIHEKGHQPTASTFHTEGNNLADKLATQGSYVVNAGKRTADGSEFEKRTADGSEFESPKKKAKVE

SEQ ID NO: 6567 - protein, 2096 aa, synthetic construct; identical to SEQ ID NO: 4509

SEQ ID NO: 6568 - protein, 2098 aa, synthetic construct; identical to SEQ ID NO: 4510

SEQ ID NO: 6569 - protein, 2093 aa, synthetic construct
MPAAKRVKLDGGDKKYSIGLDIGTNSVGWAVITDEYKVPSKKFKVLGNTDRHSIKKNLIGALLFDSGETAEATRLKRTARRRYTRRKNRICYLQEIFSNEMAKVDDSFFHRLEESFLVEEDKKHERHPIFGNIVDEVAYHEKYPTIYHLRKKLVDSTDKADLRLIYLALAHMIKFRGHFLIEGDLNPDNSDVDKLFIQLVQTYNQLFEENPINASGVDAKAILSARLSKSRRLENLIAQLPGEKKNGLFGNLIALSLGLTPNFKSNFDLAEDAKLQLSKDTYDDDLDNLLAQIGDQYADLFLAAKNLSDAILLSDILRVNTEITKAPLSASMIKRYDEHHQDLTLLKALVRQQLPEKYKEIFFDQSKNGYAGYIDGGASQEEFYKFIKPILEKMDGTEELLVKLNREDLLRKQRTFDNGSIPHQIHLGELHAILRRQEDFYPFLKDNREKIEKILTFRIPYYVGPLARGNSRFAWMTRKSEETITPWNFEEVVDKGASAQSFIERMTNFDKNLPNEKVLPKHSLLYEYFTVYNELTKVKYVTEGMRKPAFLSGEQKKAIVDLLFKTNRKVTVKQLKEDYFKKIECFDSVEISGVEDRFNASLGTYHDLLKIIKDKDFLDNEENEDILEDIVLTLTLFEDREMIEERLKTYAHLFDDKVMKQLKRRRYTGWGRLSRKLINGIRDKQSGKTILDFLKSDGFANRNFMQLIHDDSLTFKEDIQKAQVSGQGDSLHEHIANLAGSPAIKKGILQTVKVVDELVKVMGRHKPENIVIEMARENQTTQKGQKNSRERMKRIEEGIKELGSQILKEHPVENTQLQNEKLYLYYLQNGRDMYVDQELDINRLSDYDVDHIVPQSFLKDDSIDNKVLTRSDKARGKSDNVPSEEVVKKMKNYWRQLLNAKLITQRKFDNLTKAERGGLSELDKAGFIKRQLVETRQITKHVAQILDSRMNTKYDENDKLIREVKVITLKSKLVSDFRKDFQFYKVREINNYHHAHDAYLNAVVGTALIKKYPKLESEFVYGDYKVYDVRKMIAKSEQEIGKATAKYFFYSNIMNFFKTEITLANGEIRKRPLIETNGETGEIVWDKGRDFATVRKVLSMPQVNIVKKTEVQTGGFSKESILPKRNSDKLIARKKDWDPKKYGGFDSPTVAYSVLVVAKVEKGKSKKLKSVKELLGITIMERSSFEKNPIDFLEAKGYKEVKKDLIIKLPKYSLFELENGRKRMLASAGELQKGNELALPSKYVNFLYLASHYEKLKGSPEDNEQKQLFVEQHKHYLDEIIEQISEFSKRVILADANLDKVLSAYNKHRDKPIREQAENIIHLFTLTNLGAPAAFKYFDTTIDRKRYTSTKEVLDATLIHQSITGLYETRIDLSQLGGDGGGGSGGGGGTAPLEEEYRLFLEAPIQNVTLLEQWKREIPKVWAEINPPGLASTQAPIHVQLLSTALPVRVRQYPITLEAKRSLRETIRKFRAAGILRPVHSPWNTPLLPVRKSGTSEYRMVQDLREVNKRVETIHPTVPNPYTLLSLLPPDRIWYSVLDLKDAFFCIPLAPESQLIFAFEWADAEEGESGQLTWTRLPQGFKNSPTLFNEALNRDLQGFRLDHPSVSLLQYVDDLLIAADTQAACLSATRDLLMTLAELGYRVSGKKAQLCQEEVTYLGFKIHKGSRSLSNSRTQAILQIPVPKTKRQVREFLGTIGYCRLWIPGFAELAQPLYAATRPGNDPLVWGEKEEEAFQSLKLALTQPPALALPSLDKPFQLFVEETSGAAKGVLTQALGPWKRPVAYLSKRLDPVAAGWPRCLRAIAAAALLTREASKLTFGQDIEITSSHNLESLLRSPPDKWLTNARITQYQVLLLDPPRVRFKQTAALNPATLLPETDDTLPIHHCLDTLDSLTSTRPDLTDQPLAQAEATLFTDGSSYIRDGKRYAGAAVVTLDSVIWAEPLPIGTSAQKAELIALTKALEWSKDKSVNIYTDSRYAFATLHVHGMIYRERGWLTAGGKAIKNAPEILALLTAVWLPKRVAVMHCKGHQKDDAPTSTGNRRADEVAREVAIRPLSTQATISAGKRTADGSEFEKRTADGSEFESPKKKAKVE

SEQ ID NO: 6570 - protein, 2082 aa, synthetic construct
MPAAKRVKLDGGDKKYSIGLDIGTNSVGWAVITDEYKVPSKKFKVLGNTDRHSIKKNLIGALLFDSGETAEATRLKRTARRRYTRRKNRICYLQEIFSNEMAKVDDSFFHRLEESFLVEEDKKHERHPIFGNIVDEVAYHEKYPTIYHLRKKLVDSTDKADLRLIYLALAHMIKFRGHFLIEGDLNPDNSDVDKLFIQLVQTYNQLFEENPINASGVDAKAILSARLSKSRRLENLIAQLPGEKKNGLFGNLIALSLGLTPNFKSNFDLAEDAKLQLSKDTYDDDLDNLLAQIGDQYADLFLAAKNLSDAILLSDILRVNTEITKAPLSASMIKRYDEHHQDLTLLKALVRQQLPEKYKEIFFDQSKNGYAGYIDGGASQEEFYKFIKPILEKMDGTEELLVKLNREDLLRKQRTFDNGSIPHQIHLGELHAILRRQEDFYPFLKDNREKIEKILTFRIPYYVGPLARGNSRFAWMTRKSEETITPWNFEEVVDKGASAQSFIERMTNFDKNLPNEKVLPKHSLLYEYFTVYNELTKVKYVTEGMRKPAFLSGEQKKAIVDLLFKTNRKVTVKQLKEDYFKKIECFDSVEISGVEDRFNASLGTYHDLLKIIKDKDFLDNEENEDILEDIVLTLTLFEDREMIEERLKTYAHLFDDKVMKQLKRRRYTGWGRLSRKLINGIRDKQSGKTILDFLKSDGFANRNFMQLIHDDSLTFKEDIQKAQVSGQGDSLHEHIANLAGSPAIKKGILQTVKVVDELVKVMGRHKPENIVIEMARENQTTQKGQKNSRERMKRIEEGIKELGSQILKEHPVENTQLQNEKLYLYYLQNGRDMYVDQELDINRLSDYDVDHIVPQSFLKDDSIDNKVLTRSDKARGKSDNVPSEEVVKKMKNYWRQLLNAKLITQRKFDNLTKAERGGLSELDKAGFIKRQLVETRQITKHVAQILDSRMNTKYDENDKLIREVKVITLKSKLVSDFRKDFQFYKVREINNYHHAHDAYLNAVVGTALIKKYPKLESEFVYGDYKVYDVRKMIAKSEQEIGKATAKYFFYSNIMNFFKTEITLANGEIRKRPLIETNGETGEIVWDKGRDFATVRKVLSMPQVNIVKKTEVQTGGFSKESILPKRNSDKLIARKKDWDPKKYGGFDSPTVAYSVLVVAKVEKGKSKKLKSVKELLGITIMERSSFEKNPIDFLEAKGYKEVKKDLIIKLPKYSLFELENGRKRMLASAGELQKGNELALPSKYVNFLYLASHYEKLKGSPEDNEQKQLFVEQHKHYLDEIIEQISEFSKRVILADANLDKVLSAYNKHRDKPIREQAENIIHLFTLTNLGAPAAFKYFDTTIDRKRYTSTKEVLDATLIHQSITGLYETRIDLSQLGGDGGGGSGGGGGVPWILKKPLELTIKLDLEEQQGTLLNNSILSKKGKEELKQLFEKYSALWQSWENQVGHRRIRPHKIATGTVKPTPQKQYHINPKAKPDIQIVINDLLKQGVLIQKESTMNTPVYPVPKPNGRWRMVLDYRAVNKVTPLIAVQNQHSYGILGSLFKGRYKTTIDLSNGFWAHPIVPEDYWITAFTWQGKQYCWTVLPQGFLNSPGLFTGDVVDLLQGIPNVEVYVDDVYISHDSEKEHLEYLDILFNRLKEAGYIISLKKSNIANSIVDFLGFQITNEGRGLTDTFKEKLENITAPTTLKQLQSILGLLNFARNFIPDFTELIAPLYALIPKSTKNYVPWQIEHSTTLETLITKLNGAEYLQGRKGDKTLIMKVNASYTTGYIRYYNEGEKKPISYVSIVFSKTELKFTELEKLLTTVHKGLLKALDLSMGQNIHVYSPIVSMQNIQKTPQTAKKALASRWLSWLSYLEDPRIRFFYDPQMPALKDLPAVDTGKDNKKHPSNFQHIFYTDGSAITSPTKEGHLNAGMGIVYFINKDGNLQKQQEWSISLGNHTAQFAEIAAFEFALKKCLPLGGNILVVTDSNYVAKAYNEELDVWASNGFVNNRKKPLKHISKWKSVADLKRLRPDVVVTHEPGHQKLDSSPHAYGNNLADQLATQASFKVHAGKRTADGSEFEKRTADGSEFESPKKKAKVE

SEQ ID NO: 6571 - protein, 2082 aa, synthetic construct
MPAAKRVKLDGGDKKYSIGLDIGTNSVGWAVITDEYKVPSKKFKVLGNTDRHSIKKNLIGALLFDSGETAEATRLKRTARRRYTRRKNRICYLQEIFSNEMAKVDDSFFHRLEESFLVEEDKKHERHPIFGNIVDEVAYHEKYPTIYHLRKKLVDSTDKADLRLIYLALAHMIKFRGHFLIEGDLNPDNSDVDKLFIQLVQTYNQLFEENPINASGVDAKAILSARLSKSRRLENLIAQLPGEKKNGLFGNLIALSLGLTPNFKSNFDLAEDAKLQLSKDTYDDDLDNLLAQIGDQYADLFLAAKNLSDAILLSDILRVNTEITKAPLSASMIKRYDEHHQDLTLLKALVRQQLPEKYKEIFFDQSKNGYAGYIDGGASQEEFYKFIKPILEKMDGTEELLVKLNREDLLRKQRTFDNGSIPHQIHLGELHAILRRQEDFYPFLKDNREKIEKILTFRIPYYVGPLARGNSRFAWMTRKSEETITPWNFEEVVDKGASAQSFIERMTNFDKNLPNEKVLPKHSLLYEYFTVYNELTKVKYVTEGMRKPAFLSGEQKKAIVDLLFKTNRKVTVKQLKEDYFKKIECFDSVEISGVEDRFNASLGTYHDLLKIIKDKDFLDNEENEDILEDIVLTLTLFEDREMIEERLKTYAHLFDDKVMKQLKRRRYTGWGRLSRKLINGIRDKQSGKTILDFLKSDGFANRNFMQLIHDDSLTFKEDIQKAQVSGQGDSLHEHIANLAGSPAIKKGILQTVKVVDELVKVMGRHKPENIVIEMARENQTTQKGQKNSRERMKRIEEGIKELGSQILKEHPVENTQLQNEKLYLYYLQNGRDMYVDQELDINRLSDYDVDHIVPQSFLKDDSIDNKVLTRSDKARGKSDNVPSEEVVKKMKNYWRQLLNAKLITQRKFDNLTKAERGGLSELDKAGFIKRQLVETRQITKHVAQILDSRMNTKYDENDKLIREVKVITLKSKLVSDFRKDFQFYKVREINNYHHAHDAYLNAVVGTALIKKYPKLESEFVYGDYKVYDVRKMIAKSEQEIGKATAKYFFYSNIMNFFKTEITLANGEIRKRPLIETNGETGEIVWDKGRDFATVRKVLSMPQVNIVKKTEVQTGGFSKESILPKRNSDKLIARKKDWDPKKYGGFDSPTVAYSVLVVAKVEKGKSKKLKSVKELLGITIMERSSFEKNPIDFLEAKGYKEVKKDLIIKLPKYSLFELENGRKRMLASAGELQKGNELALPSKYVNFLYLASHYEKLKGSPEDNEQKQLFVEQHKHYLDEIIEQISEFSKRVILADANLDKVLSAYNKHRDKPIREQAENIIHLFTLTNLGAPAAFKYFDTTIDRKRYTSTKEVLDATLIHQSITGLYETRIDLSQLGGDGGGGSGGGGGVPWILKKPLELTIKLDLEEQQGTLLNNSILSKKGKEELKQLFEKYSALWQSWENQVGHRRIRPHKIATGTVKPTPQKQYHINPKAKPDIQIVINDLLKQGVLIQKESTMNTPVYPVPKPNGRWRMVLDYRAVNKVTPLIAVQNQHSYGILGSLFKGRYKTTIDLSNGFWAHPIVPEDYWITAFTWQGKQYCWTVLPQGFLNSPGLFNGDVVDLLQGIPNVEVYVDDVYISHDSEKEHLEYLDILFNRLKEAGYIISLKKSNIANSIVDFLGFQITNEGRGLTDTFKEKLENITAPTTLKQLQSILGLLNFARNFIPDFTELIAPLYALIPKSPKNYVPWQIEHSTTLETLITKLNGAEYLQGRKGDKTLIMKVNASYTTGYIRYYNEGEKKPISYVSIVFSKTELKFTELEKLLTTVHKGLLKALDLSMGQNIHVYSPIVSMQNIQKTPQTAKKALASRWLSWLSYLEDPRIRFFYDPQMPALKDLPAVDTGKDNKKHPSNFQHIFYTDGSAITSPTKEGHLNAGMGIVYFINKDGNLQKQQEWSISLGNHTAQFAEIAAFEFALKKCLPLGGNILVVTDSNYVAKAYNEELDVWASNGFVNNRKKPLKHISKWKSVADLKRLRPDVVVTHEPGHQKLDSSPHAYGNNLADQLATQASFKVHAGKRTADGSEFEKRTADGSEFESPKKKAKVE

SEQ ID NO: 6572 - protein, 2090 aa, synthetic construct
MPAAKRVKLDGGDKKYSIGLDIGTNSVGWAVITDEYKVPSKKFKVLGNTDRHSIKKNLIGALLFDSGETAEATRLKRTARRRYTRRKNRICYLQEIFSNEMAKVDDSFFHRLEESFLVEEDKKHERHPIFGNIVDEVAYHEKYPTIYHLRKKLVDSTDKADLRLIYLALAHMIKFRGHFLIEGDLNPDNSDVDKLFIQLVQTYNQLFEENPINASGVDAKAILSARLSKSRRLENLIAQLPGEKKNGLFGNLIALSLGLTPNFKSNFDLAEDAKLQLSKDTYDDDLDNLLAQIGDQYADLFLAAKNLSDAILLSDILRVNTEITKAPLSASMIKRYDEHHQDLTLLKALVRQQLPEKYKEIFFDQSKNGYAGYIDGGASQEEFYKFIKPILEKMDGTEELLVKLNREDLLRKQRTFDNGSIPHQIHLGELHAILRRQEDFYPFLKDNREKIEKILTFRIPYYVGPLARGNSRFAWMTRKSEETITPWNFEEVVDKGASAQSFIERMTNFDKNLPNEKVLPKHSLLYEYFTVYNELTKVKYVTEGMRKPAFLSGEQKKAIVDLLFKTNRKVTVKQLKEDYFKKIECFDSVEISGVEDRFNASLGTYHDLLKIIKDKDFLDNEENEDILEDIVLTLTLFEDREMIEERLKTYAHLFDDKVMKQLKRRRYTGWGRLSRKLINGIRDKQSGKTILDFLKSDGFANRNFMQLIHDDSLTFKEDIQKAQVSGQGDSLHEHIANLAGSPAIKKGILQTVKVVDELVKVMGRHKPENIVIEMARENQTTQKGQKNSRERMKRIEEGIKELGSQILKEHPVENTQLQNEKLYLYYLQNGRDMYVDQELDINRLSDYDVDHIVPQSFLKDDSIDNKVLTRSDKARGKSDNVPSEEVVKKMKNYWRQLLNAKLITQRKFDNLTKAERGGLSELDKAGFIKRQLVETRQITKHVAQILDSRMNTKYDENDKLIREVKVITLKSKLVSDFRKDFQFYKVREINNYHHAHDAYLNAVVGTALIKKYPKLESEFVYGDYKVYDVRKMIAKSEQEIGKATAKYFFYSNIMNFFKTEITLANGEIRKRPLIETNGETGEIVWDKGRDFATVRKVLSMPQVNIVKKTEVQTGGFSKESILPKRNSDKLIARKKDWDPKKYGGFDSPTVAYSVLVVAKVEKGKSKKLKSVKELLGITIMERSSFEKNPIDFLEAKGYKEVKKDLIIKLPKYSLFELENGRKRMLASAGELQKGNELALPSKYVNFLYLASHYEKLKGSPEDNEQKQLFVEQHKHYLDEIIEQISEFSKRVILADANLDKVLSAYNKHRDKPIREQAENIIHLFTLTNLGAPAAFKYFDTTIDRKRYTSTKEVLDATLIHQSITGLYETRIDLSQLGGDGGGGSGGGGGTLQLEEEYRLFEPESTQKQEMDIWLKNFPQAWAETGGMGTAHCQAPVLIQLKATATPISIRQYPMPHEAYQGIKPHIRRMLDQGILKPCQSPWNTPLLPVKKPGTEDYRPVQDLREVNKRVEDIHPTVPNPYNLLSTLPPSHPWYTVLDLKDAFFCLRLHSESQLLFAFEWRDPEIGLSGQLTWTRLPQGFKNSPTLFNEALHSDLADFRVRYPALVLLQYVDDLLLAAATRTECLEGTKALLETLGNKGYRASAKKAQICLQEVTYLGYSLKDGQRWLTKARKEAILSIPVPKNSRQVREFLGKAGYCRLFIPGFAELAAPLYPLTRPGTLFQWGTEQQLAFEDIKKALLSSPALGLPDITKPFELFIDENSGFAKGVLVQKLGPWKRPVAYLSKKLDTVASGWPPCLRMVAAIAILVKDAGKLTLGQPLTILTSHPVEALVRQPPNKWLSNARMTHYQAMLLDAERVHFGPTVSLNPATLLPLPSGGNHHDCLQILAETHGTRPDLTDQPLPDADLTWYTDGSSFIRNGEREAGAAVTTESEVIWAAPLPPGTSAQRAELIALTQALKMAEGKKLTVYTDSRYAFATTHVHGEIYRRRGWLTSEGKEIKNKNEILALLEALFLPKRLSIIHCPGHQKGDSPQAKGNRLADDTAKKAATETHSSLTVLPAGKRTADGSEFEKRTADGSEFESPKKKAKVE

SEQ ID NO: 6573 - protein, 2082 aa, synthetic construct
MPAAKRVKLDGGDKKYSIGLDIGTNSVGWAVITDEYKVPSKKFKVLGNTDRHSIKKNLIGALLFDSGETAEATRLKRTARRRYTRRKNRICYLQEIFSNEMAKVDDSFFHRLEESFLVEEDKKHERHPIFGNIVDEVAYHEKYPTIYHLRKKLVDSTDKADLRLIYLALAHMIKFRGHFLIEGDLNPDNSDVDKLFIQLVQTYNQLFEENPINASGVDAKAILSARLSKSRRLENLIAQLPGEKKNGLFGNLIALSLGLTPNFKSNFDLAEDAKLQLSKDTYDDDLDNLLAQIGDQYADLFLAAKNLSDAILLSDILRVNTEITKAPLSASMIKRYDEHHQDLTLLKALVRQQLPEKYKEIFFDQSKNGYAGYIDGGASQEEFYKFIKPILEKMDGTEELLVKLNREDLLRKQRTFDNGSIPHQIHLGELHAILRRQEDFYPFLKDNREKIEKILTFRIPYYVGPLARGNSRFAWMTRKSEETITPWNFEEVVDKGASAQSFIERMTNFDKNLPNEKVLPKHSLLYEYFTVYNELTKVKYVTEGMRKPAFLSGEQKKAIVDLLFKTNRKVTVKQLKEDYFKKIECFDSVEISGVEDRFNASLGTYHDLLKIIKDKDFLDNEENEDILEDIVLTLTLFEDREMIEERLKTYAHLFDDKVMKQLKRRRYTGWGRLSRKLINGIRDKQSGKTILDFLKSDGFANRNFMQLIHDDSLTFKEDIQKAQVSGQGDSLHEHIANLAGSPAIKKGILQTVKVVDELVKVMGRHKPENIVIEMARENQTTQKGQKNSRERMKRIEEGIKELGSQILKEHPVENTQLQNEKLYLYYLQNGRDMYVDQELDINRLSDYDVDHIVPQSFLKDDSIDNKVLTRSDKARGKSDNVPSEEVVKKMKNYWRQLLNAKLITQRKFDNLTKAERGGLSELDKAGFIKRQLVETRQITKHVAQILDSRMNTKYDENDKLIREVKVITLKSKLVSDFRKDFQFYKVREINNYHHAHDAYLNAVVGTALIKKYPKLESEFVYGDYKVYDVRKMIAKSEQEIGKATAKYFFYSNIMNFFKTEITLANGEIRKRPLIETNGETGEIVWDKGRDFATVRKVLSMPQVNIVKKTEVQTGGFSKESILPKRNSDKLIARKKDWDPKKYGGFDSPTVAYSVLVVAKVEKGKSKKLKSVKELLGITIMERSSFEKNPIDFLEAKGYKEVKKDLIIKLPKYSLFELENGRKRMLASAGELQKGNELALPSKYVNFLYLASHYEKLKGSPEDNEQKQLFVEQHKHYLDEIIEQISEFSKRVILADANLDKVLSAYNKHRDKPIREQAENIIHLFTLTNLGAPAAFKYFDTTIDRKRYTSTKEVLDATLIHQSITGLYETRIDLSQLGGDGGGGSGGGGGVPWLTQQPLQLTILVPLQEYQEKILSKTALPEDQKQQLKTLFVKYDNLWQHWENQVGHRKIRPHNIATGDYPPRPQKQYPINPKAKPSIQIVIDDLLKQGVLTPQNSTMNTPVYPVPKPDGRWRMVLDYREVNKTIPLTAAQNQHSAGILATIVRQKYKTTLDLANGFWAHPITPESYWLTAFTWQGKQYCWTRLPQGFLNSPALFNADVVDLLKEIPNVQVYVDDIYLSHDDPKEHVQQLEKVFQILLQAGYVVSLKKSEIGQKTVEFLGFNITKEGRGLTDTFKTKLLNITPPKDLKQLQSILGLLNFARNFIPNFAELVQPLYNLIAPAKGKYIEWSEENTKQLNMVIEALNTASNLEERLPEQRLVIKVNTSPSAGYVRYYNETGKKPIMYLNYVFSKAELKFSMLEKLLTTMHKALIKAMDLAMGQEILVYSPIVSMTKIQKTPLPERKALPIRWITWMTYLEDPRIQFHYDKTLPELKHIPDVYTSSQSPVKHPSQYEGVFYTDGSAIKSPDPTKSNNAGMGIVHATYKPEYQVLNQWSIPLGNHTAQMAEIAAVEFACKKALKIPGPVLVITDSFYVAESANKELPYWKSNGFVNNKKKPLKHISKWKSIAECLSMKPDITIQHEKGISLQIPVFILKGNALADKLATQGSYVVNAGKRTADGSEFEKRTADGSEFESPKKKAKVE

SEQ ID NO: 6574 - protein, 2171 aa, synthetic construct
MPAAKRVKLDGGDKKYSIGLDIGTNSVGWAVITDEYKVPSKKFKVLGNTDRHSIKKNLIGALLFDSGETAEATRLKRTARRRYTRRKNRICYLQEIFSNEMAKVDDSFFHRLEESFLVEEDKKHERHPIFGNIVDEVAYHEKYPTIYHLRKKLVDSTDKADLRLIYLALAHMIKFRGHFLIEGDLNPDNSDVDKLFIQLVQTYNQLFEENPINASGVDAKAILSARLSKSRRLENLIAQLPGEKKNGLFGNLIALSLGLTPNFKSNFDLAEDAKLQLSKDTYDDDLDNLLAQIGDQYADLFLAAKNLSDAILLSDILRVNTEITKAPLSASMIKRYDEHHQDLTLLKALVRQQLPEKYKEIFFDQSKNGYAGYIDGGASQEEFYKFIKPILEKMDGTEELLVKLNREDLLRKQRTFDNGSIPHQIHLGELHAILRRQEDFYPFLKDNREKIEKILTFRIPYYVGPLARGNSRFAWMTRKSEETITPWNFEEVVDKGASAQSFIERMTNFDKNLPNEKVLPKHSLLYEYFTVYNELTKVKYVTEGMRKPAFLSGEQKKAIVDLLFKTNRKVTVKQLKEDYFKKIECFDSVEISGVEDRFNASLGTYHDLLKIIKDKDFLDNEENEDILEDIVLTLTLFEDREMIEERLKTYAHLFDDKVMKQLKRRRYTGWGRLSRKLINGIRDKQSGKTILDFLKSDGFANRNFMQLIHDDSLTFKEDIQKAQVSGQGDSLHEHIANLAGSPAIKKGILQTVKVVDELVKVMGRHKPENIVIEMARENQTTQKGQKNSRERMKRIEEGIKELGSQILKEHPVENTQLQNEKLYLYYLQNGRDMYVDQELDINRLSDYDVDHIVPQSFLKDDSIDNKVLTRSDKARGKSDNVPSEEVVKKMKNYWRQLLNAKLITQRKFDNLTKAERGGLSELDKAGFIKRQLVETRQITKHVAQILDSRMNTKYDENDKLIREVKVITLKSKLVSDFRKDFQFYKVREINNYHHAHDAYLNAVVGTALIKKYPKLESEFVYGDYKVYDVRKMIAKSEQEIGKATAKYFFYSNIMNFFKTEITLANGEIRKRPLIETNGETGEIVWDKGRDFATVRKVLSMPQVNIVKKTEVQTGGFSKESILPKRNSDKLIARKKDWDPKKYGGFDSPTVAYSVLVVAKVEKGKSKKLKSVKELLGITIMERSSFEKNPIDFLEAKGYKEVKKDLIIKLPKYSLFELENGRKRMLASAGELQKGNELALPSKYVNFLYLASHYEKLKGSPEDNEQKQLFVEQHKHYLDEIIEQISEFSKRVILADANLDKVLSAYNKHRDKPIREQAENIIHLFTLTNLGAPAAFKYFDTTIDRKRYTSTKEVLDATLIHQSITGLYETRIDLSQLGGDGGGGSGGGGGMNPLQLLQPLPAEIKGTKLLAHWNSGATITCIPESFLEDEQPIKKTLIKTIHGEKQQNVYYVTFKVKGRKVEAEVIASPYEYILLSPTDVPWLTQQPLQLTILVPLQEYQEKILSKTALPEDQKQQLKTLFVKYDNLWQHWENQVGHRKIRPHNIATGDYPPRPQKQYPINPKAKPSIQIVIDDLLKQGVLTPQNSTMNTPVYPVPKPDGRWRMVLDYREVNKTIPLTAAQNQHSAGILATIVRQKYKTTLDLANGFWAHPITPESYWLTAFTWQGKQYCWTRLPQGFLNSPALFNADVVDLLKEIPNVQVYVDDIYLSHDDPKEHVQQLEKVFQILLQAGYVVSLKKSEIGQKTVEFLGFNITKEGRGLTDTFKTKLLNITPPKDLKQLQSILGKLNFARNFIPNFAELVQPLYNLIAPAKGKYIEWSEENTKQLNMVIEALNTASNLEERLPEQRLVIKVNTSPSAGYVRYYNETGKKPIMYLNYVFSKAELKFSMLEKLLTTMHKALIKAMDLAMGQEILVYSPIVSMTKIQKTPLPERKALPIRWITWMTYLEDPRIQFHYDKTLPELKHIPDVYTSSQSPVKHPSQYEGVFYTDGSAIKSPDPTKSNNAGMGIVHATYKPEYQVLNQWSIPLGNHTAQMAEIAAVEFACKKALKIPGPVLVITDSFYVAESANKELPYWKSNGFVNNKKKPLKHISKWKSIAECLSMKPDITIQHEKGISLQIPVFILKGNALADKLATQGSYVVNAGKRTADGSEFEKRTADGSEFESPKKKAKVE

SEQ ID NO: 6575 - protein, 2213 aa, synthetic construct
MPAAKRVKLDGGDKKYSIGLDIGTNSVGWAVITDEYKVPSKKFKVLGNTDRHSIKKNLIGALLFDSGETAEATRLKRTARRRYTRRKNRICYLQEIFSNEMAKVDDSFFHRLEESFLVEEDKKHERHPIFGNIVDEVAYHEKYPTIYHLRKKLVDSTDKADLRLIYLALAHMIKFRGHFLIEGDLNPDNSDVDKLFIQLVQTYNQLFEENPINASGVDAKAILSARLSKSRRLENLIAQLPGEKKNGLFGNLIALSLGLTPNFKSNFDLAEDAKLQLSKDTYDDDLDNLLAQIGDQYADLFLAAKNLSDAILLSDILRVNTEITKAPLSASMIKRYDEHHQDLTLLKALVRQQLPEKYKEIFFDQSKNGYAGYIDGGASQEEFYKFIKPILEKMDGTEELLVKLNREDLLRKQRTFDNGSIPHQIHLGELHAILRRQEDFYPFLKDNREKIEKILTFRIPYYVGPLARGNSRFAWMTRKSEETITPWNFEEVVDKGASAQSFIERMTNFDKNLPNEKVLPKHSLLYEYFTVYNELTKVKYVTEGMRKPAFLSGEQKKAIVDLLFKTNRKVTVKQLKEDYFKKIECFDSVEISGVEDRFNASLGTYHDLLKIIKDKDFLDNEENEDILEDIVLTLTLFEDREMIEERLKTYAHLFDDKVMKQLKRRRYTGWGRLSRKLINGIRDKQSGKTILDFLKSDGFANRNFMQLIHDDSLTFKEDIQKAQVSGQGDSLHEHIANLAGSPAIKKGILQTVKVVDELVKVMGRHKPENIVIEMARENQTTQKGQKNSRERMKRIEEGIKELGSQILKEHPVENTQLQNEKLYLYYLQNGRDMYVDQELDINRLSDYDVDHIVPQSFLKDDSIDNKVLTRSDKARGKSDNVPSEEVVKKMKNYWRQLLNAKLITQRKFDNLTKAERGGLSELDKAGFIKRQLVETRQITKHVAQILDSRMNTKYDENDKLIREVKVITLKSKLVSDFRKDFQFYKVREINNYHHAHDAYLNAVVGTALIKKYPKLESEFVYGDYKVYDVRKMIAKSEQEIGKATAKYFFYSNIMNFFKTEITLANGEIRKRPLIETNGETGEIVWDKGRDFATVRKVLSMPQVNIVKKTEVQTGGFSKESILPKRNSDKLIARKKDWDPKKYGGFDSPTVAYSVLVVAKVEKGKSKKLKSVKELLGITIMERSSFEKNPIDFLEAKGYKEVKKDLIIKLPKYSLFELENGRKRMLASAGELQKGNELALPSKYVNFLYLASHYEKLKGSPEDNEQKQLFVEQHKHYLDEIIEQISEFSKRVILADANLDKVLSAYNKHRDKPIREQAENIIHLFTLTNLGAPAAFKYFDTTIDRKRYTSTKEVLDATLIHQSITGLYETRIDLSQLGGDGGGGSGGGGGTLGDQGSRGSDPLPEPRVTLTVEGIPTEFLVNTGAEHSVLTKPMGKMGSKRTVVAGATGSKVYPWTTKRLLKIGQKQVTHSFLVIPECPAPLLGRDLLTKLKAQIQFSTEGPQVTWEDRPAMCLVLNLEEEYRLHEKPVPPSIDPSWLQLFPMVWAEKAGMGLANQVPPVVVELKSDASPVAVRQYPMSKEAREGIRPHIQRFLDLGILVPCQSPWNTPLLPVKKPGTNDYRPVQDLREVNKRVQDIHPTVPNPYNLLSSLPPSHTWYSVLDLKDAFFCLKLHPNSQPLFAFEWRDPEKGNTGQLTWTRLPQGFKNSPTLFNEALHRDLASFRALNPQVVMLQYVDDLLVAAPTYRDCKEGTRRLLQELSKLGYRVSAKKAQLCREEVTYLGYLLKGGKRWLTPARKATVMKIPTPTTPRQVREFLGKAGFCRLFIPGFASLAAPLYPLTRPKVPFTWTEAHQEAFGRIKEALLSAPALALPDLTKPFALYVDEKEGVARGVLTQTLGPWRRPVAYLSKKLDPVASGWPTCLKAIAAVALLLKDADKLTLGQNVLVIAPHNLESIVRQPPDRWMTNARMTHYQSLLLNERVSFAPPAILNPATLLPVESDDTPIHICSEILAEETGTRPDLRDQPLPGVPAWYTDGSSFIMDGRRQAGAAIVDNKRTVWASNLPEGTSAQKAELIALTQALRLAEGKSINIYTDSRYAFATAHVHGAIYKQRGWLTSAGKDIKNKEEILALLEAIHLPKRVAIIHCPGHQRGTDPVATGNRKADEAAKQAAQSTRILTETTKNAGKRTADGSEFEKRTADGSEFESPKKKAKVE

SEQ ID NO: 6576 - protein, 2091 aa, synthetic construct
MPAAKRVKLDGGDKKYSIGLDIGTNSVGWAVITDEYKVPSKKFKVLGNTDRHSIKKNLIGALLFDSGETAEATRLKRTARRRYTRRKNRICYLQEIFSNEMAKVDDSFFHRLEESFLVEEDKKHERHPIFGNIVDEVAYHEKYPTIYHLRKKLVDSTDKADLRLIYLALAHMIKFRGHFLIEGDLNPDNSDVDKLFIQLVQTYNQLFEENPINASGVDAKAILSARLSKSRRLENLIAQLPGEKKNGLFGNLIALSLGLTPNFKSNFDLAEDAKLQLSKDTYDDDLDNLLAQIGDQYADLFLAAKNLSDAILLSDILRVNTEITKAPLSASMIKRYDEHHQDLTLLKALVRQQLPEKYKEIFFDQSKNGYAGYIDGGASQEEFYKFIKPILEKMDGTEELLVKLNREDLLRKQRTFDNGSIPHQIHLGELHAILRRQEDFYPFLKDNREKIEKILTFRIPYYVGPLARGNSRFAWMTRKSEETITPWNFEEVVDKGASAQSFIERMTNFDKNLPNEKVLPKHSLLYEYFTVYNELTKVKYVTEGMRKPAFLSGEQKKAIVDLLFKTNRKVTVKQLKEDYFKKIECFDSVEISGVEDRFNASLGTYHDLLKIIKDKDFLDNEENEDILEDIVLTLTLFEDREMIEERLKTYAHLFDDKVMKQLKRRRYTGWGRLSRKLINGIRDKQSGKTILDFLKSDGFANRNFMQLIHDDSLTFKEDIQKAQVSGQGDSLHEHIANLAGSPAIKKGILQTVKVVDELVKVMGRHKPENIVIEMARENQTTQKGQKNSRERMKRIEEGIKELGSQILKEHPVENTQLQNEKLYLYYLQNGRDMYVDQELDINRLSDYDVDHIVPQSFLKDDSIDNKVLTRSDKARGKSDNVPSEEVVKKMKNYWRQLLNAKLITQRKFDNLTKAERGGLSELDKAGFIKRQLVETRQITKHVAQILDSRMNTKYDENDKLIREVKVITLKSKLVSDFRKDFQFYKVREINNYHHAHDAYLNAVVGTALIKKYPKLESEFVYGDYKVYDVRKMIAKSEQEIGKATAKYFFYSNIMNFFKTEITLANGEIRKRPLIETNGETGEIVWDKGRDFATVRKVLSMPQVNIVKKTEVQTGGFSKESILPKRNSDKLIARKKDWDPKKYGGFDSPTVAYSVLVVAKVEKGKSKKLKSVKELLGITIMERSSFEKNPIDFLEAKGYKEVKKDLIIKLPKYSLFELENGRKRMLASAGELQKGNELALPSKYVNFLYLASHYEKLKGSPEDNEQKQLFVEQHKHYLDEIIEQISEFSKRVILADANLDKVLSAYNKHRDKPIREQAENIIHLFTLTNLGAPAAFKYFDTTIDRKRYTSTKEVLDATLIHQSITGLYETRIDLSQLGGDGGGGSGGGGGTLNLEDEYRLYETSAEPEVSPGSTWLSDFPQAWAETGGMGLAVRQAPLIIPLKATSTPVSIKQYPMSQEAKLGIKPHIQRLLDQGILVPCQSPWNTPLLPVKKPGTNDYRPVQDLREVNKRVEDIHPTVPNPYNLLSGLPPSHRWYTVLDLKDAFFCLRLHPTSQPLFAFEWRDPGMGISGQLTWTRLPQGFKNSPTLFNEALHRDLADFRIQHPDLILLQYVDDILLAATSELDCQQGTRALLLTLGNLGYRASAKKAQLCQKQVKYLGYLLKEGQRWLTEARKETVMGQPTPKTPRQLREFLGTAGFCRLWIPGFAEMAAPLYPLTKPGTLFNWGPDQQKAYQEIKQALLTAPALGLPDLTKPFELFVDEKQGYAKGVLTQKLGPWRRPVAYLSKKLDPVAAGWPPCLRMVAAIAVLRKDAGKLTMGQPLVILAPHAVEALVKQPPDRWLSNARMTHYQAMLLDTDRVQFGPVVALNPATLLPLPEEGAPHDCLEILAETHGTRPDLTDQPIPDADHTWYTDGSSFLQEGQRKAGAAVTTETEVIWARALPAGTSAQRAELIALTQALKMAEGKRLNVYTDSRYAFATAHIHGEIYRRRGWLTSEGREIKNKSEILALLKALFLPKRLSIIHCLGHQKGDSAEARGNRLADQAAREAAIKTPPDTSTLLAGKRTADGSEFEKRTADGSEFESPKKKAKVE

SEQ ID NO: 6577 - protein, 2091 aa, synthetic construct
MPAAKRVKLDGGDKKYSIGLDIGTNSVGWAVITDEYKVPSKKFKVLGNTDRHSIKKNLIGALLFDSGETAEATRLKRTARRRYTRRKNRICYLQEIFSNEMAKVDDSFFHRLEESFLVEEDKKHERHPIFGNIVDEVAYHEKYPTIYHLRKKLVDSTDKADLRLIYLALAHMIKFRGHFLIEGDLNPDNSDVDKLFIQLVQTYNQLFEENPINASGVDAKAILSARLSKSRRLENLIAQLPGEKKNGLFGNLIALSLGLTPNFKSNFDLAEDAKLQLSKDTYDDDLDNLLAQIGDQYADLFLAAKNLSDAILLSDILRVNTEITKAPLSASMIKRYDEHHQDLTLLKALVRQQLPEKYKEIFFDQSKNGYAGYIDGGASQEEFYKFIKPILEKMDGTEELLVKLNREDLLRKQRTFDNGSIPHQIHLGELHAILRRQEDFYPFLKDNREKIEKILTFRIPYYVGPLARGNSRFAWMTRKSEETITPWNFEEVVDKGASAQSFIERMTNFDKNLPNEKVLPKHSLLYEYFTVYNELTKVKYVTEGMRKPAFLSGEQKKAIVDLLFKTNRKVTVKQLKEDYFKKIECFDSVEISGVEDRFNASLGTYHDLLKIIKDKDFLDNEENEDILEDIVLTLTLFEDREMIEERLKTYAHLFDDKVMKQLKRRRYTGWGRLSRKLINGIRDKQSGKTILDFLKSDGFANRNFMQLIHDDSLTFKEDIQKAQVSGQGDSLHEHIANLAGSPAIKKGILQTVKVVDELVKVMGRHKPENIVIEMARENQTTQKGQKNSRERMKRIEEGIKELGSQILKEHPVENTQLQNEKLYLYYLQNGRDMYVDQELDINRLSDYDVDHIVPQSFLKDDSIDNKVLTRSDKARGKSDNVPSEEVVKKMKNYWRQLLNAKLITQRKFDNLTKAERGGLSELDKAGFIKRQLVETRQITKHVAQILDSRMNTKYDENDKLIREVKVITLKSKLVSDFRKDFQFYKVREINNYHHAHDAYLNAVVGTALIKKYPKLESEFVYGDYKVYDVRKMIAKSEQEIGKATAKYFFYSNIMNFFKTEITLANGEIRKRPLIETNGETGEIVWDKGRDFATVRKVLSMPQVNIVKKTEVQTGGFSKESILPKRNSDKLIARKKDWDPKKYGGFDSPTVAYSVLVVAKVEKGKSKKLKSVKELLGITIMERSSFEKNPIDFLEAKGYKEVKKDLIIKLPKYSLFELENGRKRMLASAGELQKGNELALPSKYVNFLYLASHYEKLKGSPEDNEQKQLFVEQHKHYLDEIIEQISEFSKRVILADANLDKVLSAYNKHRDKPIREQAENIIHLFTLTNLGAPAAFKYFDTTIDRKRYTSTKEVLDATLIHQSITGLYETRIDLSQLGGDGGGGSGGGGGTLGIEDEYRLHETSTEPDVSLGSTWLSDFPQAWAETGGMGLAVRQAPLIIPLKATSTPVSIQQYPMSHEARLGIKPHIQRLLDQGILVPCQSPWNTPLLPVKKPGTNDYRPVQDLREVNKRVEDIHPTVPNPYNLLSGLPPSHQWYTVLDLKDAFFCLRLHPTSQPLFAFEWRDPGMGISGQLTWTRLPQGFKNSPTLFNEALHRDLADFRIQHPDLILLQYVDDILLAATSELDCQQGTRALLQTLGDLGYRASAKKAQICQKQVKYLGYLLREGQRWLTEARKETVMGQPVPKTPRQLREFLGTAGFCRLWIPGFAEMAAPLYPLTKPGTLFSWGPDQQKAYQEIKQALLTAPALGLPDLTKPFELFVDEKQGYAKGVLTQKLGPWRRPVAYLSKKLDPVAAGWPPCLRMVAAIAVLTKDAGKLTMGQPLVILAPHAVEALVKQPPDRWLSNARMTHYQAMLLDTDRVQFGPVVALNPATLLPLPEEGAPHDCLEILAETHGTRPDLTDQPIPDADHTWYTDGSSFLQEGQRKAGAAVTTETEVIWAGALPAGTSAQRAELIALTQALKMAEGKRLNVYTDSRYAFATAHIHGEIYRRRGWLTSEGREIKNKSEILALLKALFLPKRLSIIHCLGHQKGDSAEARGNRLADQAAREAAIKTPPDTSTLLAGKRTADGSEFEKRTADGSEFESPKKKAKVE

SEQ ID NO: 6578 - protein, 2091 aa, synthetic construct
MPAAKRVKLDGGDKKYSIGLDIGTNSVGWAVITDEYKVPSKKFKVLGNTDRHSIKKNLIGALLFDSGETAEATRLKRTARRRYTRRKNRICYLQEIFSNEMAKVDDSFFHRLEESFLVEEDKKHERHPIFGNIVDEVAYHEKYPTIYHLRKKLVDSTDKADLRLIYLALAHMIKFRGHFLIEGDLNPDNSDVDKLFIQLVQTYNQLFEENPINASGVDAKAILSARLSKSRRLENLIAQLPGEKKNGLFGNLIALSLGLTPNFKSNFDLAEDAKLQLSKDTYDDDLDNLLAQIGDQYADLFLAAKNLSDAILLSDILRVNTEITKAPLSASMIKRYDEHHQDLTLLKALVRQQLPEKYKEIFFDQSKNGYAGYIDGGASQEEFYKFIKPILEKMDGTEELLVKLNREDLLRKQRTFDNGSIPHQIHLGELHAILRRQEDFYPFLKDNREKIEKILTFRIPYYVGPLARGNSRFAWMTRKSEETITPWNFEEVVDKGASAQSFIERMTNFDKNLPNEKVLPKHSLLYEYFTVYNELTKVKYVTEGMRKPAFLSGEQKKAIVDLLFKTNRKVTVKQLKEDYFKKIECFDSVEISGVEDRFNASLGTYHDLLKIIKDKDFLDNEENEDILEDIVLTLTLFEDREMIEERLKTYAHLFDDKVMKQLKRRRYTGWGRLSRKLINGIRDKQSGKTILDFLKSDGFANRNFMQLIHDDSLTFKEDIQKAQVSGQGDSLHEHIANLAGSPAIKKGILQTVKVVDELVKVMGRHKPENIVIEMARENQTTQKGQKNSRERMKRIEEGIKELGSQILKEHPVENTQLQNEKLYLYYLQNGRDMYVDQELDINRLSDYDVDHIVPQSFLKDDSIDNKVLTRSDKARGKSDNVPSEEVVKKMKNYWRQLLNAKLITQRKFDNLTKAERGGLSELDKAGFIKRQLVETRQITKHVAQILDSRMNTKYDENDKLIREVKVITLKSKLVSDFRKDFQFYKVREINNYHHAHDAYLNAVVGTALIKKYPKLESEFVYGDYKVYDVRKMIAKSEQEIGKATAKYFFYSNIMNFFKTEITLANGEIRKRPLIETNGETGEIVWDKGRDFATVRKVLSMPQVNIVKKTEVQTGGFSKESILPKRNSDKLIARKKDWDPKKYGGFDSPTVAYSVLVVAKVEKGKSKKLKSVKELLGITIMERSSFEKNPIDFLEAKGYKEVKKDLIIKLPKYSLFELENGRKRMLASAGELQKGNELALPSKYVNFLYLASHYEKLKGSPEDNEQKQLFVEQHKHYLDEIIEQISEFSKRVILADANLDKVLSAYNKHRDKPIREQAENIIHLFTLTNLGAPAAFKYFDTTIDRKRYTSTKEVLDATLIHQSITGLYETRIDLSQLGGDGGGGSGGGGGTLNIEDEHRLHETSKEPDVSLGSTWLSDFPQAWAETGGMGLAVRQAPLIIPLKATSTPVSIKQYPMSQEARLGIKPHIQRLLDQGILVPCQSPWNTPLLPVKKPGTNDYRPVQDLREVNKRVEDIHPTVPNPYNLLSGLPPSHQWYTVLDLKDAFFCLRLHPTSQPLFAFEWRDPEMGISGQLTWTRLPQGFKNSPTLFNEALHRDLADFRIQHPDLILLQYVDDLLLAATSELDCQQGTRALLQTLGNLGYRASAKKAQICQKQVKYLGYLLKEGQRWLTEARKETVMGQPTPKTPRQLREFLGTAGFCRLWIPGFAEMAAPLYPLTKPGTLFNWGPDQQKAYQEIKQALLTAPALGLPDLTKPFELFVDEKQGYAKGVLTQKLGPWRRPVAYLSKKLDPVAAGWPPCLRMVAAIAVLTKDAGKLTMGQPLVILAPHAVEALVKQPPDRWLSNARMTHYQALLLDTDRVQFGPVVALNPATLLPLPEEGLQHNCLDILAEAHGTRPDLTDQPLPDADHTWYTDGSSLLQEGQRKAGAAVTTETEVIWAKALPAGTSAQRAELIALTQALKMAEGKKLNVYTDSRYAFATAHIHGEIYRRRGWLTSEGKEIKNKDEILALLKALFLPKRLSIIHCPGHQKGHSAEARGNRMADQAARKAAITETPDTSTLLAGKRTADGSEFEKRTADGSEFESPKKKAKVE

SEQ ID NO: 6579 - protein, 2091 aa, synthetic construct; identical to SEQ ID NO: 6578

SEQ ID NO: 6580 - protein, 2082 aa, synthetic construct
MPAAKRVKLDGGDKKYSIGLDIGTNSVGWAVITDEYKVPSKKFKVLGNTDRHSIKKNLIGALLFDSGETAEATRLKRTARRRYTRRKNRICYLQEIFSNEMAKVDDSFFHRLEESFLVEEDKKHERHPIFGNIVDEVAYHEKYPTIYHLRKKLVDSTDKADLRLIYLALAHMIKFRGHFLIEGDLNPDNSDVDKLFIQLVQTYNQLFEENPINASGVDAKAILSARLSKSRRLENLIAQLPGEKKNGLFGNLIALSLGLTPNFKSNFDLAEDAKLQLSKDTYDDDLDNLLAQIGDQYADLFLAAKNLSDAILLSDILRVNTEITKAPLSASMIKRYDEHHQDLTLLKALVRQQLPEKYKEIFFDQSKNGYAGYIDGGASQEEFYKFIKPILEKMDGTEELLVKLNREDLLRKQRTFDNGSIPHQIHLGELHAILRRQEDFYPFLKDNREKIEKILTFRIPYYVGPLARGNSRFAWMTRKSEETITPWNFEEVVDKGASAQSFIERMTNFDKNLPNEKVLPKHSLLYEYFTVYNELTKVKYVTEGMRKPAFLSGEQKKAIVDLLFKTNRKVTVKQLKEDYFKKIECFDSVEISGVEDRFNASLGTYHDLLKIIKDKDFLDNEENEDILEDIVLTLTLFEDREMIEERLKTYAHLFDDKVMKQLKRRRYTGWGRLSRKLINGIRDKQSGKTILDFLKSDGFANRNFMQLIHDDSLTFKEDIQKAQVSGQGDSLHEHIANLAGSPAIKKGILQTVKVVDELVKVMGRHKPENIVIEMARENQTTQKGQKNSRERMKRIEEGIKELGSQILKEHPVENTQLQNEKLYLYYLQNGRDMYVDQELDINRLSDYDVDHIVPQSFLKDDSIDNKVLTRSDKARGKSDNVPSEEVVKKMKNYWRQLLNAKLITQRKFDNLTKAERGGLSELDKAGFIKRQLVETRQITKHVAQILDSRMNTKYDENDKLIREVKVITLKSKLVSDFRKDFQFYKVREINNYHHAHDAYLNAVVGTALIKKYPKLESEFVYGDYKVYDVRKMIAKSEQEIGKATAKYFFYSNIMNFFKTEITLANGEIRKRPLIETNGETGEIVWDKGRDFATVRKVLSMPQVNIVKKTEVQTGGFSKESILPKRNSDKLIARKKDWDPKKYGGFDSPTVAYSVLVVAKVEKGKSKKLKSVKELLGITIMERSSFEKNPIDFLEAKGYKEVKKDLIIKLPKYSLFELENGRKRMLASAGELQKGNELALPSKYVNFLYLASHYEKLKGSPEDNEQKQLFVEQHKHYLDEIIEQISEFSKRVILADANLDKVLSAYNKHRDKPIREQAENIIHLFTLTNLGAPAAFKYFDTTIDRKRYTSTKEVLDATLIHQSITGLYETRIDLSQLGGDGGGGSGGGGGIPWLMKKPLQLTTLVPLQEYEERLLKQTMLTGSYKEKLQSLFLKYDALWQHWENQVGHRRIKPHHIATGTVNPRPQKQYPINPKAKASIQTVINDLLKQGVLIQQNSIMNTPVYPVPKPDGKWRMVLDYREVNKTIPLIAAQNQHSAGILSSIFRGKYKTTLDLSNGFWAHSITPESYWLTAFTWLGQQYCWTRLPQGFLNSPALFNADVVDLLKEVPNVQVYVDDIYISHDDPREHLEQLEKVFSLLLNAGYVVSLKKSEIAQHEVEFLGFNITKEGRGLTETFKQKLLNITPPRDLKQLQSILGLLNFARNFIPNFSELVKPLYNIIATAPGKYITWTTDNSQQLQNIISMLNSAENLEERNPEVRLIMKVNTSPSAGYIRFYNEFAKRPIMYLNYVYTKAEVKFTNTEKLLTTIHKGLIKALDLGMGQEILVYSPIVSMTKIQKTPLPERKALPIRWITWMSYLEDPRIQFHYDKTLPELQQVPTVTDDIIAKIKHPSEFSMVFYTDGSAIKHPNVNKSHNAGMGIAQVQFKPEFTVINTWSIPLGDHTAQLAEVAAVEFACKKALKIDGPVLIVTDSFYVAESVNKELPYWQSNGFFNNKKKPLKHVSKWKSIADCIQLKPDIIIIHEKGHQPTASTFHTEGNNLADKLATQGSYVVNAGKRTADGSEFEKRTADGSEFESPKKKAKVE

SEQ ID NO: 6581 - protein, 2089 aa, synthetic construct
MPAAKRVKLDGGDKKYSIGLDIGTNSVGWAVITDEYKVPSKKFKVLGNTDRHSIKKNLIGALLFDSGETAEATRLKRTARRRYTRRKNRICYLQEIFSNEMAKVDDSFFHRLEESFLVEEDKKHERHPIFGNIVDEVAYHEKYPTIYHLRKKLVDSTDKADLRLIYLALAHMIKFRGHFLIEGDLNPDNSDVDKLFIQLVQTYNQLFEENPINASGVDAKAILSARLSKSRRLENLIAQLPGEKKNGLFGNLIALSLGLTPNFKSNFDLAEDAKLQLSKDTYDDDLDNLLAQIGDQYADLFLAAKNLSDAILLSDILRVNTEITKAPLSASMIKRYDEHHQDLTLLKALVRQQLPEKYKEIFFDQSKNGYAGYIDGGASQEEFYKFIKPILEKMDGTEELLVKLNREDLLRKQRTFDNGSIPHQIHLGELHAILRRQEDFYPFLKDNREKIEKILTFRIPYYVGPLARGNSRFAWMTRKSEETITPWNFEEVVDKGASAQSFIERMTNFDKNLPNEKVLPKHSLLYEYFTVYNELTKVKYVTEGMRKPAFLSGEQKKAIVDLLFKTNRKVTVKQLKEDYFKKIECFDSVEISGVEDRFNASLGTYHDLLKIIKDKDFLDNEENEDILEDIVLTLTLFEDREMIEERLKTYAHLFDDKVMKQLKRRRYTGWGRLSRKLINGIRDKQSGKTILDFLKSDGFANRNFMQLIHDDSLTFKEDIQKAQVSGQGDSLHEHIANLAGSPAIKKGILQTVKVVDELVKVMGRHKPENIVIEMARENQTTQKGQKNSRERMKRIEEGIKELGSQILKEHPVENTQLQNEKLYLYYLQNGRDMYVDQELDINRLSDYDVDHIVPQSFLKDDSIDNKVLTRSDKARGKSDNVPSEEVVKKMKNYWRQLLNAKLITQRKFDNLTKAERGGLSELDKAGFIKRQLVETRQITKHVAQILDSRMNTKYDENDKLIREVKVITLKSKLVSDFRKDFQFYKVREINNYHHAHDAYLNAVVGTALIKKYPKLESEFVYGDYKVYDVRKMIAKSEQEIGKATAKYFFYSNIMNFFKTEITLANGEIRKRPLIETNGETGEIVWDKGRDFATVRKVLSMPQVNIVKKTEVQTGGFSKESILPKRNSDKLIARKKDWDPKKYGGFDSPTVAYSVLVVAKVEKGKSKKLKSVKELLGITIMERSSFEKNPIDFLEAKGYKEVKKDLIIKLPKYSLFELENGRKRMLASAGELQKGNELALPSKYVNFLYLASHYEKLKGSPEDNEQKQLFVEQHKHYLDEIIEQISEFSKRVILADANLDKVLSAYNKHRDKPIREQAENIIHLFTLTNLGAPAAFKYFDTTIDRKRYTSTKEVLDATLIHQSITGLYETRIDLSQLGGDGGGGSGGGGGVLNLEEEYRLHEKPVPSSIDPSWLQLFPTVWAERAGMGLANQVPPVVVELRSGASPVAVRQYPMSKEAREGIRPHIQRFLDLGVLVPCQSPWNTPLLPVKKPGTNDYRPVQDLREINKRVQDIHPTVPNPYNLLSSLPPSHTWYSVLDLKDAFFCLKLHPNSQPLFAFEWRDPEKGNTGQLTWTRLPQGFKNSPTLFNEALHRDLAPFRALNPQVVLLQYVDDLLVAAPTYRDCKEGTQKLLQELSKLGYRVSAKKAQLCQKEVTYLGYLLKEGKRWLTPARKATVMKIPPPTTPRQVREFLGKAGFCRLFIPGFASLAAPLYPLTKPSIPFIWTEEHQKAFDRIKEALLSAPALALPDLTKPFTLYVDERAGVARGVLTQTLGPWRRPVAYLSKKLDPVASGWPTCLKAVAAVALLLKDADKLTLGQNVTVIASHSLESIVRQPPDRWMTNARMTHYQSLLLNERVSFAPPAVLNPATLLPVESEATPVHRCSEILAEETGTRRDLKDQPLPGVPAWYTDGSSFIAEGKRRAGAAIVDGKRTVWASSLPEGTSAQKAELVALTQALRLAEGKDINIYTDSRYAFATAHIHGAIYKQRGWLTSAGKDIKNKEEILALLEAIHLPKRVAIIHCPGHQKGNDPVATGNRRADEAAKQAALSTRVLAETTKPAGKRTADGSEFEKRTADGSEFESPKKKAKVE

SEQ ID NO: 6582 - protein, 2091 aa, synthetic construct
MPAAKRVKLDGGDKKYSIGLDIGTNSVGWAVITDEYKVPSKKFKVLGNTDRHSIKKNLIGALLFDSGETAEATRLKRTARRRYTRRKNRICYLQEIFSNEMAKVDDSFFHRLEESFLVEEDKKHERHPIFGNIVDEVAYHEKYPTIYHLRKKLVDSTDKADLRLIYLALAHMIKFRGHFLIEGDLNPDNSDVDKLFIQLVQTYNQLFEENPINASGVDAKAILSARLSKSRRLENLIAQLPGEKKNGLFGNLIALSLGLTPNFKSNFDLAEDAKLQLSKDTYDDDLDNLLAQIGDQYADLFLAAKNLSDAILLSDILRVNTEITKAPLSASMIKRYDEHHQDLTLLKALVRQQLPEKYKEIFFDQSKNGYAGYIDGGASQEEFYKFIKPILEKMDGTEELLVKLNREDLLRKQRTFDNGSIPHQIHLGELHAILRRQEDFYPFLKDNREKIEKILTFRIPYYVGPLARGNSRFAWMTRKSEETITPWNFEEVVDKGASAQSFIERMTNFDKNLPNEKVLPKHSLLYEYFTVYNELTKVKYVTEGMRKPAFLSGEQKKAIVDLLFKTNRKVTVKQLKEDYFKKIECFDSVEISGVEDRFNASLGTYHDLLKIIKDKDFLDNEENEDILEDIVLTLTLFEDREMIEERLKTYAHLFDDKVMKQLKRRRYTGWGRLSRKLINGIRDKQSGKTILDFLKSDGFANRNFMQLIHDDSLTFKEDIQKAQVSGQGDSLHEHIANLAGSPAIKKGILQTVKVVDELVKVMGRHKPENIVIEMARENQTTQKGQKNSRERMKRIEEGIKELGSQILKEHPVENTQLQNEKLYLYYLQNGRDMYVDQELDINRLSDYDVDHIVPQSFLKDDSIDNKVLTRSDKARGKSDNVPSEEVVKKMKNYWRQLLNAKLITQRKFDNLTKAERGGLSELDKAGFIKRQLVETRQITKHVAQILDSRMNTKYDENDKLIREVKVITLKSKLVSDFRKDFQFYKVREINNYHHAHDAYLNAVVGTALIKKYPKLESEFVYGDYKVYDVRKMIAKSEQEIGKATAKYFFYSNIMNFFKTEITLANGEIRKRPLIETNGETGEIVWDKGRDFATVRKVLSMPQVNIVKKTEVQTGGFSKESILPKRNSDKLIARKKDWDPKKYGGFDSPTVAYSVLVVAKVEKGKSKKLKSVKELLGITIMERSSFEKNPIDFLEAKGYKEVKKDLIIKLPKYSLFELENGRKRMLASAGELQKGNELALPSKYVNFLYLASHYEKLKGSPEDNEQKQLFVEQHKHYLDEIIEQISEFSKRVILADANLDKVLSAYNKHRDKPIREQAENIIHLFTLTNLGAPAAFKYFDTTIDRKRYTSTKEVLDATLIHQSITGLYETRIDLSQLGGDGGGGSGGGGGTLNIEDEYRLHETSKEPDVPLGSTWLSDFPQAWAETGGMGLAVRQAPLIIPLKATSTPVSIKQYPMSQEARLGIKPHIQRLLDQGILVPCQSPWNTPLLPVKKPGTNDYRPVQDLREVNKRVEDIHPTVPNPYNLLSGLPPSHQWYTVLDLKDAFFCLRLHPTSQPLFAFEWRDPEMGISGQLTWTRLPQGFKNSPTLFNEALHRDLADFRIQHPDLILLQYVDDLLLAATSEQDCQRGTRALLQTLGNLGYRASAKKAQICQKQVKYLGYLLKEGQRWLTEARKETVMGQPTPKTPRQLREFLGTAGFCRLWIPGFAEMAAPLYPLTKPGTLFNWGPDQQKAYQEIKQALLTAPALGLPDLTKPFELFVDEKQGYAKGVLTQKLGPWRRPVAYLSKKLDPVAAGWPPCLRMVAAIAVLTKDAGKLTMGQPLVILAPHAVEALVKQPPDRWLSNARMTHYQAMLLDTDRVQFGPVVALNPATLLPLPEKEAPHDCLEILAETHGTRPDLTDQPIPDADYTWYTDGSSFLQEGQRRAGAAVTTETEVIWARALPAGTSAQRAELIALTQALKMAEGKKLNVYTDSRYAFATAHVHGEIYRRRGWLTSEGREIKNKNEILALLKALFLPKRLSIIHCPGHQKGNSAEARGNRMADQAAREAAMKAVLETSTLLAGKRTADGSEFEKRTADGSEFESPKKKAKVE

SEQ ID NO: 6583 - protein, 2091 aa, synthetic construct
MPAAKRVKLDGGDKKYSIGLDIGTNSVGWAVITDEYKVPSKKFKVLGNTDRHSIKKNLIGALLFDSGETAEATRLKRTARRRYTRRKNRICYLQEIFSNEMAKVDDSFFHRLEESFLVEEDKKHERHPIFGNIVDEVAYHEKYPTIYHLRKKLVDSTDKADLRLIYLALAHMIKFRGHFLIEGDLNPDNSDVDKLFIQLVQTYNQLFEENPINASGVDAKAILSARLSKSRRLENLIAQLPGEKKNGLFGNLIALSLGLTPNFKSNFDLAEDAKLQLSKDTYDDDLDNLLAQIGDQYADLFLAAKNLSDAILLSDILRVNTEITKAPLSASMIKRYDEHHQDLTLLKALVRQQLPEKYKEIFFDQSKNGYAGYIDGGASQEEFYKFIKPILEKMDGTEELLVKLNREDLLRKQRTFDNGSIPHQIHLGELHAILRRQEDFYPFLKDNREKIEKILTFRIPYYVGPLARGNSRFAWMTRKSEETITPWNFEEVVDKGASAQSFIERMTNFDKNLPNEKVLPKHSLLYEYFTVYNELTKVKYVTEGMRKPAFLSGEQKKAIVDLLFKTNRKVTVKQLKEDYFKKIECFDSVEISGVEDRFNASLGTYHDLLKIIKDKDFLDNEENEDILEDIVLTLTLFEDREMIEERLKTYAHLFDDKVMKQLKRRRYTGWGRLSRKLINGIRDKQSGKTILDFLKSDGFANRNFMQLIHDDSLTFKEDIQKAQVSGQGDSLHEHIANLAGSPAIKKGILQTVKVVDELVKVMGRHKPENIVIEMARENQTTQKGQKNSRERMKRIEEGIKELGSQILKEHPVENTQLQNEKLYLYYLQNGRDMYVDQELDINRLSDYDVDHIVPQSFLKDDSIDNKVLTRSDKARGKSDNVPSEEVVKKMKNYWRQLLNAKLITQRKFDNLTKAERGGLSELDKAGFIKRQLVETRQITKHVAQILDSRMNTKYDENDKLIREVKVITLKSKLVSDFRKDFQFYKVREINNYHHAHDAYLNAVVGTALIKKYPKLESEFVYGDYKVYDVRKMIAKSEQEIGKATAKYFFYSNIMNFFKTEITLANGEIRKRPLIETNGETGEIVWDKGRDFATVRKVLSMPQVNIVKKTEVQTGGFSKESILPKRNSDKLIARKKDWDPKKYGGFDSPTVAYSVLVVAKVEKGKSKKLKSVKELLGITIMERSSFEKNPIDFLEAKGYKEVKKDLIIKLPKYSLFELENGRKRMLASAGELQKGNELALPSKYVNFLYLASHYEKLKGSPEDNEQKQLFVEQHKHYLDEIIEQISEFSKRVILADANLDKVLSAYNKHRDKPIREQAENIIHLFTLTNLGAPAAFKYFDTTIDRKRYTSTKEVLDATLIHQSITGLYETRIDLSQLGGDGGGGSGGGGGTLNIEDEYRLHETSKEPDVPLGSTWLSDFPQAWAETGGMGLAVRQAPLIIPLKATSTPVSIKQYPMSQEARLGIKPHIQRLLDQGILVPCQSPWNTPLLPVKKPGTNDYRPVQDLREVNKRVEDIHPTVPNPYNLLSGLPPSHQWYTVLDLKDAFFCLRLHPTSQPLFAFEWRDPEMGISGQLTWTRLPQGFKNSPTLFNEALHRDLADFRIQHPDLILLQYVDDLLLAATSEQDCQRGTRALLQTLGNLGYRASAKKAQICQKQVKYLGYLLKEGQRWLTEARKETVMGQPTPKTPRQLREFLGKAGFCRLFIPGFAEMAAPLYPLTKPGTLFNWGPDQQKAYQEIKQALLTAPALGLPDLTKPFELFVDEKQGYAKGVLTQKLGPWRRPVAYLSKKLDPVAAGWPPCLRMVAAIAVLTKDAGKLTMGQPLVILAPHAVEALVKQPPDRWLSNARMTHYQAMLLDTDRVQFGPVVALNPATLLPLPEKEAPHDCLEILAETHGTRPDLTDQPIPDADYTWYTDGSSFLQEGQRRAGAAVTTETEVIWARALPAGTSAQRAELIALTQALKMAEGKKLNVYTDSRYAFATAHVHGEIYRRRGWLTSEGREIKNKNEILALLKALFLPKRLSIIHCPGHQKGNSAEARGNRMADQAAREAAMKAVLETSTLLAGKRTADGSEFEKRTADGSEFESPKKKAKVE

SEQ ID NO: 6584 - protein, 2093 aa, synthetic construct
MPAAKRVKLDGGDKKYSIGLDIGTNSVGWAVITDEYKVPSKKFKVLGNTDRHSIKKNLIGALLFDSGETAEATRLKRTARRRYTRRKNRICYLQEIFSNEMAKVDDSFFHRLEESFLVEEDKKHERHPIFGNIVDEVAYHEKYPTIYHLRKKLVDSTDKADLRLIYLALAHMIKFRGHFLIEGDLNPDNSDVDKLFIQLVQTYNQLFEENPINASGVDAKAILSARLSKSRRLENLIAQLPGEKKNGLFGNLIALSLGLTPNFKSNFDLAEDAKLQLSKDTYDDDLDNLLAQIGDQYADLFLAAKNLSDAILLSDILRVNTEITKAPLSASMIKRYDEHHQDLTLLKALVRQQLPEKYKEIFFDQSKNGYAGYIDGGASQEEFYKFIKPILEKMDGTEELLVKLNREDLLRKQRTFDNGSIPHQIHLGELHAILRRQEDFYPFLKDNREKIEKILTFRIPYYVGPLARGNSRFAWMTRKSEETITPWNFEEVVDKGASAQSFIERMTNFDKNLPNEKVLPKHSLLYEYFTVYNELTKVKYVTEGMRKPAFLSGEQKKAIVDLLFKTNRKVTVKQLKEDYFKKIECFDSVEISGVEDRFNASLGTYHDLLKIIKDKDFLDNEENEDILEDIVLTLTLFEDREMIEERLKTYAHLFDDKVMKQLKRRRYTGWGRLSRKLINGIRDKQSGKTILDFLKSDGFANRNFMQLIHDDSLTFKEDIQKAQVSGQGDSLHEHIANLAGSPAIKKGILQTVKVVDELVKVMGRHKPENIVIEMARENQTTQKGQKNSRERMKRIEEGIKELGSQILKEHPVENTQLQNEKLYLYYLQNGRDMYVDQELDINRLSDYDVDHIVPQSFLKDDSIDNKVLTRSDKARGKSDNVPSEEVVKKMKNYWRQLLNAKLITQRKFDNLTKAERGGLSELDKAGFIKRQLVETRQITKHVAQILDSRMNTKYDENDKLIREVKVITLKSKLVSDFRKDFQFYKVREINNYHHAHDAYLNAVVGTALIKKYPKLESEFVYGDYKVYDVRKMIAKSEQEIGKATAKYFFYSNIMNFFKTEITLANGEIRKRPLIETNGETGEIVWDKGRDFATVRKVLSMPQVNIVKKTEVQTGGFSKESILPKRNSDKLIARKKDWDPKKYGGFDSPTVAYSVLVVAKVEKGKSKKLKSVKELLGITIMERSSFEKNPIDFLEAKGYKEVKKDLIIKLPKYSLFELENGRKRMLASAGELQKGNELALPSKYVNFLYLASHYEKLKGSPEDNEQKQLFVEQHKHYLDEIIEQISEFSKRVILADANLDKVLSAYNKHRDKPIREQAENIIHLFTLTNLGAPAAFKYFDTTIDRKRYTSTKEVLDATLIHQSITGLYETRIDLSQLGGDGGGGGGGSGGTAPLEEEYRLFLEAPIQNVTLLEQWKREIPKVWAEINPPGLASTQAPIHVQLLSTALPVRVRQYPITLEAKRSLRETIRKFRAAGILRPVHSPWNTPLLPVRKSGTSEYRMVQDLREVNKRVETIHPTVPNPYTLLSLLPPDRIWYSVLDLKDAFFCIPLAPESQLIFAFEWADAEEGESGQLTWTRLPQGFKNSPTLFNEALNRDLQGFRLDHPSVSLLQYVDDLLIAADTQAACLSATRDLLMTLAELGYRVSGKKAQLCQEEVTYLGFKIHKGSRSLSNSRTQAILQIPVPKTKRQVREFLGTIGYCRLWIPGFAELAQPLYAATRPGNDPLVWGEKEEEAFQSLKLALTQPPALALPSLDKPFQLFVEETSGAAKGVLTQALGPWKRPVAYLSKRLDPVAAGWPRCLRAIAAAALLTREASKLTFGQDIEITSSHNLESLLRSPPDKWLTNARITQYQVLLLDPPRVRFKQTAALNPATLLPETDDTLPIHHCLDTLDSLTSTRPDLTDQPLAQAEATLFTDGSSYIRDGKRYAGAAVVTLDSVIWAEPLPIGTSAQKAELIALTKALEWSKDKSVNIYTDSRYAFATLHVHGMIYRERGWLTAGGKAIKNAPEILALLTAVWLPKRVAVMHCKGHQKDDAPTSTGNRRADEVAREVAIRPLSTQATISAGKRTADGSEFEKRTADGSEFESPKKKAKVE

SEQ ID NO: 6585 - protein, 2093 aa, synthetic construct
MPAAKRVKLDGGDKKYSIGLDIGTNSVGWAVITDEYKVPSKKFKVLGNTDRHSIKKNLIGALLFDSGETAEATRLKRTARRRYTRRKNRICYLQEIFSNEMAKVDDSFFHRLEESFLVEEDKKHERHPIFGNIVDEVAYHEKYPTIYHLRKKLVDSTDKADLRLIYLALAHMIKFRGHFLIEGDLNPDNSDVDKLFIQLVQTYNQLFEENPINASGVDAKAILSARLSKSRRLENLIAQLPGEKKNGLFGNLIALSLGLTPNFKSNFDLAEDAKLQLSKDTYDDDLDNLLAQIGDQYADLFLAAKNLSDAILLSDILRVNTEITKAPLSASMIKRYDEHHQDLTLLKALVRQQLPEKYKEIFFDQSKNGYAGYIDGGASQEEFYKFIKPILEKMDGTEELLVKLNREDLLRKQRTFDNGSIPHQIHLGELHAILRRQEDFYPFLKDNREKIEKILTFRIPYYVGPLARGNSRFAWMTRKSEETITPWNFEEVVDKGASAQSFIERMTNFDKNLPNEKVLPKHSLLYEYFTVYNELTKVKYVTEGMRKPAFLSGEQKKAIVDLLFKTNRKVTVKQLKEDYFKKIECFDSVEISGVEDRFNASLGTYHDLLKIIKDKDFLDNEENEDILEDIVLTLTLFEDREMIEERLKTYAHLFDDKVMKQLKRRRYTGWGRLSRKLINGIRDKQSGKTILDFLKSDGFANRNFMQLIHDDSLTFKEDIQKAQVSGQGDSLHEHIANLAGSPAIKKGILQTVKVVDELVKVMGRHKPENIVIEMARENQTTQKGQKNSRERMKRIEEGIKELGSQILKEHPVENTQLQNEKLYLYYLQNGRDMYVDQELDINRLSDYDVDHIVPQSFLKDDSIDNKVLTRSDKARGKSDNVPSEEVVKKMKNYWRQLLNAKLITQRKFDNLTKAERGGLSELDKAGFIKRQLVETRQITKHVAQILDSRMNTKYDENDKLIREVKVITLKSKLVSDFRKDFQFYKVREINNYHHAHDAYLNAVVGTALIKKYPKLESEFVYGDYKVYDVRKMIAKSEQEIGKATAKYFFYSNIMNFFKTEITLANGEIRKRPLIETNGETGEIVWDKGRDFATVRKVLSMPQVNIVKKTEVQTGGFSKESILPKRNSDKLIARKKDWDPKKYGGFDSPTVAYSVLVVAKVEKGKSKKLKSVKELLGITIMERSSFEKNPIDFLEAKGYKEVKKDLIIKLPKYSLFELENGRKRMLASAGELQKGNELALPSKYVNFLYLASHYEKLKGSPEDNEQKQLFVEQHKHYLDEIIEQISEFSKRVILADANLDKVLSAYNKHRDKPIREQAENIIHLFTLTNLGAPAAFKYFDTTIDRKRYTSTKEVLDATLIHQSITGLYETRIDLSQLGGDGGGGGGGSGGTAPLEEEYRLFLEAPIQNVTLLEQWKREIPKVWAEINPPGLASTQAPIHVQLLSTALPVRVRQYPITLEAKRSLRETIRKFRAAGILRPVHSPWNTPLLPVRKSGTSEYRMVQDLREVNKRVETIHPTVPNPYTLLSLLPPDRIWYSVLDLKDAFFCIPLAPESQLIFAFEWADAEEGESGQLTWTRLPQGFKNSPTLFNEALNRDLQGFRLDHPSVSLLQYVDDLLIAADTQAACLSATRDLLMTLAELGYRVSGKKAQLCQEEVTYLGFKIHKGSRSLSNSRTQAILQIPVPKTKRQVREFLGKIGYCRLFIPGFAELAQPLYAATRPGNDPLVWGEKEEEAFQSLKLALTQPPALALPSLDKPFQLFVEETSGAAKGVLTQALGPWKRPVAYLSKRLDPVAAGWPRCLRAIAAAALLTREASKLTFGQDIEITSSHNLESLLRSPPDKWLTNARITQYQVLLLDPPRVRFKQTAALNPATLLPETDDTLPIHHCLDTLDSLTSTRPDLTDQPLAQAEATLFTDGSSYIRDGKRYAGAAVVTLDSVIWAEPLPIGTSAQKAELIALTKALEWSKDKSVNIYTDSRYAFATLHVHGMIYRERGWLTAGGKAIKNAPEILALLTAVWLPKRVAVMHCKGHQKDDAPTSTGNRRADEVAREVAIRPLSTQATISAGKRTADGSEFEKRTADGSEFESPKKKAKVE

SEQ ID NO: 6586 - protein, 2097 aa, synthetic construct
MPAAKRVKLDGGDKKYSIGLDIGTNSVGWAVITDEYKVPSKKFKVLGNTDRHSIKKNLIGALLFDSGETAEATRLKRTARRRYTRRKNRICYLQEIFSNEMAKVDDSFFHRLEESFLVEEDKKHERHPIFGNIVDEVAYHEKYPTIYHLRKKLVDSTDKADLRLIYLALAHMIKFRGHFLIEGDLNPDNSDVDKLFIQLVQTYNQLFEENPINASGVDAKAILSARLSKSRRLENLIAQLPGEKKNGLFGNLIALSLGLTPNFKSNFDLAEDAKLQLSKDTYDDDLDNLLAQIGDQYADLFLAAKNLSDAILLSDILRVNTEITKAPLSASMIKRYDEHHQDLTLLKALVRQQLPEKYKEIFFDQSKNGYAGYIDGGASQEEFYKFIKPILEKMDGTEELLVKLNREDLLRKQRTFDNGSIPHQIHLGELHAILRRQEDFYPFLKDNREKIEKILTFRIPYYVGPLARGNSRFAWMTRKSEETITPWNFEEVVDKGASAQSFIERMTNFDKNLPNEKVLPKHSLLYEYFTVYNELTKVKYVTEGMRKPAFLSGEQKKAIVDLLFKTNRKVTVKQLKEDYFKKIECFDSVEISGVEDRFNASLGTYHDLLKIIKDKDFLDNEENEDILEDIVLTLTLFEDREMIEERLKTYAHLFDDKVMKQLKRRRYTGWGRLSRKLINGIRDKQSGKTILDFLKSDGFANRNFMQLIHDDSLTFKEDIQKAQVSGQGDSLHEHIANLAGSPAIKKGILQTVKVVDELVKVMGRHKPENIVIEMARENQTTQKGQKNSRERMKRIEEGIKELGSQILKEHPVENTQLQNEKLYLYYLQNGRDMYVDQELDINRLSDYDVDHIVPQSFLKDDSIDNKVLTRSDKARGKSDNVPSEEVVKKMKNYWRQLLNAKLITQRKFDNLTKAERGGLSELDKAGFIKRQLVETRQITKHVAQILDSRMNTKYDENDKLIREVKVITLKSKLVSDFRKDFQFYKVREINNYHHAHDAYLNAVVGTALIKKYPKLESEFVYGDYKVYDVRKMIAKSEQEIGKATAKYFFYSNIMNFFKTEITLANGEIRKRPLIETNGETGEIVWDKGRDFATVRKVLSMPQVNIVKKTEVQTGGFSKESILPKRNSDKLIARKKDWDPKKYGGFDSPTVAYSVLVVAKVEKGKSKKLKSVKELLGITIMERSSFEKNPIDFLEAKGYKEVKKDLIIKLPKYSLFELENGRKRMLASAGELQKGNELALPSKYVNFLYLASHYEKLKGSPEDNEQKQLFVEQHKHYLDEIIEQISEFSKRVILADANLDKVLSAYNKHRDKPIREQAENIIHLFTLTNLGAPAAFKYFDTTIDRKRYTSTKEVLDATLIHQSITGLYETRIDLSQLGGDGGGGGGGSGGTVSLQDEHRLFDIPVTTSLPDVWLQDFPQAWAETGGLGRAKCQAPIIIDLKPTAVPVSIKQYPMSLEAHMGIRQHIIKFLELGVLRPCRSPWNTPLLPVKKPGTQDYRPVQDLREINKRTVDIHPTVPNPYNLLSTLKPDYSWYTVLDLKDAFFCLPLAPQSQELFAFEWKDPERGISGQLTWTRLPQGFKNSPTLFNEALHRDLTDFRTQHPEVTLLQYVDDLLLAAPTKKACTQGTRHLLQELGEKGYRASAKKAQICQTKVTYLGYILSEGKRWLTPGRIETVARIPPPRNPREVREFLGTAGFCRLWIPGFAELAAPLYALTKPSTPFTWQTEHQLAFEALKKALLSAPALGLPDTSKPFTLFLDERQGIAKGVLTQKLGPWKRPVAYLSKKLDPVAAGWPPCLRIMAATAMLVKDSAKLTLGQPLTVITPHTLEAIVRQPPDRWITNARLTHYQALLLDTDRVQFGPPVTLNPATLLPVPENQPSPHDCRQVLAETHGTREDLKDQELPDADHTWYTDGSSYLDSGTRRAGAAVVDGHNTIWAQSLPPGTSAQKAELIALTKALELSKGKKANIYTDSRYAFATAHTHGSIYERRGWLTSEGKEIKNKAEIIALLKALFLPQEVAIIHCPGHQKGQDPVAVGNRQADRVARQAAMAEVLTLATEPDNTSHITAGKRTADGSEFEKRTADGSEFESPKKKAKVE

SEQ ID NO: 6587 - protein, 2090 aa, synthetic construct
MPAAKRVKLDGGDKKYSIGLDIGTNSVGWAVITDEYKVPSKKFKVLGNTDRHSIKKNLIGALLFDSGETAEATRLKRTARRRYTRRKNRICYLQEIFSNEMAKVDDSFFHRLEESFLVEEDKKHERHPIFGNIVDEVAYHEKYPTIYHLRKKLVDSTDKADLRLIYLALAHMIKFRGHFLIEGDLNPDNSDVDKLFIQLVQTYNQLFEENPINASGVDAKAILSARLSKSRRLENLIAQLPGEKKNGLFGNLIALSLGLTPNFKSNFDLAEDAKLQLSKDTYDDDLDNLLAQIGDQYADLFLAAKNLSDAILLSDILRVNTEITKAPLSASMIKRYDEHHQDLTLLKALVRQQLPEKYKEIFFDQSKNGYAGYIDGGASQEEFYKFIKPILEKMDGTEELLVKLNREDLLRKQRTFDNGSIPHQIHLGELHAILRRQEDFYPFLKDNREKIEKILTFRIPYYVGPLARGNSRFAWMTRKSEETITPWNFEEVVDKGASAQSFIERMTNFDKNLPNEKVLPKHSLLYEYFTVYNELTKVKYVTEGMRKPAFLSGEQKKAIVDLLFKTNRKVTVKQLKEDYFKKIECFDSVEISGVEDRFNASLGTYHDLLKIIKDKDFLDNEENEDILEDIVLTLTLFEDREMIEERLKTYAHLFDDKVMKQLKRRRYTGWGRLSRKLINGIRDKQSGKTILDFLKSDGFANRNFMQLIHDDSLTFKEDIQKAQVSGQGDSLHEHIANLAGSPAIKKGILQTVKVVDELVKVMGRHKPENIVIEMARENQTTQKGQKNSRERMKRIEEGIKELGSQILKEHPVENTQLQNEKLYLYYLQNGRDMYVDQELDINRLSDYDVDHIVPQSFLKDDSIDNKVLTRSDKARGKSDNVPSEEVVKKMKNYWRQLLNAKLITQRKFDNLTKAERGGLSELDKAGFIKRQLVETRQITKHVAQILDSRMNTKYDENDKLIREVKVITLKSKLVSDFRKDFQFYKVREINNYHHAHDAYLNAVVGTALIKKYPKLESEFVYGDYKVYDVRKMIAKSEQEIGKATAKYFFYSNIMNFFKTEITLANGEIRKRPLIETNGETGEIVWDKGRDFATVRKVLSMPQVNIVKKTEVQTGGFSKESILPKRNSDKLIARKKDWDPKKYGGFDSPTVAYSVLVVAKVEKGKSKKLKSVKELLGITIMERSSFEKNPIDFLEAKGYKEVKKDLIIKLPKYSLFELENGRKRMLASAGELQKGNELALPSKYVNFLYLASHYEKLKGSPEDNEQKQLFVEQHKHYLDEIIEQISEFSKRVILADANLDKVLSAYNKHRDKPIREQAENIIHLFTLTNLGAPAAFKYFDTTIDRKRYTSTKEVLDATLIHQSITGLYETRIDLSQLGGDGGGGGGGSGGTLQLEEEYRLFEPESTQKQEMDIWLKNFPQAWAETGGMGTAHCQAPVLIQLKATATPISIRQYPMPHEAYQGIKPHIRRMLDQGILKPCQSPWNTPLLPVKKPGTEDYRPVQDLREVNKRVEDIHPTVPNPYNLLSTLPPSHPWYTVLDLKDAFFCLRLHSESQLLFAFEWRDPEIGLSGQLTWTRLPQGFKNSPTLFNEALHSDLADFRVRYPALVLLQYVDDLLLAAATRTECLEGTKALLETLGNKGYRASAKKAQICLQEVTYLGYSLKDGQRWLTKARKEAILSIPVPKNSRQVREFLGTAGYCRLWIPGFAELAAPLYPLTRPGTLFQWGTEQQLAFEDIKKALLSSPALGLPDITKPFELFIDENSGFAKGVLVQKLGPWKRPVAYLSKKLDTVASGWPPCLRMVAAIAILVKDAGKLTLGQPLTILTSHPVEALVRQPPNKWLSNARMTHYQAMLLDAERVHFGPTVSLNPATLLPLPSGGNHHDCLQILAETHGTRPDLTDQPLPDADLTWYTDGSSFIRNGEREAGAAVTTESEVIWAAPLPPGTSAQRAELIALTQALKMAEGKKLTVYTDSRYAFATTHVHGEIYRRRGWLTSEGKEIKNKNEILALLEALFLPKRLSIIHCPGHQKGDSPQAKGNRLADDTAKKAATETHSSLTVLPAGKRTADGSEFEKRTADGSEFESPKKKAKVE

SEQ ID NO: 6588 - protein, 2213 aa, synthetic construct
MPAAKRVKLDGGDKKYSIGLDIGTNSVGWAVITDEYKVPSKKFKVLGNTDRHSIKKNLIGALLFDSGETAEATRLKRTARRRYTRRKNRICYLQEIFSNEMAKVDDSFFHRLEESFLVEEDKKHERHPIFGNIVDEVAYHEKYPTIYHLRKKLVDSTDKADLRLIYLALAHMIKFRGHFLIEGDLNPDNSDVDKLFIQLVQTYNQLFEENPINASGVDAKAILSARLSKSRRLENLIAQLPGEKKNGLFGNLIALSLGLTPNFKSNFDLAEDAKLQLSKDTYDDDLDNLLAQIGDQYADLFLAAKNLSDAILLSDILRVNTEITKAPLSASMIKRYDEHHQDLTLLKALVRQQLPEKYKEIFFDQSKNGYAGYIDGGASQEEFYKFIKPILEKMDGTEELLVKLNREDLLRKQRTFDNGSIPHQIHLGELHAILRRQEDFYPFLKDNREKIEKILTFRIPYYVGPLARGNSRFAWMTRKSEETITPWNFEEVVDKGASAQSFIERMTNFDKNLPNEKVLPKHSLLYEYFTVYNELTKVKYVTEGMRKPAFLSGEQKKAIVDLLFKTNRKVTVKQLKEDYFKKIECFDSVEISGVEDRFNASLGTYHDLLKIIKDKDFLDNEENEDILEDIVLTLTLFEDREMIEERLKTYAHLFDDKVMKQLKRRRYTGWGRLSRKLINGIRDKQSGKTILDFLKSDGFANRNFMQLIHDDSLTFKEDIQKAQVSGQGDSLHEHIANLAGSPAIKKGILQTVKVVDELVKVMGRHKPENIVIEMARENQTTQKGQKNSRERMKRIEEGIKELGSQILKEHPVENTQLQNEKLYLYYLQNGRDMYVDQELDINRLSDYDVDHIVPQSFLKDDSIDNKVLTRSDKARGKSDNVPSEEVVKKMKNYWRQLLNAKLITQRKFDNLTKAERGGLSELDKAGFIKRQLVETRQITKHVAQILDSRMNTKYDENDKLIREVKVITLKSKLVSDFRKDFQFYKVREINNYHHAHDAYLNAVVGTALIKKYPKLESEFVYGDYKVYDVRKMIAKSEQEIGKATAKYFFYSNIMNFFKTEITLANGEIRKRPLIETNGETGEIVWDKGRDFATVRKVLSMPQVNIVKKTEVQTGGFSKESILPKRNSDKLIARKKDWDPKKYGGFDSPTVAYSVLVVAKVEKGKSKKLKSVKELLGITIMERSSFEKNPIDFLEAKGYKEVKKDLIIKLPKYSLFELENGRKRMLASAGELQKGNELALPSKYVNFLYLASHYEKLKGSPEDNEQKQLFVEQHKHYLDEIIEQISEFSKRVILADANLDKVLSAYNKHRDKPIREQAENIIHLFTLTNLGAPAAFKYFDTTIDRKRYTSTKEVLDATLIHQSITGLYETRIDLSQLGGDGGGGGGGSGGTLGDQGSRGSDPLPEPRVTLTVEGIPTEFLVNTGAEHSVLTKPMGKMGSKRTVVAGATGSKVYPWTTKRLLKIGQKQVTHSFLVIPECPAPLLGRDLLTKLKAQIQFSTEGPQVTWEDRPAMCLVLNLEEEYRLHEKPVPPSIDPSWLQLFPMVWAEKAGMGLANQVPPVVVELKSDASPVAVRQYPMSKEAREGIRPHIQRFLDLGILVPCQSPWNTPLLPVKKPGTNDYRPVQDLREVNKRVQDIHPTVPNPYNLLSSLPPSHTWYSVLDLKDAFFCLKLHPNSQPLFAFEWRDPEKGNTGQLTWTRLPQGFKNSPTLFNEALHRDLASFRALNPQVVMLQYVDDLLVAAPTYRDCKEGTRRLLQELSKLGYRVSAKKAQLCREEVTYLGYLLKGGKRWLTPARKATVMKIPTPTTPRQVREFLGKAGFCRLFIPGFASLAAPLYPLTRPKVPFTWTEAHQEAFGRIKEALLSAPALALPDLTKPFALYVDEKEGVARGVLTQTLGPWRRPVAYLSKKLDPVASGWPTCLKAIAAVALLLKDADKLTLGQNVLVIAPHNLESIVRQPPDRWMTNARMTHYQSLLLNERVSFAPPAILNPATLLPVESDDTPIHICSEILAEETGTRPDLRDQPLPGVPAWYTDGSSFIMDGRRQAGAAIVDNKRTVWASNLPEGTSAQKAELIALTQALRLAEGKSINIYTDSRYAFATAHVHGAIYKQRGWLTSAGKDIKNKEEILALLEAIHLPKRVAIIHCPGHQRGTDPVATGNRKADEAAKQAAQSTRILTETTKNAGKRTADGSEFEKRTADGSEFESPKKKAKVE

SEQ ID NO: 6589 - protein, 2091 aa, synthetic construct; identical to SEQ ID NO: 4511

SEQ ID NO: 6590 - protein, 2091 aa, synthetic construct
MPAAKRVKLDGGDKKYSIGLDIGTNSVGWAVITDEYKVPSKKFKVLGNTDRHSIKKNLIGALLFDSGETAEATRLKRTARRRYTRRKNRICYLQEIFSNEMAKVDDSFFHRLEESFLVEEDKKHERHPIFGNIVDEVAYHEKYPTIYHLRKKLVDSTDKADLRLIYLALAHMIKFRGHFLIEGDLNPDNSDVDKLFIQLVQTYNQLFEENPINASGVDAKAILSARLSKSRRLENLIAQLPGEKKNGLFGNLIALSLGLTPNFKSNFDLAEDAKLQLSKDTYDDDLDNLLAQIGDQYADLFLAAKNLSDAILLSDILRVNTEITKAPLSASMIKRYDEHHQDLTLLKALVRQQLPEKYKEIFFDQSKNGYAGYIDGGASQEEFYKFIKPILEKMDGTEELLVKLNREDLLRKQRTFDNGSIPHQIHLGELHAILRRQEDFYPFLKDNREKIEKILTFRIPYYVGPLARGNSRFAWMTRKSEETITPWNFEEVVDKGASAQSFIERMTNFDKNLPNEKVLPKHSLLYEYFTVYNELTKVKYVTEGMRKPAFLSGEQKKAIVDLLFKTNRKVTVKQLKEDYFKKIECFDSVEISGVEDRFNASLGTYHDLLKIIKDKDFLDNEENEDILEDIVLTLTLFEDREMIEERLKTYAHLFDDKVMKQLKRRRYTGWGRLSRKLINGIRDKQSGKTILDFLKSDGFANRNFMQLIHDDSLTFKEDIQKAQVSGQGDSLHEHIANLAGSPAIKKGILQTVKVVDELVKVMGRHKPENIVIEMARENQTTQKGQKNSRERMKRIEEGIKELGSQILKEHPVENTQLQNEKLYLYYLQNGRDMYVDQELDINRLSDYDVDHIVPQSFLKDDSIDNKVLTRSDKARGKSDNVPSEEVVKKMKNYWRQLLNAKLITQRKFDNLTKAERGGLSELDKAGFIKRQLVETRQITKHVAQILDSRMNTKYDENDKLIREVKVITLKSKLVSDFRKDFQFYKVREINNYHHAHDAYLNAVVGTALIKKYPKLESEFVYGDYKVYDVRKMIAKSEQEIGKATAKYFFYSNIMNFFKTEITLANGEIRKRPLIETNGETGEIVWDKGRDFATVRKVLSMPQVNIVKKTEVQTGGFSKESILPKRNSDKLIARKKDWDPKKYGGFDSPTVAYSVLVVAKVEKGKSKKLKSVKELLGITIMERSSFEKNPIDFLEAKGYKEVKKDLIIKLPKYSLFELENGRKRMLASAGELQKGNELALPSKYVNFLYLASHYEKLKGSPEDNEQKQLFVEQHKHYLDEIIEQISEFSKRVILADANLDKVLSAYNKHRDKPIREQAENIIHLFTLTNLGAPAAFKYFDTTIDRKRYTSTKEVLDATLIHQSITGLYETRIDLSQLGGDGGGGGGGSGGTLGIEDEYRLHETSTEPDVSLGSTWLSDFPQAWAETGGMGLAVRQAPLIIPLKATSTPVSIQQYPMSHEARLGIKPHIQRLLDQGILVPCQSPWNTPLLPVKKPGTNDYRPVQDLREVNKRVEDIHPTVPNPYNLLSGLPPSHQWYTVLDLKDAFFCLRLHPTSQPLFAFEWRDPGMGISGQLTWTRLPQGFKNSPTLFNEALHRDLADFRIQHPDLILLQYVDDILLAATSELDCQQGTRALLQTLGDLGYRASAKKAQICQKQVKYLGYLLREGQRWLTEARKETVMGQPVPKTPRQLREFLGTAGFCRLWIPGFAEMAAPLYPLTKPGTLFSWGPDQQKAYQEIKQALLTAPALGLPDLTKPFELFVDEKQGYAKGVLTQKLGPWRRPVAYLSKKLDPVAAGWPPCLRMVAAIAVLTKDAGKLTMGQPLVILAPHAVEALVKQPPDRWLSNARMTHYQAMLLDTDRVQFGPVVALNPATLLPLPEEGAPHDCLEILAETHGTRPDLTDQPIPDADHTWYTDGSSFLQEGQRKAGAAVTTETEVIWAGALPAGTSAQRAELIALTQALKMAEGKRLNVYTDSRYAFATAHIHGEIYRRRGWLTSEGREIKNKSEILALLKALFLPKRLSIIHCLGHQKGDSAEARGNRLADQAAREAAIKTPPDTSTLLAGKRTADGSEFEKRTADGSEFESPKKKAKVE

SEQ ID NO: 6591 - protein, 2091 aa, synthetic construct; identical to SEQ ID NO: 4511

SEQ ID NO: 6592 - protein, 2091 aa, synthetic construct
MPAAKRVKLDGGDKKYSIGLDIGTNSVGWAVITDEYKVPSKKFKVLGNTDRHSIKKNLIGALLFDSGETAEATRLKRTARRRYTRRKNRICYLQEIFSNEMAKVDDSFFHRLEESFLVEEDKKHERHPIFGNIVDEVAYHEKYPTIYHLRKKLVDSTDKADLRLIYLALAHMIKFRGHFLIEGDLNPDNSDVDKLFIQLVQTYNQLFEENPINASGVDAKAILSARLSKSRRLENLIAQLPGEKKNGLFGNLIALSLGLTPNFKSNFDLAEDAKLQLSKDTYDDDLDNLLAQIGDQYADLFLAAKNLSDAILLSDILRVNTEITKAPLSASMIKRYDEHHQDLTLLKALVRQQLPEKYKEIFFDQSKNGYAGYIDGGASQEEFYKFIKPILEKMDGTEELLVKLNREDLLRKQRTFDNGSIPHQIHLGELHAILRRQEDFYPFLKDNREKIEKILTFRIPYYVGPLARGNSRFAWMTRKSEETITPWNFEEVVDKGASAQSFIERMTNFDKNLPNEKVLPKHSLLYEYFTVYNELTKVKYVTEGMRKPAFLSGEQKKAIVDLLFKTNRKVTVKQLKEDYFKKIECFDSVEISGVEDRFNASLGTYHDLLKIIKDKDFLDNEENEDILEDIVLTLTLFEDREMIEERLKTYAHLFDDKVMKQLKRRRYTGWGRLSRKLINGIRDKQSGKTILDFLKSDGFANRNFMQLIHDDSLTFKEDIQKAQVSGQGDSLHEHIANLAGSPAIKKGILQTVKVVDELVKVMGRHKPENIVIEMARENQTTQKGQKNSRERMKRIEEGIKELGSQILKEHPVENTQLQNEKLYLYYLQNGRDMYVDQELDINRLSDYDVDHIVPQSFLKDDSIDNKVLTRSDKARGKSDNVPSEEVVKKMKNYWRQLLNAKLITQRKFDNLTKAERGGLSELDKAGFIKRQLVETRQITKHVAQILDSRMNTKYDENDKLIREVKVITLKSKLVSDFRKDFQFYKVREINNYHHAHDAYLNAVVGTALIKKYPKLESEFVYGDYKVYDVRKMIAKSEQEIGKATAKYFFYSNIMNFFKTEITLANGEIRKRPLIETNGETGEIVWDKGRDFATVRKVLSMPQVNIVKKTEVQTGGFSKESILPKRNSDKLIARKKDWDPKKYGGFDSPTVAYSVLVVAKVEKGKSKKLKSVKELLGITIMERSSFEKNPIDFLEAKGYKEVKKDLIIKLPKYSLFELENGRKRMLASAGELQKGNELALPSKYVNFLYLASHYEKLKGSPEDNEQKQLFVEQHKHYLDEIIEQISEFSKRVILADANLDKVLSAYNKHRDKPIREQAENIIHLFTLTNLGAPAAFKYFDTTIDRKRYTSTKEVLDATLIHQSITGLYETRIDLSQLGGDGGGGGGGSGGTLNIEDEYRLHETSKGPDVPLGSTWLSDFPQAWAETGGMGLAFRQAPLIISLKATSTPVSIKQYPMSQEARLGIKPHIQRLLDQGILVPCQSPWNTPLLPVKKPGTNDYRPVQDLREVNKRVEDIHPTVPNPYNLLSGLPPSHQWYTVLDLKDAFFCLRLHPTSQSLFAFEWKDPEMGISGQLTWTRLPQGFKNSPTLFDEALHRDLADFRIQHPDLILLQYVDDLLLAATSELDCQQGTRALLQTLGDLGYRASAKKAQICQKQVKYLGYLLKEGQRWLTEARKETVMGQPTPKTPRQLREFLGTAGLCRLWIPGFAEMAAPLYPLTKTGTLFKWGPDQQKAYQEIKQALLTAPALGLPDLTKPFELFVDEKQGYAKGVLTQKLGPWRRPVAYLSKKLDPVAAGWPPCLRMVAAIAVLTKDVGKLTMGQPLVILAPHAVEALVKQPPDRWLSNARMTHYQALLLDTDRVQFGPIVALNPATLLPLPEEGLQHDCLDILAEAHGTRPDLTDQPLPDADHTWYTDGSSFLQEGQRRAGAAVTTETEVIWAKALPAGTSAQRAELIALTQALKMAAGKKLNVYTDSRYAFATAHIHGEIYRRRGLLTSEGKEIKNKDEILALLKALFLPKRLSIIHCPGHQKGNHAEARGNRMADQAAREVATRETPETSTLLAGKRTADGSEFEKRTADGSEFESPKKKAKVE

SEQ ID NO: 6593 - protein, 2091 aa, synthetic construct
MPAAKRVKLDGGDKKYSIGLDIGTNSVGWAVITDEYKVPSKKFKVLGNTDRHSIKKNLIGALLFDSGETAEATRLKRTARRRYTRRKNRICYLQEIFSNEMAKVDDSFFHRLEESFLVEEDKKHERHPIFGNIVDEVAYHEKYPTIYHLRKKLVDSTDKADLRLIYLALAHMIKFRGHFLIEGDLNPDNSDVDKLFIQLVQTYNQLFEENPINASGVDAKAILSARLSKSRRLENLIAQLPGEKKNGLFGNLIALSLGLTPNFKSNFDLAEDAKLQLSKDTYDDDLDNLLAQIGDQYADLFLAAKNLSDAILLSDILRVNTEITKAPLSASMIKRYDEHHQDLTLLKALVRQQLPEKYKEIFFDQSKNGYAGYIDGGASQEEFYKFIKPILEKMDGTEELLVKLNREDLLRKQRTFDNGSIPHQIHLGELHAILRRQEDFYPFLKDNREKIEKILTFRIPYYVGPLARGNSRFAWMTRKSEETITPWNFEEVVDKGASAQSFIERMTNFDKNLPNEKVLPKHSLLYEYFTVYNELTKVKYVTEGMRKPAFLSGEQKKAIVDLLFKTNRKVTVKQLKEDYFKKIECFDSVEISGVEDRFNASLGTYHDLLKIIKDKDFLDNEENEDILEDIVLTLTLFEDREMIEERLKTYAHLFDDKVMKQLKRRRYTGWGRLSRKLINGIRDKQSGKTILDFLKSDGFANRNFMQLIHDDSLTFKEDIQKAQVSGQGDSLHEHIANLAGSPAIKKGILQTVKVVDELVKVMGRHKPENIVIEMARENQTTQKGQKNSRERMKRIEEGIKELGSQILKEHPVENTQLQNEKLYLYYLQNGRDMYVDQELDINRLSDYDVDHIVPQSFLKDDSIDNKVLTRSDKARGKSDNVPSEEVVKKMKNYWRQLLNAKLITQRKFDNLTKAERGGLSELDKAGFIKRQLVETRQITKHVAQILDSRMNTKYDENDKLIREVKVITLKSKLVSDFRKDFQFYKVREINNYHHAHDAYLNAVVGTALIKKYPKLESEFVYGDYKVYDVRKMIAKSEQEIGKATAKYFFYSNIMNFFKTEITLANGEIRKRPLIETNGETGEIVWDKGRDFATVRKVLSMPQVNIVKKTEVQTGGFSKESILPKRNSDKLIARKKDWDPKKYGGFDSPTVAYSVLVVAKVEKGKSKKLKSVKELLGITIMERSSFEKNPIDFLEAKGYKEVKKDLIIKLPKYSLFELENGRKRMLASAGELQKGNELALPSKYVNFLYLASHYEKLKGSPEDNEQKQLFVEQHKHYLDEIIEQISEFSKRVILADANLDKVLSAYNKHRDKPIREQAENIIHLFTLTNLGAPAAFKYFDTTIDRKRYTSTKEVLDATLIHQSITGLYETRIDLSQLGGDGGGGGGGSGGTLNIEDEYRLHETSKGPDVPLGSTWLSDFPQAWAETGGMGLAVRQAPLIIPLKATSTPVSIKQYPMSQEARLGIKPHIQRLLDQGILVPCQSPWNTPLLPVKKPGTNDYRPVQDLREVNKRVEDIHPTVPNPYNLLSGLPPSHQWYTVLDLKDAFFCLRLHPTSQSLFAFEWRDPEMGISGQLTWTRLPQGFKNSPTLFNEALHRDLADFRIQHPDLILLQYVDDLLLAATSELDCQQGTRALLQTLGDLGYRASAKKAQICQKQVKYLGYLLKEGQRWLTEARKETVMGQPTPKTPRQLREFLGTAGFCRLWIPGFAEMAAPLYPLTKPGTLFEWGPDQQKAYQEIKQALLTAPALGLPDLTKPFELFVDEKQGYAKGVLTQKLGPWRRPVAYLSKKLDPVAAGWPPCLRMVAAIAVLTKDAGKLTMGQPLVILAPHAVEALVKQPPDRWLSNARMTHYQALLLDTDRVQFGPIVALNPATLLPLPEEGLQHDCLDILAEAHGTRPDLTDQPLPDADHTWYTDGSSFLQEGQRKAGAAVTTETEVVWAKALPAGTSAQRAELIALTQALKMAEGKKLNVYTDSRYAFATAHIHGEIYRRRGWLTSEGKEIKNKDEILALLKALFLPKRLSIIHCPGHQKGNRAEARGNRMADQAAREVATRETPETSTLLAGKRTADGSEFEKRTADGSEFESPKKKAKVE

SEQ ID NO: 6594 - protein, 2091 aa, synthetic construct
MPAAKRVKLDGGDKKYSIGLDIGTNSVGWAVITDEYKVPSKKFKVLGNTDRHSIKKNLIGALLFDSGETAEATRLKRTARRRYTRRKNRICYLQEIFSNEMAKVDDSFFHRLEESFLVEEDKKHERHPIFGNIVDEVAYHEKYPTIYHLRKKLVDSTDKADLRLIYLALAHMIKFRGHFLIEGDLNPDNSDVDKLFIQLVQTYNQLFEENPINASGVDAKAILSARLSKSRRLENLIAQLPGEKKNGLFGNLIALSLGLTPNFKSNFDLAEDAKLQLSKDTYDDDLDNLLAQIGDQYADLFLAAKNLSDAILLSDILRVNTEITKAPLSASMIKRYDEHHQDLTLLKALVRQQLPEKYKEIFFDQSKNGYAGYIDGGASQEEFYKFIKPILEKMDGTEELLVKLNREDLLRKQRTFDNGSIPHQIHLGELHAILRRQEDFYPFLKDNREKIEKILTFRIPYYVGPLARGNSRFAWMTRKSEETITPWNFEEVVDKGASAQSFIERMTNFDKNLPNEKVLPKHSLLYEYFTVYNELTKVKYVTEGMRKPAFLSGEQKKAIVDLLFKTNRKVTVKQLKEDYFKKIECFDSVEISGVEDRFNASLGTYHDLLKIIKDKDFLDNEENEDILEDIVLTLTLFEDREMIEERLKTYAHLFDDKVMKQLKRRRYTGWGRLSRKLINGIRDKQSGKTILDFLKSDGFANRNFMQLIHDDSLTFKEDIQKAQVSGQGDSLHEHIANLAGSPAIKKGILQTVKVVDELVKVMGRHKPENIVIEMARENQTTQKGQKNSRERMKRIEEGIKELGSQILKEHPVENTQLQNEKLYLYYLQNGRDMYVDQELDINRLSDYDVDHIVPQSFLKDDSIDNKVLTRSDKARGKSDNVPSEEVVKKMKNYWRQLLNAKLITQRKFDNLTKAERGGLSELDKAGFIKRQLVETRQITKHVAQILDSRMNTKYDENDKLIREVKVITLKSKLVSDFRKDFQFYKVREINNYHHAHDAYLNAVVGTALIKKYPKLESEFVYGDYKVYDVRKMIAKSEQEIGKATAKYFFYSNIMNFFKTEITLANGEIRKRPLIETNGETGEIVWDKGRDFATVRKVLSMPQVNIVKKTEVQTGGFSKESILPKRNSDKLIARKKDWDPKKYGGFDSPTVAYSVLVVAKVEKGKSKKLKSVKELLGITIMERSSFEKNPIDFLEAKGYKEVKKDLIIKLPKYSLFELENGRKRMLASAGELQKGNELALPSKYVNFLYLASHYEKLKGSPEDNEQKQLFVEQHKHYLDEIIEQISEFSKRVILADANLDKVLSAYNKHRDKPIREQAENIIHLFTLTNLGAPAAFKYFDTTIDRKRYTSTKEVLDATLIHQSITGLYETRIDLSQLGGDGGGGGGGSGGTLNIEDEYRLHETSKGPDVPLGSTWLSDFPQAWAETGGMGLAVRQAPLIIPLKATSTPVSIKQYPMSQEARLGIKPHIQRLLDQGILVPCQSPWNTPLLPVKKPGTNDYRPVQDLREVNKRVEDIHPTVPNPYNLLSGLPPSHQWYTVLDLKDAFFCLRLHPTSQSLFAFEWRDPEMGISGQLTWTRLPQGFKNSPTLFNEALHRDLADFRIQHPDLILLQYVDDLLLAATSELDCQQGTRALLQTLGDLGYRASAKKAQICQKQVKYLGYLLKEGQRWLTEARKETVMGQPTPKTPRQLREFLGKAGFCRLFIPGFAEMAAPLYPLTKPGTLFEWGPDQQKAYQEIKQALLTAPALGLPDLTKPFELFVDEKQGYAKGVLTQKLGPWRRPVAYLSKKLDPVAAGWPPCLRMVAAIAVLTKDAGKLTMGQPLVILAPHAVEALVKQPPDRWLSNARMTHYQALLLDTDRVQFGPIVALNPATLLPLPEEGLQHDCLDILAEAHGTRPDLTDQPLPDADHTWYTDGSSFLQEGQRKAGAAVTTETEVVWAKALPAGTSAQRAELIALTQALKMAEGKKLNVYTDSRYAFATAHIHGEIYRRRGWLTSEGKEIKNKDEILALLKALFLPKRLSIIHCPGHQKGNRAEARGNRMADQAAREVATRETPETSTLLAGKRTADGSEFEKRTADGSEFESPKKKAKVE

SEQ ID NO: 6595 - protein, 2111 aa, synthetic construct
MPAAKRVKLDGGDKKYSIGLDIGTNSVGWAVITDEYKVPSKKFKVLGNTDRHSIKKNLIGALLFDSGETAEATRLKRTARRRYTRRKNRICYLQEIFSNEMAKVDDSFFHRLEESFLVEEDKKHERHPIFGNIVDEVAYHEKYPTIYHLRKKLVDSTDKADLRLIYLALAHMIKFRGHFLIEGDLNPDNSDVDKLFIQLVQTYNQLFEENPINASGVDAKAILSARLSKSRRLENLIAQLPGEKKNGLFGNLIALSLGLTPNFKSNFDLAEDAKLQLSKDTYDDDLDNLLAQIGDQYADLFLAAKNLSDAILLSDILRVNTEITKAPLSASMIKRYDEHHQDLTLLKALVRQQLPEKYKEIFFDQSKNGYAGYIDGGASQEEFYKFIKPILEKMDGTEELLVKLNREDLLRKQRTFDNGSIPHQIHLGELHAILRRQEDFYPFLKDNREKIEKILTFRIPYYVGPLARGNSRFAWMTRKSEETITPWNFEEVVDKGASAQSFIERMTNFDKNLPNEKVLPKHSLLYEYFTVYNELTKVKYVTEGMRKPAFLSGEQKKAIVDLLFKTNRKVTVKQLKEDYFKKIECFDSVEISGVEDRFNASLGTYHDLLKIIKDKDFLDNEENEDILEDIVLTLTLFEDREMIEERLKTYAHLFDDKVMKQLKRRRYTGWGRLSRKLINGIRDKQSGKTILDFLKSDGFANRNFMQLIHDDSLTFKEDIQKAQVSGQGDSLHEHIANLAGSPAIKKGILQTVKVVDELVKVMGRHKPENIVIEMARENQTTQKGQKNSRERMKRIEEGIKELGSQILKEHPVENTQLQNEKLYLYYLQNGRDMYVDQELDINRLSDYDVDHIVPQSFLKDDSIDNKVLTRSDKARGKSDNVPSEEVVKKMKNYWRQLLNAKLITQRKFDNLTKAERGGLSELDKAGFIKRQLVETRQITKHVAQILDSRMNTKYDENDKLIREVKVITLKSKLVSDFRKDFQFYKVREINNYHHAHDAYLNAVVGTALIKKYPKLESEFVYGDYKVYDVRKMIAKSEQEIGKATAKYFFYSNIMNFFKTEITLANGEIRKRPLIETNGETGEIVWDKGRDFATVRKVLSMPQVNIVKKTEVQTGGFSKESILPKRNSDKLIARKKDWDPKKYGGFDSPTVAYSVLVVAKVEKGKSKKLKSVKELLGITIMERSSFEKNPIDFLEAKGYKEVKKDLIIKLPKYSLFELENGRKRMLASAGELQKGNELALPSKYVNFLYLASHYEKLKGSPEDNEQKQLFVEQHKHYLDEIIEQISEFSKRVILADANLDKVLSAYNKHRDKPIREQAENIIHLFTLTNLGAPAAFKYFDTTIDRKRYTSTKEVLDATLIHQSITGLYETRIDLSQLGGDGGGGGGGSGGTLNIEDEYRLHETSKEPDVSLGSTWLSDFPQAWAETGGMGLAVRQAPLIIPLKATSTPVSIKQYPMSQEARLGIKPHIQRLLDQGILVPCQSPWNTPLLPVKKPGTNDYRPVQDLREVNKRVEDIHPTVPNPYNLLSGLPPSHQWYTVLDLKDAFFCLRLHPTSQPLFAFEWRDPEMGISGQLTWTRLPQGFKNSPTLFNEALHRDLADFRIQHPDLILLQYVDDLLLAATSELDCQQGTRALLQTLGNLGYRASAKKAQICQKQVKYLGYLLKEGQRWLTEARKETVMGQPTPKTPRQLREFLGKAGFCRLFIPGFAEMAAPLYPLTKPGTLFNWGPDQQKAYQEIKQALLTAPALGLPDLTKPFELFVDEKQGYAKGVLTQKLGPWRRPVAYLSKKLDPVAAGWPPCLRMVAAIAVLTKDAGKLTMGQPLVILAPHAVEALVKQPPDRWLSNARMTHYQALLLDTDRVQFGPVVALNPATLLPLPEEGLQHNCLDILAEAHGTRPDLTDQPLPDADHTWYTDGSSLLQEGQRKAGAAVTTETEVIWAKALPAGTSAQRAELIALTQALKMAEGKKLNVYTDSRYAFATAHIHGEIYRRRGWLTSEGKEIKNKDEILALLKALFLPKRLSIIHCPGHQKGHSAEARGNRMADQAARKAAITETPDTSTLLIENSSPSGGSKRTADGSEFEAGKRTADGSEFEKRTADGSEFESPKKKAKVE

SEQ ID NO: 6596 - protein, 2111 aa, synthetic construct; identical to SEQ ID NO: 6595

SEQ ID NO: 6597 - protein, 2091 aa, synthetic construct
MPAAKRVKLDGGDKKYSIGLDIGTNSVGWAVITDEYKVPSKKFKVLGNTDRHSIKKNLIGALLFDSGETAEATRLKRTARRRYTRRKNRICYLQEIFSNEMAKVDDSFFHRLEESFLVEEDKKHERHPIFGNIVDEVAYHEKYPTIYHLRKKLVDSTDKADLRLIYLALAHMIKFRGHFLIEGDLNPDNSDVDKLFIQLVQTYNQLFEENPINASGVDAKAILSARLSKSRRLENLIAQLPGEKKNGLFGNLIALSLGLTPNFKSNFDLAEDAKLQLSKDTYDDDLDNLLAQIGDQYADLFLAAKNLSDAILLSDILRVNTEITKAPLSASMIKRYDEHHQDLTLLKALVRQQLPEKYKEIFFDQSKNGYAGYIDGGASQEEFYKFIKPILEKMDGTEELLVKLNREDLLRKQRTFDNGSIPHQIHLGELHAILRRQEDFYPFLKDNREKIEKILTFRIPYYVGPLARGNSRFAWMTRKSEETITPWNFEEVVDKGASAQSFIERMTNFDKNLPNEKVLPKHSLLYEYFTVYNELTKVKYVTEGMRKPAFLSGEQKKAIVDLLFKTNRKVTVKQLKEDYFKKIECFDSVEISGVEDRFNASLGTYHDLLKIIKDKDFLDNEENEDILEDIVLTLTLFEDREMIEERLKTYAHLFDDKVMKQLKRRRYTGWGRLSRKLINGIRDKQSGKTILDFLKSDGFANRNFMQLIHDDSLTFKEDIQKAQVSGQGDSLHEHIANLAGSPAIKKGILQTVKVVDELVKVMGRHKPENIVIEMARENQTTQKGQKNSRERMKRIEEGIKELGSQILKEHPVENTQLQNEKLYLYYLQNGRDMYVDQELDINRLSDYDVDHIVPQSFLKDDSIDNKVLTRSDKARGKSDNVPSEEVVKKMKNYWRQLLNAKLITQRKFDNLTKAERGGLSELDKAGFIKRQLVETRQITKHVAQILDSRMNTKYDENDKLIREVKVITLKSKLVSDFRKDFQFYKVREINNYHHAHDAYLNAVVGTALIKKYPKLESEFVYGDYKVYDVRKMIAKSEQEIGKATAKYFFYSNIMNFFKTEITLANGEIRKRPLIETNGETGEIVWDKGRDFATVRKVLSMPQVNIVKKTEVQTGGFSKESILPKRNSDKLIARKKDWDPKKYGGFDSPTVAYSVLVVAKVEKGKSKKLKSVKELLGITIMERSSFEKNPIDFLEAKGYKEVKKDLIIKLPKYSLFELENGRKRMLASAGELQKGNELALPSKYVNFLYLASHYEKLKGSPEDNEQKQLFVEQHKHYLDEIIEQISEFSKRVILADANLDKVLSAYNKHRDKPIREQAENIIHLFTLTNLGAPAAFKYFDTTIDRKRYTSTKEVLDATLIHQSITGLYETRIDLSQLGGDGGGGGGGSGGTLNIEDEYRLHEISTEPDVSPGSTWLSDFPQAWAETGGMGLAVRQAPLIIPLKATSTPVSIKQYPMSQEAKLGIKPHIQRLLDQGILVPCQSPWNTPLLPVKKPGTNDYRPVQGLREVNKRVEDIHPTVPNPYNLLSGLPTSHRWYTVLDLKDAFFCLRLHPTSQPLFASEWRDPGMGISGQLTWTRLPQGFKNSPTLFNEALHRGLADFRIQHPDLILLQYVDDLLLAATSELDCQQGTRALLKTLGNLGYRASAKKAQICQKQVKYLGYLLREGQRWLTEARKETVMGQPTPKTPRQLREFLGTAGFCRLWIPRFAEMAAPLYPLTKPGTLFNWGPDQQKAYHEIKQALLTAPALGLPDLTKPFELFVDEKQGYAKGVLTQKLGPWRRPVAYLSKKLDPVAAGWPPCLRMVAAIAVLTKDAGKLTMGQPLVILAPHAVEALVKQPPDRWLSNARMTHYQAMLLDTDRVQFGPVVALNPATLLPLPEEGAPHDCLEILAETHGTEPDLTDQPIPDADHTWYTDGSSFLQEGQRKAGAAVTTETEVIWARALPAGTSAQRAELIALTQALKMAEGKRLNVYTDSRYAFATAHIHGEIYKRRGWLTSEGREIKNKSEILALLKALFLPKRLSIIHCLGHQKGDSAEARGNRLADQAAREAAIKTPPDTSTLLAGKRTADGSEFEKRTADGSEFESPKKKAKVE

SEQ ID NO: 6598 - protein, 2082 aa, synthetic construct
MPAAKRVKLDGGDKKYSIGLDIGTNSVGWAVITDEYKVPSKKFKVLGNTDRHSIKKNLIGALLFDSGETAEATRLKRTARRRYTRRKNRICYLQEIFSNEMAKVDDSFFHRLEESFLVEEDKKHERHPIFGNIVDEVAYHEKYPTIYHLRKKLVDSTDKADLRLIYLALAHMIKFRGHFLIEGDLNPDNSDVDKLFIQLVQTYNQLFEENPINASGVDAKAILSARLSKSRRLENLIAQLPGEKKNGLFGNLIALSLGLTPNFKSNFDLAEDAKLQLSKDTYDDDLDNLLAQIGDQYADLFLAAKNLSDAILLSDILRVNTEITKAPLSASMIKRYDEHHQDLTLLKALVRQQLPEKYKEIFFDQSKNGYAGYIDGGASQEEFYKFIKPILEKMDGTEELLVKLNREDLLRKQRTFDNGSIPHQIHLGELHAILRRQEDFYPFLKDNREKIEKILTFRIPYYVGPLARGNSRFAWMTRKSEETITPWNFEEVVDKGASAQSFIERMTNFDKNLPNEKVLPKHSLLYEYFTVYNELTKVKYVTEGMRKPAFLSGEQKKAIVDLLFKTNRKVTVKQLKEDYFKKIECFDSVEISGVEDRFNASLGTYHDLLKIIKDKDFLDNEENEDILEDIVLTLTLFEDREMIEERLKTYAHLFDDKVMKQLKRRRYTGWGRLSRKLINGIRDKQSGKTILDFLKSDGFANRNFMQLIHDDSLTFKEDIQKAQVSGQGDSLHEHIANLAGSPAIKKGILQTVKVVDELVKVMGRHKPENIVIEMARENQTTQKGQKNSRERMKRIEEGIKELGSQILKEHPVENTQLQNEKLYLYYLQNGRDMYVDQELDINRLSDYDVDHIVPQSFLKDDSIDNKVLTRSDKARGKSDNVPSEEVVKKMKNYWRQLLNAKLITQRKFDNLTKAERGGLSELDKAGFIKRQLVETRQITKHVAQILDSRMNTKYDENDKLIREVKVITLKSKLVSDFRKDFQFYKVREINNYHHAHDAYLNAVVGTALIKKYPKLESEFVYGDYKVYDVRKMIAKSEQEIGKATAKYFFYSNIMNFFKTEITLANGEIRKRPLIETNGETGEIVWDKGRDFATVRKVLSMPQVNIVKKTEVQTGGFSKESILPKRNSDKLIARKKDWDPKKYGGFDSPTVAYSVLVVAKVEKGKSKKLKSVKELLGITIMERSSFEKNPIDFLEAKGYKEVKKDLIIKLPKYSLFELENGRKRMLASAGELQKGNELALPSKYVNFLYLASHYEKLKGSPEDNEQKQLFVEQHKHYLDEIIEQISEFSKRVILADANLDKVLSAYNKHRDKPIREQAENIIHLFTLTNLGAPAAFKYFDTTIDRKRYTSTKEVLDATLIHQSITGLYETRIDLSQLGGDGGGGGGGSGGIPWLMKKPLQLTTLVPLQEYEERLLKQTMLTGSYKEKLQSLFLKYDALWQHWENQVGHRRIKPHHIATGTVNPRPQKQYPINPKAKASIQTVINDLLKQGVLIQQNSIMNTPVYPVPKPDGKWRMVLDYREVNKTIPLIAAQNQHSAGILSSIFRGKYKTTLDLSNGFWAHSITPESYWLTAFTWLGQQYCWTRLPQGFLNSPALFNADVVDLLKEVPNVQVYVDDIYISHDDPREHLEQLEKVFSLLLNAGYVVSLKKSEIAQHEVEFLGFNITKEGRGLTETFKQKLLNITPPRDLKQLQSILGKLNFARNFIPNFSELVKPLYNIIATAPGKYITWTTDNSQQLQNIISMLNSAENLEERNPEVRLIMKVNTSPSAGYIRFYNEFAKRPIMYLNYVYTKAEVKFTNTEKLLTTIHKGLIKALDLGMGQEILVYSPIVSMTKIQKTPLPERKALPIRWITWMSYLEDPRIQFHYDKTLPELQQVPTVTDDIIAKIKHPSEFSMVFYTDGSAIKHPNVNKSHNAGMGIAQVQFKPEFTVINTWSIPLGDHTAQLAEVAAVEFACKKALKIDGPVLIVTDSFYVAESVNKELPYWQSNGFFNNKKKPLKHVSKWKSIADCIQLKPDIIIIHEKGHQPTASTFHTEGNNLADKLATQGSYVVNAGKRTADGSEFEKRTADGSEFESPKKKAKVE

SEQ ID NO: 6599 - protein, 2089 aa, synthetic construct
MPAAKRVKLDGGDKKYSIGLDIGTNSVGWAVITDEYKVPSKKFKVLGNTDRHSIKKNLIGALLFDSGETAEATRLKRTARRRYTRRKNRICYLQEIFSNEMAKVDDSFFHRLEESFLVEEDKKHERHPIFGNIVDEVAYHEKYPTIYHLRKKLVDSTDKADLRLIYLALAHMIKFRGHFLIEGDLNPDNSDVDKLFIQLVQTYNQLFEENPINASGVDAKAILSARLSKSRRLENLIAQLPGEKKNGLFGNLIALSLGLTPNFKSNFDLAEDAKLQLSKDTYDDDLDNLLAQIGDQYADLFLAAKNLSDAILLSDILRVNTEITKAPLSASMIKRYDEHHQDLTLLKALVRQQLPEKYKEIFFDQSKNGYAGYIDGGASQEEFYKFIKPILEKMDGTEELLVKLNREDLLRKQRTFDNGSIPHQIHLGELHAILRRQEDFYPFLKDNREKIEKILTFRIPYYVGPLARGNSRFAWMTRKSEETITPWNFEEVVDKGASAQSFIERMTNFDKNLPNEKVLPKHSLLYEYFTVYNELTKVKYVTEGMRKPAFLSGEQKKAIVDLLFKTNRKVTVKQLKEDYFKKIECFDSVEISGVEDRFNASLGTYHDLLKIIKDKDFLDNEENEDILEDIVLTLTLFEDREMIEERLKTYAHLFDDKVMKQLKRRRYTGWGRLSRKLINGIRDKQSGKTILDFLKSDGFANRNFMQLIHDDSLTFKEDIQKAQVSGQGDSLHEHIANLAGSPAIKKGILQTVKVVDELVKVMGRHKPENIVIEMARENQTTQKGQKNSRERMKRIEEGIKELGSQILKEHPVENTQLQNEKLYLYYLQNGRDMYVDQELDINRLSDYDVDHIVPQSFLKDDSIDNKVLTRSDKARGKSDNVPSEEVVKKMKNYWRQLLNAKLITQRKFDNLTKAERGGLSELDKAGFIKRQLVETRQITKHVAQILDSRMNTKYDENDKLIREVKVITLKSKLVSDFRKDFQFYKVREINNYHHAHDAYLNAVVGTALIKKYPKLESEFVYGDYKVYDVRKMIAKSEQEIGKATAKYFFYSNIMNFFKTEITLANGEIRKRPLIETNGETGEIVWDKGRDFATVRKVLSMPQVNIVKKTEVQTGGFSKESILPKRNSDKLIARKKDWDPKKYGGFDSPTVAYSVLVVAKVEKGKSKKLKSVKELLGITIMERSSFEKNPIDFLEAKGYKEVKKDLIIKLPKYSLFELENGRKRMLASAGELQKGNELALPSKYVNFLYLASHYEKLKGSPEDNEQKQLFVEQHKHYLDEIIEQISEFSKRVILADANLDKVLSAYNKHRDKPIREQAENIIHLFTLTNLGAPAAFKYFDTTIDRKRYTSTKEVLDATLIHQSITGLYETRIDLSQLGGDGGGGGGGSGGVLNLEEEYRLHEKPVPSSIDPSWLQLFPTVWAERAGMGLANQVPPVVVELRSGASPVAVRQYPMSKEAREGIRPHIQRFLDLGVLVPCQSPWNTPLLPVKKPGTNDYRPVQDLREINKRVQDIHPTVPNPYNLLSSLPPSHTWYSVLDLKDAFFCLKLHPNSQPLFAFEWRDPEKGNTGQLTWTRLPQGFKNSPTLFNEALHRDLAPFRALNPQVVLLQYVDDLLVAAPTYRDCKEGTQKLLQELSKLGYRVSAKKAQLCQKEVTYLGYLLKEGKRWLTPARKATVMKIPPPTTPRQVREFLGTAGFCRLWIPGFASLAAPLYPLTKPSIPFIWTEEHQKAFDRIKEALLSAPALALPDLTKPFTLYVDERAGVARGVLTQTLGPWRRPVAYLSKKLDPVASGWPTCLKAVAAVALLLKDADKLTLGQNVTVIASHSLESIVRQPPDRWMTNARMTHYQSLLLNERVSFAPPAVLNPATLLPVESEATPVHRCSEILAEETGTRRDLKDQPLPGVPAWYTDGSSFIAEGKRRAGAAIVDGKRTVWASSLPEGTSAQKAELVALTQALRLAEGKDINIYTDSRYAFATAHIHGAIYKQRGWLTSAGKDIKNKEEILALLEAIHLPKRVAIIHCPGHQKGNDPVATGNRRADEAAKQAALSTRVLAETTKPAGKRTADGSEFEKRTADGSEFESPKKKAKVE

SEQ ID NO: 6600 - protein, 2089 aa, synthetic construct
MPAAKRVKLDGGDKKYSIGLDIGTNSVGWAVITDEYKVPSKKFKVLGNTDRHSIKKNLIGALLFDSGETAEATRLKRTARRRYTRRKNRICYLQEIFSNEMAKVDDSFFHRLEESFLVEEDKKHERHPIFGNIVDEVAYHEKYPTIYHLRKKLVDSTDKADLRLIYLALAHMIKFRGHFLIEGDLNPDNSDVDKLFIQLVQTYNQLFEENPINASGVDAKAILSARLSKSRRLENLIAQLPGEKKNGLFGNLIALSLGLTPNFKSNFDLAEDAKLQLSKDTYDDDLDNLLAQIGDQYADLFLAAKNLSDAILLSDILRVNTEITKAPLSASMIKRYDEHHQDLTLLKALVRQQLPEKYKEIFFDQSKNGYAGYIDGGASQEEFYKFIKPILEKMDGTEELLVKLNREDLLRKQRTFDNGSIPHQIHLGELHAILRRQEDFYPFLKDNREKIEKILTFRIPYYVGPLARGNSRFAWMTRKSEETITPWNFEEVVDKGASAQSFIERMTNFDKNLPNEKVLPKHSLLYEYFTVYNELTKVKYVTEGMRKPAFLSGEQKKAIVDLLFKTNRKVTVKQLKEDYFKKIECFDSVEISGVEDRFNASLGTYHDLLKIIKDKDFLDNEENEDILEDIVLTLTLFEDREMIEERLKTYAHLFDDKVMKQLKRRRYTGWGRLSRKLINGIRDKQSGKTILDFLKSDGFANRNFMQLIHDDSLTFKEDIQKAQVSGQGDSLHEHIANLAGSPAIKKGILQTVKVVDELVKVMGRHKPENIVIEMARENQTTQKGQKNSRERMKRIEEGIKELGSQILKEHPVENTQLQNEKLYLYYLQNGRDMYVDQELDINRLSDYDVDHIVPQSFLKDDSIDNKVLTRSDKARGKSDNVPSEEVVKKMKNYWRQLLNAKLITQRKFDNLTKAERGGLSELDKAGFIKRQLVETRQITKHVAQILDSRMNTKYDENDKLIREVKVITLKSKLVSDFRKDFQFYKVREINNYHHAHDAYLNAVVGTALIKKYPKLESEFVYGDYKVYDVRKMIAKSEQEIGKATAKYFFYSNIMNFFKTEITLANGEIRKRPLIETNGETGEIVWDKGRDFATVRKVLSMPQVNIVKKTEVQTGGFSKESILPKRNSDKLIARKKDWDPKKYGGFDSPTVAYSVLVVAKVEKGKSKKLKSVKELLGITIMERSSFEKNPIDFLEAKGYKEVKKDLIIKLPKYSLFELENGRKRMLASAGELQKGNELALPSKYVNFLYLASHYEKLKGSPEDNEQKQLFVEQHKHYLDEIIEQISEFSKRVILADANLDKVLSAYNKHRDKPIREQAENIIHLFTLTNLGAPAAFKYFDTTIDRKRYTSTKEVLDATLIHQSITGLYETRIDLSQLGGDGGGGGGGSGGVLNLEEEYRLHEKPVPSSIDPSWLQLFPTVWAERAGMGLANQVPPVVVELRSGASPVAVRQYPMSKEAREGIRPHIQRFLDLGVLVPCQSPWNTPLLPVKKPGTNDYRPVQDLREINKRVQDIHPTVPNPYNLLSSLPPSHTWYSVLDLKDAFFCLKLHPNSQPLFAFEWRDPEKGNTGQLTWTRLPQGFKNSPTLFNEALHRDLAPFRALNPQVVLLQYVDDLLVAAPTYRDCKEGTQKLLQELSKLGYRVSAKKAQLCQKEVTYLGYLLKEGKRWLTPARKATVMKIPPPTTPRQVREFLGKAGFCRLFIPGFASLAAPLYPLTKPSIPFIWTEEHQKAFDRIKEALLSAPALALPDLTKPFTLYVDERAGVARGVLTQTLGPWRRPVAYLSKKLDPVASGWPTCLKAVAAVALLLKDADKLTLGQNVTVIASHSLESIVRQPPDRWMTNARMTHYQSLLLNERVSFAPPAVLNPATLLPVESEATPVHRCSEILAEETGTRRDLKDQPLPGVPAWYTDGSSFIAEGKRRAGAAIVDGKRTVWASSLPEGTSAQKAELVALTQALRLAEGKDINIYTDSRYAFATAHIHGAIYKQRGWLTSAGKDIKNKEEILALLEAIHLPKRVAIIHCPGHQKGNDPVATGNRRADEAAKQAALSTRVLAETTKPAGKRTADGSEFEKRTADGSEFESPKKKAKVE

SEQ ID NO: 6601 - protein, 2091 aa, synthetic construct
MPAAKRVKLDGGDKKYSIGLDIGTNSVGWAVITDEYKVPSKKFKVLGNTDRHSIKKNLIGALLFDSGETAEATRLKRTARRRYTRRKNRICYLQEIFSNEMAKVDDSFFHRLEESFLVEEDKKHERHPIFGNIVDEVAYHEKYPTIYHLRKKLVDSTDKADLRLIYLALAHMIKFRGHFLIEGDLNPDNSDVDKLFIQLVQTYNQLFEENPINASGVDAKAILSARLSKSRRLENLIAQLPGEKKNGLFGNLIALSLGLTPNFKSNFDLAEDAKLQLSKDTYDDDLDNLLAQIGDQYADLFLAAKNLSDAILLSDILRVNTEITKAPLSASMIKRYDEHHQDLTLLKALVRQQLPEKYKEIFFDQSKNGYAGYIDGGASQEEFYKFIKPILEKMDGTEELLVKLNREDLLRKQRTFDNGSIPHQIHLGELHAILRRQEDFYPFLKDNREKIEKILTFRIPYYVGPLARGNSRFAWMTRKSEETITPWNFEEVVDKGASAQSFIERMTNFDKNLPNEKVLPKHSLLYEYFTVYNELTKVKYVTEGMRKPAFLSGEQKKAIVDLLFKTNRKVTVKQLKEDYFKKIECFDSVEISGVEDRFNASLGTYHDLLKIIKDKDFLDNEENEDILEDIVLTLTLFEDREMIEERLKTYAHLFDDKVMKQLKRRRYTGWGRLSRKLINGIRDKQSGKTILDFLKSDGFANRNFMQLIHDDSLTFKEDIQKAQVSGQGDSLHEHIANLAGSPAIKKGILQTVKVVDELVKVMGRHKPENIVIEMARENQTTQKGQKNSRERMKRIEEGIKELGSQILKEHPVENTQLQNEKLYLYYLQNGRDMYVDQELDINRLSDYDVDHIVPQSFLKDDSIDNKVLTRSDKARGKSDNVPSEEVVKKMKNYWRQLLNAKLITQRKFDNLTKAERGGLSELDKAGFIKRQLVETRQITKHVAQILDSRMNTKYDENDKLIREVKVITLKSKLVSDFRKDFQFYKVREINNYHHAHDAYLNAVVGTALIKKYPKLESEFVYGDYKVYDVRKMIAKSEQEIGKATAKYFFYSNIMNFFKTEITLANGEIRKRPLIETNGETGEIVWDKGRDFATVRKVLSMPQVNIVKKTEVQTGGFSKESILPKRNSDKLIARKKDWDPKKYGGFDSPTVAYSVLVVAKVEKGKSKKLKSVKELLGITIMERSSFEKNPIDFLEAKGYKEVKKDLIIKLPKYSLFELENGRKRMLASAGELQKGNELALPSKYVNFLYLASHYEKLKGSPEDNEQKQLFVEQHKHYLDEIIEQISEFSKRVILADANLDKVLSAYNKHRDKPIREQAENIIHLFTLTNLGAPAAFKYFDTTIDRKRYTSTKEVLDATLIHQSITGLYETRIDLSQLGGDGGGGGGGSGGTLNIEDEYRLHETSKEPDVPLGSTWLSDFPQAWAETGGMGLAVRQAPLIIPLKATSTPVSIKQYPMSQEARLGIKPHIQRLLDQGILVPCQSPWNTPLLPVKKPGTNDYRPVQDLREVNKRVEDIHPTVPNPYNLLSGLPPSHQWYTVLDLKDAFFCLRLHPTSQPLFAFEWRDPEMGISGQLTWTRLPQGFKNSPTLFNEALHRDLADFRIQHPDLILLQYVDDLLLAATSEQDCQRGTRALLQTLGNLGYRASAKKAQICQKQVKYLGYLLKEGQRWLTEARKETVMGQPTPKTPRQLREFLGKAGFCRLFIPGFAEMAAPLYPLTKPGTLFNWGPDQQKAYQEIKQALLTAPALGLPDLTKPFELFVDEKQGYAKGVLTQKLGPWRRPVAYLSKKLDPVAAGWPPCLRMVAAIAVLTKDAGKLTMGQPLVILAPHAVEALVKQPPDRWLSNARMTHYQAMLLDTDRVQFGPVVALNPATLLPLPEKEAPHDCLEILAETHGTRPDLTDQPIPDADYTWYTDGSSFLQEGQRRAGAAVTTETEVIWARALPAGTSAQRAELIALTQALKMAEGKKLNVYTDSRYAFATAHVHGEIYRRRGWLTSEGREIKNKNEILALLKALFLPKRLSIIHCPGHQKGNSAEARGNRMADQAAREAAMKAVLETSTLLAGKRTADGSEFEKRTADGSEFESPKKKAKVE

SEQ ID NO: 6602 - protein, 2168 aa, synthetic construct
MPAAKRVKLDGGDKKYSIGLDIGTNSVGWAVITDEYKVPSKKFKVLGNTDRHSIKKNLIGALLFDSGETAEATRLKRTARRRYTRRKNRICYLQEIFSNEMAKVDDSFFHRLEESFLVEEDKKHERHPIFGNIVDEVAYHEKYPTIYHLRKKLVDSTDKADLRLIYLALAHMIKFRGHFLIEGDLNPDNSDVDKLFIQLVQTYNQLFEENPINASGVDAKAILSARLSKSRRLENLIAQLPGEKKNGLFGNLIALSLGLTPNFKSNFDLAEDAKLQLSKDTYDDDLDNLLAQIGDQYADLFLAAKNLSDAILLSDILRVNTEITKAPLSASMIKRYDEHHQDLTLLKALVRQQLPEKYKEIFFDQSKNGYAGYIDGGASQEEFYKFIKPILEKMDGTEELLVKLNREDLLRKQRTFDNGSIPHQIHLGELHAILRRQEDFYPFLKDNREKIEKILTFRIPYYVGPLARGNSRFAWMTRKSEETITPWNFEEVVDKGASAQSFIERMTNFDKNLPNEKVLPKHSLLYEYFTVYNELTKVKYVTEGMRKPAFLSGEQKKAIVDLLFKTNRKVTVKQLKEDYFKKIECFDSVEISGVEDRFNASLGTYHDLLKIIKDKDFLDNEENEDILEDIVLTLTLFEDREMIEERLKTYAHLFDDKVMKQLKRRRYTGWGRLSRKLINGIRDKQSGKTILDFLKSDGFANRNFMQLIHDDSLTFKEDIQKAQVSGQGDSLHEHIANLAGSPAIKKGILQTVKVVDELVKVMGRHKPENIVIEMARENQTTQKGQKNSRERMKRIEEGIKELGSQILKEHPVENTQLQNEKLYLYYLQNGRDMYVDQELDINRLSDYDVDHIVPQSFLKDDSIDNKVLTRSDKARGKSDNVPSEEVVKKMKNYWRQLLNAKLITQRKFDNLTKAERGGLSELDKAGFIKRQLVETRQITKHVAQILDSRMNTKYDENDKLIREVKVITLKSKLVSDFRKDFQFYKVREINNYHHAHDAYLNAVVGTALIKKYPKLESEFVYGDYKVYDVRKMIAKSEQEIGKATAKYFFYSNIMNFFKTEITLANGEIRKRPLIETNGETGEIVWDKGRDFATVRKVLSMPQVNIVKKTEVQTGGFSKESILPKRNSDKLIARKKDWDPKKYGGFDSPTVAYSVLVVAKVEKGKSKKLKSVKELLGITIMERSSFEKNPIDFLEAKGYKEVKKDLIIKLPKYSLFELENGRKRMLASAGELQKGNELALPSKYVNFLYLASHYEKLKGSPEDNEQKQLFVEQHKHYLDEIIEQISEFSKRVILADANLDKVLSAYNKHRDKPIREQAENIIHLFTLTNLGAPAAFKYFDTTIDRKRYTSTKEVLDATLIHQSITGLYETRIDLSQLGGDGGGGSGSSGGMDLLKPLTVERKGVKIKGYWNSQADITCVPKDLLQGEEPVRQQNVTTIHGTQEGDVYYVNLKIDGRRINTEVIGTTLDYAIITPGDVPWILKKPLELTIKLDLEEQQGTLLNNSILSKKGKEELKQLFEKYSALWQSWENQVGHRRIRPHKIATGTVKPTPQKQYHINPKAKPDIQIVINDLLKQGVLIQKESTMNTPVYPVPKPNGRWRMVLDYRAVNKVTPLIAVQNQHSYGILGSLFKGRYKTTIDLSNGFWAHPIVPEDYWITAFTWQGKQYCWTVLPQGFLNSPGLFTGDVVDLLQGIPNVEVYVDDVYISHDSEKEHLEYLDILFNRLKEAGYIISLKKSNIANSIVDFLGFQITNEGRGLTDTFKEKLENITAPTTLKQLQSILGLLNFARNFIPDFTELIAPLYALIPKSTKNYVPWQIEHSTTLETLITKLNGAEYLQGRKGDKTLIMKVNASYTTGYIRYYNEGEKKPISYVSIVFSKTELKFTELEKLLTTVHKGLLKALDLSMGQNIHVYSPIVSMQNIQKTPQTAKKALASRWLSWLSYLEDPRIRFFYDPQMPALKDLPAVDTGKDNKKHPSNFQHIFYTDGSAITSPTKEGHLNAGMGIVYFINKDGNLQKQQEWSISLGNHTAQFAEIAAFEFALKKCLPLGGNILVVTDSNYVAKAYNEELDVWASNGFVNNRKKPLKHISKWKSVADLKRLRPDVVVTHEPGHQKLDSSPHAYGNNLADQLATQASFKVHAGKRTADGSEFEKRTADGSEFESPKKKAKVE

SEQ ID NO: 6603 - protein, 2090 aa, synthetic construct
MPAAKRVKLDGGDKKYSIGLDIGTNSVGWAVITDEYKVPSKKFKVLGNTDRHSIKKNLIGALLFDSGETAEATRLKRTARRRYTRRKNRICYLQEIFSNEMAKVDDSFFHRLEESFLVEEDKKHERHPIFGNIVDEVAYHEKYPTIYHLRKKLVDSTDKADLRLIYLALAHMIKFRGHFLIEGDLNPDNSDVDKLFIQLVQTYNQLFEENPINASGVDAKAILSARLSKSRRLENLIAQLPGEKKNGLFGNLIALSLGLTPNFKSNFDLAEDAKLQLSKDTYDDDLDNLLAQIGDQYADLFLAAKNLSDAILLSDILRVNTEITKAPLSASMIKRYDEHHQDLTLLKALVRQQLPEKYKEIFFDQSKNGYAGYIDGGASQEEFYKFIKPILEKMDGTEELLVKLNREDLLRKQRTFDNGSIPHQIHLGELHAILRRQEDFYPFLKDNREKIEKILTFRIPYYVGPLARGNSRFAWMTRKSEETITPWNFEEVVDKGASAQSFIERMTNFDKNLPNEKVLPKHSLLYEYFTVYNELTKVKYVTEGMRKPAFLSGEQKKAIVDLLFKTNRKVTVKQLKEDYFKKIECFDSVEISGVEDRFNASLGTYHDLLKIIKDKDFLDNEENEDILEDIVLTLTLFEDREMIEERLKTYAHLFDDKVMKQLKRRRYTGWGRLSRKLINGIRDKQSGKTILDFLKSDGFANRNFMQLIHDDSLTFKEDIQKAQVSGQGDSLHEHIANLAGSPAIKKGILQTVKVVDELVKVMGRHKPENIVIEMARENQTTQKGQKNSRERMKRIEEGIKELGSQILKEHPVENTQLQNEKLYLYYLQNGRDMYVDQELDINRLSDYDVDHIVPQSFLKDDSIDNKVLTRSDKARGKSDNVPSEEVVKKMKNYWRQLLNAKLITQRKFDNLTKAERGGLSELDKAGFIKRQLVETRQITKHVAQILDSRMNTKYDENDKLIREVKVITLKSKLVSDFRKDFQFYKVREINNYHHAHDAYLNAVVGTALIKKYPKLESEFVYGDYKVYDVRKMIAKSEQEIGKATAKYFFYSNIMNFFKTEITLANGEIRKRPLIETNGETGEIVWDKGRDFATVRKVLSMPQVNIVKKTEVQTGGFSKESILPKRNSDKLIARKKDWDPKKYGGFDSPTVAYSVLVVAKVEKGKSKKLKSVKELLGITIMERSSFEKNPIDFLEAKGYKEVKKDLIIKLPKYSLFELENGRKRMLASAGELQKGNELALPSKYVNFLYLASHYEKLKGSPEDNEQKQLFVEQHKHYLDEIIEQISEFSKRVILADANLDKVLSAYNKHRDKPIREQAENIIHLFTLTNLGAPAAFKYFDTTIDRKRYTSTKEVLDATLIHQSITGLYETRIDLSQLGGDGGGGSGSSGGTLQLEEEYRLFEPESTQKQEMDIWLKNFPQAWAETGGMGTAHCQAPVLIQLKATATPISIRQYPMPHEAYQGIKPHIRRMLDQGILKPCQSPWNTPLLPVKKPGTEDYRPVQDLREVNKRVEDIHPTVPNPYNLLSTLPPSHPWYTVLDLKDAFFCLRLHSESQLLFAFEWRDPEIGLSGQLTWTRLPQGFKNSPTLFNEALHSDLADFRVRYPALVLLQYVDDLLLAAATRTECLEGTKALLETLGNKGYRASAKKAQICLQEVTYLGYSLKDGQRWLTKARKEAILSIPVPKNSRQVREFLGKAGYCRLFIPGFAELAAPLYPLTRPGTLFQWGTEQQLAFEDIKKALLSSPALGLPDITKPFELFIDENSGFAKGVLVQKLGPWKRPVAYLSKKLDTVASGWPPCLRMVAAIAILVKDAGKLTLGQPLTILTSHPVEALVRQPPNKWLSNARMTHYQAMLLDAERVHFGPTVSLNPATLLPLPSGGNHHDCLQILAETHGTRPDLTDQPLPDADLTWYTDGSSFIRNGEREAGAAVTTESEVIWAAPLPPGTSAQRAELIALTQALKMAEGKKLTVYTDSRYAFATTHVHGEIYRRRGWLTSEGKEIKNKNEILALLEALFLPKRLSIIHCPGHQKGDSPQAKGNRLADDTAKKAATETHSSLTVLPAGKRTADGSEFEKRTADGSEFESPKKKAKVE

SEQ ID NO: 6604 - protein, 2213 aa, synthetic construct
MPAAKRVKLDGGDKKYSIGLDIGTNSVGWAVITDEYKVPSKKFKVLGNTDRHSIKKNLIGALLFDSGETAEATRLKRTARRRYTRRKNRICYLQEIFSNEMAKVDDSFFHRLEESFLVEEDKKHERHPIFGNIVDEVAYHEKYPTIYHLRKKLVDSTDKADLRLIYLALAHMIKFRGHFLIEGDLNPDNSDVDKLFIQLVQTYNQLFEENPINASGVDAKAILSARLSKSRRLENLIAQLPGEKKNGLFGNLIALSLGLTPNFKSNFDLAEDAKLQLSKDTYDDDLDNLLAQIGDQYADLFLAAKNLSDAILLSDILRVNTEITKAPLSASMIKRYDEHHQDLTLLKALVRQQLPEKYKEIFFDQSKNGYAGYIDGGASQEEFYKFIKPILEKMDGTEELLVKLNREDLLRKQRTFDNGSIPHQIHLGELHAILRRQEDFYPFLKDNREKIEKILTFRIPYYVGPLARGNSRFAWMTRKSEETITPWNFEEVVDKGASAQSFIERMTNFDKNLPNEKVLPKHSLLYEYFTVYNELTKVKYVTEGMRKPAFLSGEQKKAIVDLLFKTNRKVTVKQLKEDYFKKIECFDSVEISGVEDRFNASLGTYHDLLKIIKDKDFLDNEENEDILEDIVLTLTLFEDREMIEERLKTYAHLFDDKVMKQLKRRRYTGWGRLSRKLINGIRDKQSGKTILDFLKSDGFANRNFMQLIHDDSLTFKEDIQKAQVSGQGDSLHEHIANLAGSPAIKKGILQTVKVVDELVKVMGRHKPENIVIEMARENQTTQKGQKNSRERMKRIEEGIKELGSQILKEHPVENTQLQNEKLYLYYLQNGRDMYVDQELDINRLSDYDVDHIVPQSFLKDDSIDNKVLTRSDKARGKSDNVPSEEVVKKMKNYWRQLLNAKLITQRKFDNLTKAERGGLSELDKAGFIKRQLVETRQITKHVAQILDSRMNTKYDENDKLIREVKVITLKSKLVSDFRKDFQFYKVREINNYHHAHDAYLNAVVGTALIKKYPKLESEFVYGDYKVYDVRKMIAKSEQEIGKATAKYFFYSNIMNFFKTEITLANGEIRKRPLIETNGETGEIVWDKGRDFATVRKVLSMPQVNIVKKTEVQTGGFSKESILPKRNSDKLIARKKDWDPKKYGGFDSPTVAYSVLVVAKVEKGKSKKLKSVKELLGITIMERSSFEKNPIDFLEAKGYKEVKKDLIIKLPKYSLFELENGRKRMLASAGELQKGNELALPSKYVNFLYLASHYEKLKGSPEDNEQKQLFVEQHKHYLDEIIEQISEFSKRVILADANLDKVLSAYNKHRDKPIREQAENIIHLFTLTNLGAPAAFKYFDTTIDRKRYTSTKEVLDATLIHQSITGLYETRIDLSQLGGDGGGGSGSSGGTLGDQGSRGSDPLPEPRVTLTVEGIPTEFLVNTGAEHSVLTKPMGKMGSKRTVVAGATGSKVYPWTTKRLLKIGQKQVTHSFLVIPECPAPLLGRDLLTKLKAQIQFSTEGPQVTWEDRPAMCLVLNLEEEYRLHEKPVPPSIDPSWLQLFPMVWAEKAGMGLANQVPPVVVELKSDASPVAVRQYPMSKEAREGIRPHIQRFLDLGILVPCQSPWNTPLLPVKKPGTNDYRPVQDLREVNKRVQDIHPTVPNPYNLLSSLPPSHTWYSVLDLKDAFFCLKLHPNSQPLFAFEWRDPEKGNTGQLTWTRLPQGFKNSPTLFDEALHRDLASFRALNPQVVMLQYVDDLLVAAPTYRDCKEGTRRLLQELSKLGYRVSAKKAQLCREEVTYLGYLLKGGKRWLTPARKATVMKIPTPTTPRQVREFLGTAGFCRLWIPGFASLAAPLYPLTREKVPFTWTEAHQEAFGRIKEALLSAPALALPDLTKPFALYVDEKEGVARGVLTQTLGPWRRPVAYLSKKLDPVASGWPTCLKAIAAVALLLKDADKLTLGQNVLVIAPHNLESIVRQPPDRWMTNARMTHYQSLLLNERVSFAPPAILNPATLLPVESDDTPIHICSEILAEETGTRPDLRDQPLPGVPAWYTDGSSFIMDGRRQAGAAIVDNKRTVWASNLPEGTSAQKAELIALTQALRLAEGKSINIYTDSRYAFATAHVHGAIYKQRGLLTSAGKDIKNKEEILALLEAIHLPKRVAIIHCPGHQRGTDPVATGNRKADEAAKQAAQSTRILTETTKNAGKRTADGSEFEKRTADGSEFESPKKKAKVE

SEQ ID NO: 6605 - protein, 2091 aa, synthetic construct
MPAAKRVKLDGGDKKYSIGLDIGTNSVGWAVITDEYKVPSKKFKVLGNTDRHSIKKNLIGALLFDSGETAEATRLKRTARRRYTRRKNRICYLQEIFSNEMAKVDDSFFHRLEESFLVEEDKKHERHPIFGNIVDEVAYHEKYPTIYHLRKKLVDSTDKADLRLIYLALAHMIKFRGHFLIEGDLNPDNSDVDKLFIQLVQTYNQLFEENPINASGVDAKAILSARLSKSRRLENLIAQLPGEKKNGLFGNLIALSLGLTPNFKSNFDLAEDAKLQLSKDTYDDDLDNLLAQIGDQYADLFLAAKNLSDAILLSDILRVNTEITKAPLSASMIKRYDEHHQDLTLLKALVRQQLPEKYKEIFFDQSKNGYAGYIDGGASQEEFYKFIKPILEKMDGTEELLVKLNREDLLRKQRTFDNGSIPHQIHLGELHAILRRQEDFYPFLKDNREKIEKILTFRIPYYVGPLARGNSRFAWMTRKSEETITPWNFEEVVDKGASAQSFIERMTNFDKNLPNEKVLPKHSLLYEYFTVYNELTKVKYVTEGMRKPAFLSGEQKKAIVDLLFKTNRKVTVKQLKEDYFKKIECFDSVEISGVEDRFNASLGTYHDLLKIIKDKDFLDNEENEDILEDIVLTLTLFEDREMIEERLKTYAHLFDDKVMKQLKRRRYTGWGRLSRKLINGIRDKQSGKTILDFLKSDGFANRNFMQLIHDDSLTFKEDIQKAQVSGQGDSLHEHIANLAGSPAIKKGILQTVKVVDELVKVMGRHKPENIVIEMARENQTTQKGQKNSRERMKRIEEGIKELGSQILKEHPVENTQLQNEKLYLYYLQNGRDMYVDQELDINRLSDYDVDHIVPQSFLKDDSIDNKVLTRSDKARGKSDNVPSEEVVKKMKNYWRQLLNAKLITQRKFDNLTKAERGGLSELDKAGFIKRQLVETRQITKHVAQILDSRMNTKYDENDKLIREVKVITLKSKLVSDFRKDFQFYKVREINNYHHAHDAYLNAVVGTALIKKYPKLESEFVYGDYKVYDVRKMIAKSEQEIGKATAKYFFYSNIMNFFKTEITLANGEIRKRPLIETNGETGEIVWDKGRDFATVRKVLSMPQVNIVKKTEVQTGGFSKESILPKRNSDKLIARKKDWDPKKYGGFDSPTVAYSVLVVAKVEKGKSKKLKSVKELLGITIMERSSFEKNPIDFLEAKGYKEVKKDLIIKLPKYSLFELENGRKRMLASAGELQKGNELALPSKYVNFLYLASHYEKLKGSPEDNEQKQLFVEQHKHYLDEIIEQISEFSKRVILADANLDKVLSAYNKHRDKPIREQAENIIHLFTLTNLGAPAAFKYFDTTIDRKRYTSTKEVLDATLIHQSITGLYETRIDLSQLGGDGGGGSGSSGGTLGIEDEYRLHETSTEPDVSLGSTWLSDFPQAWAETGGMGLAVRQAPLIIPLKATSTPVSIQQYPMSHEARLGIKPHIQRLLDQGILVPCQSPWNTPLLPVKKPGTNDYRPVQDLREVNKRVEDIHPTVPNPYNLLSGLPPSHQWYTVLDLKDAFFCLRLHPTSQPLFAFEWRDPGMGISGQLTWTRLPQGFKNSPTLFDEALHRDLADFRIQHPDLILLQYVDDILLAATSELDCQQGTRALLQTLGDLGYRASAKKAQICQKQVKYLGYLLREGQRWLTEARKETVMGQPVPKTPRQLREFLGTAGFCRLWIPGFAEMAAPLYPLTKTGTLFSWGPDQQKAYQEIKQALLTAPALGLPDLTKPFELFVDEKQGYAKGVLTQKLGPWRRPVAYLSKKLDPVAAGWPPCLRMVAAIAVLTKDAGKLTMGQPLVILAPHAVEALVKQPPDRWLSNARMTHYQAMLLDTDRVQFGPVVALNPATLLPLPEEGAPHDCLEILAETHGTRPDLTDQPIPDADHTWYTDGSSFLQEGQRKAGAAVTTETEVIWAGALPAGTSAQRAELIALTQALKMAEGKRLNVYTDSRYAFATAHIHGEIYRRRGLLTSEGREIKNKSEILALLKALFLPKRLSIIHCLGHQKGDSAEARGNRLADQAAREAAIKTPPDTSTLLAGKRTADGSEFEKRTADGSEFESPKKKAKVE

SEQ ID NO: 6606 - protein, 2091 aa, synthetic construct
MPAAKRVKLDGGDKKYSIGLDIGTNSVGWAVITDEYKVPSKKFKVLGNTDRHSIKKNLIGALLFDSGETAEATRLKRTARRRYTRRKNRICYLQEIFSNEMAKVDDSFFHRLEESFLVEEDKKHERHPIFGNIVDEVAYHEKYPTIYHLRKKLVDSTDKADLRLIYLALAHMIKFRGHFLIEGDLNPDNSDVDKLFIQLVQTYNQLFEENPINASGVDAKAILSARLSKSRRLENLIAQLPGEKKNGLFGNLIALSLGLTPNFKSNFDLAEDAKLQLSKDTYDDDLDNLLAQIGDQYADLFLAAKNLSDAILLSDILRVNTEITKAPLSASMIKRYDEHHQDLTLLKALVRQQLPEKYKEIFFDQSKNGYAGYIDGGASQEEFYKFIKPILEKMDGTEELLVKLNREDLLRKQRTFDNGSIPHQIHLGELHAILRRQEDFYPFLKDNREKIEKILTFRIPYYVGPLARGNSRFAWMTRKSEETITPWNFEEVVDKGASAQSFIERMTNFDKNLPNEKVLPKHSLLYEYFTVYNELTKVKYVTEGMRKPAFLSGEQKKAIVDLLFKTNRKVTVKQLKEDYFKKIECFDSVEISGVEDRFNASLGTYHDLLKIIKDKDFLDNEENEDILEDIVLTLTLFEDREMIEERLKTYAHLFDDKVMKQLKRRRYTGWGRLSRKLINGIRDKQSGKTILDFLKSDGFANRNFMQLIHDDSLTFKEDIQKAQVSGQGDSLHEHIANLAGSPAIKKGILQTVKVVDELVKVMGRHKPENIVIEMARENQTTQKGQKNSRERMKRIEEGIKELGSQILKEHPVENTQLQNEKLYLYYLQNGRDMYVDQELDINRLSDYDVDHIVPQSFLKDDSIDNKVLTRSDKARGKSDNVPSEEVVKKMKNYWRQLLNAKLITQRKFDNLTKAERGGLSELDKAGFIKRQLVETRQITKHVAQILDSRMNTKYDENDKLIREVKVITLKSKLVSDFRKDFQFYKVREINNYHHAHDAYLNAVVGTALIKKYPKLESEFVYGDYKVYDVRKMIAKSEQEIGKATAKYFFYSNIMNFFKTEITLANGEIRKRPLIETNGETGEIVWDKGRDFATVRKVLSMPQVNIVKKTEVQTGGFSKESILPKRNSDKLIARKKDWDPKKYGGFDSPTVAYSVLVVAKVEKGKSKKLKSVKELLGITIMERSSFEKNPIDFLEAKGYKEVKKDLIIKLPKYSLFELENGRKRMLASAGELQKGNELALPSKYVNFLYLASHYEKLKGSPEDNEQKQLFVEQHKHYLDEIIEQISEFSKRVILADANLDKVLSAYNKHRDKPIREQAENIIHLFTLTNLGAPAAFKYFDTTIDRKRYTSTKEVLDATLIHQSITGLYETRIDLSQLGGDGGGGSGSSGGTLGIEDEYRLHETSTEPDVSLGSTWLSDFPQAWAETGGMGLAVRQAPLIIPLKATSTPVSIQQYPMSHEARLGIKPHIQRLLDQGILVPCQSPWNTPLLPVKKPGTNDYRPVQDLREVNKRVEDIHPTVPNPYNLLSGLPPSHQWYTVLDLKDAFFCLRLHPTSQPLFAFEWRDPGMGISGQLTWTRLPQGFKNSPTLFNEALHRDLADFRIQHPDLILLQYVDDILLAATSELDCQQGTRALLQTLGDLGYRASAKKAQICQKQVKYLGYLLREGQRWLTEARKETVMGQPVPKTPRQLREFLGTAGFCRLWIPGFAEMAAPLYPLTKPGTLFSWGPDQQKAYQEIKQALLTAPALGLPDLTKPFELFVDEKQGYAKGVLTQKLGPWRRPVAYLSKKLDPVAAGWPPCLRMVAAIAVLTKDAGKLTMGQPLVILAPHAVEALVKQPPDRWLSNARMTHYQAMLLDTDRVQFGPVVALNPATLLPLPEEGAPHDCLEILAETHGTRPDLTDQPIPDADHTWYTDGSSFLQEGQRKAGAAVTTETEVIWAGALPAGTSAQRAELIALTQALKMAEGKRLNVYTDSRYAFATAHIHGEIYRRRGWLTSEGREIKNKSEILALLKALFLPKRLSIIHCLGHQKGDSAEARGNRLADQAAREAAIKTPPDTSTLLAGKRTADGSEFEKRTADGSEFESPKKKAKVE

SEQ ID NO: 6607 - protein, 2091 aa, synthetic construct
MPAAKRVKLDGGDKKYSIGLDIGTNSVGWAVITDEYKVPSKKFKVLGNTDRHSIKKNLIGALLFDSGETAEATRLKRTARRRYTRRKNRICYLQEIFSNEMAKVDDSFFHRLEESFLVEEDKKHERHPIFGNIVDEVAYHEKYPTIYHLRKKLVDSTDKADLRLIYLALAHMIKFRGHFLIEGDLNPDNSDVDKLFIQLVQTYNQLFEENPINASGVDAKAILSARLSKSRRLENLIAQLPGEKKNGLFGNLIALSLGLTPNFKSNFDLAEDAKLQLSKDTYDDDLDNLLAQIGDQYADLFLAAKNLSDAILLSDILRVNTEITKAPLSASMIKRYDEHHQDLTLLKALVRQQLPEKYKEIFFDQSKNGYAGYIDGGASQEEFYKFIKPILEKMDGTEELLVKLNREDLLRKQRTFDNGSIPHQIHLGELHAILRRQEDFYPFLKDNREKIEKILTFRIPYYVGPLARGNSRFAWMTRKSEETITPWNFEEVVDKGASAQSFIERMTNFDKNLPNEKVLPKHSLLYEYFTVYNELTKVKYVTEGMRKPAFLSGEQKKAIVDLLFKTNRKVTVKQLKEDYFKKIECFDSVEISGVEDRFNASLGTYHDLLKIIKDKDFLDNEENEDILEDIVLTLTLFEDREMIEERLKTYAHLFDDKVMKQLKRRRYTGWGRLSRKLINGIRDKQSGKTILDFLKSDGFANRNFMQLIHDDSLTFKEDIQKAQVSGQGDSLHEHIANLAGSPAIKKGILQTVKVVDELVKVMGRHKPENIVIEMARENQTTQKGQKNSRERMKRIEEGIKELGSQILKEHPVENTQLQNEKLYLYYLQNGRDMYVDQELDINRLSDYDVDHIVPQSFLKDDSIDNKVLTRSDKARGKSDNVPSEEVVKKMKNYWRQLLNAKLITQRKFDNLTKAERGGLSELDKAGFIKRQLVETRQITKHVAQILDSRMNTKYDENDKLIREVKVITLKSKLVSDFRKDFQFYKVREINNYHHAHDAYLNAVVGTALIKKYPKLESEFVYGDYKVYDVRKMIAKSEQEIGKATAKYFFYSNIMNFFKTEITLANGEIRKRPLIETNGETGEIVWDKGRDFATVRKVLSMPQVNIVKKTEVQTGGFSKESILPKRNSDKLIARKKDWDPKKYGGFDSPTVAYSVLVVAKVEKGKSKKLKSVKELLGITIMERSSFEKNPIDFLEAKGYKEVKKDLIIKLPKYSLFELENGRKRMLASAGELQKGNELALPSKYVNFLYLASHYEKLKGSPEDNEQKQLFVEQHKHYLDEIIEQISEFSKRVILADANLDKVLSAYNKHRDKPIREQAENIIHLFTLTNLGAPAAFKYFDTTIDRKRYTSTKEVLDATLIHQSITGLYETRIDLSQLGGDGGGGSGSSGGTLNIEDEYRLHETSKGPDVPLGSTWLSDFPQAWAETGGMGLAVRQAPLIIPLKATSTPVSIKQYPMSQEARLGIKPHIQRLLDQGILVPCQSPWNTPLLPVKKPGTNDYRPVQDLREVNKRVEDIHPTVPNPYNLLSGLPPSHQWYTVLDLKDAFFCLRLHPTSQSLFAFEWRDPEMGISGQLTWTRLPQGFKNSPTLFNEALHRDLADFRIQHPDLILLQYVDDLLLAATSELDCQQGTRALLQTLGDLGYRASAKKAQICQKQVKYLGYLLKEGQRWLTEARKETVMGQPTPKTPRQLREFLGKAGFCRLFIPGFAEMAAPLYPLTKPGTLFEWGPDQQKAYQEIKQALLTAPALGLPDLTKPFELFVDEKQGYAKGVLTQKLGPWRRPVAYLSKKLDPVAAGWPPCLRMVAAIAVLTKDAGKLTMGQPLVILAPHAVEALVKQPPDRWLSNARMTHYQALLLDTDRVQFGPIVALNPATLLPLPEEGLQHDCLDILAEAHGTRPDLTDQPLPDADHTWYTDGSSFLQEGQRKAGAAVTTETEVVWAKALPAGTSAQRAELIALTQALKMAEGKKLNVYTDSRYAFATAHIHGEIYRRRGWLTSEGKEIKNKDEILALLKALFLPKRLSIIHCPGHQKGNRAEARGNRMADQAAREVATRETPETSTLLAGKRTADGSEFEKRTADGSEFESPKKKAKVE

SEQ ID NO: 6608 - protein, 2082 aa, synthetic construct
MPAAKRVKLDGGDKKYSIGLDIGTNSVGWAVITDEYKVPSKKFKVLGNTDRHSIKKNLIGALLFDSGETAEATRLKRTARRRYTRRKNRICYLQEIFSNEMAKVDDSFFHRLEESFLVEEDKKHERHPIFGNIVDEVAYHEKYPTIYHLRKKLVDSTDKADLRLIYLALAHMIKFRGHFLIEGDLNPDNSDVDKLFIQLVQTYNQLFEENPINASGVDAKAILSARLSKSRRLENLIAQLPGEKKNGLFGNLIALSLGLTPNFKSNFDLAEDAKLQLSKDTYDDDLDNLLAQIGDQYADLFLAAKNLSDAILLSDILRVNTEITKAPLSASMIKRYDEHHQDLTLLKALVRQQLPEKYKEIFFDQSKNGYAGYIDGGASQEEFYKFIKPILEKMDGTEELLVKLNREDLLRKQRTFDNGSIPHQIHLGELHAILRRQEDFYPFLKDNREKIEKILTFRIPYYVGPLARGNSRFAWMTRKSEETITPWNFEEVVDKGASAQSFIERMTNFDKNLPNEKVLPKHSLLYEYFTVYNELTKVKYVTEGMRKPAFLSGEQKKAIVDLLFKTNRKVTVKQLKEDYFKKIECFDSVEISGVEDRFNASLGTYHDLLKIIKDKDFLDNEENEDILEDIVLTLTLFEDREMIEERLKTYAHLFDDKVMKQLKRRRYTGWGRLSRKLINGIRDKQSGKTILDFLKSDGFANRNFMQLIHDDSLTFKEDIQKAQVSGQGDSLHEHIANLAGSPAIKKGILQTVKVVDELVKVMGRHKPENIVIEMARENQTTQKGQKNSRERMKRIEEGIKELGSQILKEHPVENTQLQNEKLYLYYLQNGRDMYVDQELDINRLSDYDVDHIVPQSFLKDDSIDNKVLTRSDKARGKSDNVPSEEVVKKMKNYWRQLLNAKLITQRKFDNLTKAERGGLSELDKAGFIKRQLVETRQITKHVAQILDSRMNTKYDENDKLIREVKVITLKSKLVSDFRKDFQFYKVREINNYHHAHDAYLNAVVGTALIKKYPKLESEFVYGDYKVYDVRKMIAKSEQEIGKATAKYFFYSNIMNFFKTEITLANGEIRKRPLIETNGETGEIVWDKGRDFATVRKVLSMPQVNIVKKTEVQTGGFSKESILPKRNSDKLIARKKDWDPKKYGGFDSPTVAYSVLVVAKVEKGKSKKLKSVKELLGITIMERSSFEKNPIDFLEAKGYKEVKKDLIIKLPKYSLFELENGRKRMLASAGELQKGNELALPSKYVNFLYLASHYEKLKGSPEDNEQKQLFVEQHKHYLDEIIEQISEFSKRVILADANLDKVLSAYNKHRDKPIREQAENIIHLFTLTNLGAPAAFKYFDTTIDRKRYTSTKEVLDATLIHQSITGLYETRIDLSQLGGDGGGGSGSSGGVPWLMKKPLQLTVLVPLHEYQERLLQQTALPKEQKELLQKLFLKYDALWQHWENQVGHRRIKPHNIATGTLAPRPQKQYPINPKAKPSIQIVIDDLLKQGVLIQQNSTMNTPVYPVPKPDGKWRMVLDYREVNKTIPLIAAQNQHSAGILSSIYRGKYKTTLDLTNGFWAHPITPESYWLTAFTWQGKQYCWTRLPQGFLNSPALFNADVVDLLKEIPNVQAYVDDIYISHDDPQEHLEQLEKIFSILLNAGYVVSLKKSEIAQREVEFLGFNITKEGRGLTDTFKQKLLNITPPKDLKQLQSILGLLNFARNFIPNYSELVKPLYTIVAPANGKFISWTEDNSNQLQHIISVLNQADNLEERNPETRLIIKVNSSPSAGYIRYYNEGSKRPIMYVNYIFSKAEAKFTQTEKLLTTMHKGLIKAMDLAMGQEILVYSPIVSMTKIQRTPLPERKALPVRWITWMTYLEDPRIQFHYDKSLPELQQIPNVTEDVIAKTKHPSEFAMVFYTDGSAIKHPDVNKSHSAGMGIAQVQFIPEYKIVHQWSIPLGDHTAQLAEIAAVEFACKKALKISGPVLIVTDSFYVAESANKELPYWKSNGFLNNKKKPLRHVSKWKSIAECLQLKPDIIIMHEKGHQQPMTTLHTEGNNLADKLATQGSYVVHAGKRTADGSEFEKRTADGSEFESPKKKAKVE

SEQ ID NO: 6609 - protein, 2082 aa, synthetic construct
MPAAKRVKLDGGDKKYSIGLDIGTNSVGWAVITDEYKVPSKKFKVLGNTDRHSIKKNLIGALLFDSGETAEATRLKRTARRRYTRRKNRICYLQEIFSNEMAKVDDSFFHRLEESFLVEEDKKHERHPIFGNIVDEVAYHEKYPTIYHLRKKLVDSTDKADLRLIYLALAHMIKFRGHFLIEGDLNPDNSDVDKLFIQLVQTYNQLFEENPINASGVDAKAILSARLSKSRRLENLIAQLPGEKKNGLFGNLIALSLGLTPNFKSNFDLAEDAKLQLSKDTYDDDLDNLLAQIGDQYADLFLAAKNLSDAILLSDILRVNTEITKAPLSASMIKRYDEHHQDLTLLKALVRQQLPEKYKEIFFDQSKNGYAGYIDGGASQEEFYKFIKPILEKMDGTEELLVKLNREDLLRKQRTFDNGSIPHQIHLGELHAILRRQEDFYPFLKDNREKIEKILTFRIPYYVGPLARGNSRFAWMTRKSEETITPWNFEEVVDKGASAQSFIERMTNFDKNLPNEKVLPKHSLLYEYFTVYNELTKVKYVTEGMRKPAFLSGEQKKAIVDLLFKTNRKVTVKQLKEDYFKKIECFDSVEISGVEDRFNASLGTYHDLLKIIKDKDFLDNEENEDILEDIVLTLTLFEDREMIEERLKTYAHLFDDKVMKQLKRRRYTGWGRLSRKLINGIRDKQSGKTILDFLKSDGFANRNFMQLIHDDSLTFKEDIQKAQVSGQGDSLHEHIANLAGSPAIKKGILQTVKVVDELVKVMGRHKPENIVIEMARENQTTQKGQKNSRERMKRIEEGIKELGSQILKEHPVENTQLQNEKLYLYYLQNGRDMYVDQELDINRLSDYDVDHIVPQSFLKDDSIDNKVLTRSDKARGKSDNVPSEEVVKKMKNYWRQLLNAKLITQRKFDNLTKAERGGLSELDKAGFIKRQLVETRQITKHVAQILDSRMNTKYDENDKLIREVKVITLKSKLVSDFRKDFQFYKVREINNYHHAHDAYLNAVVGTALIKKYPKLESEFVYGDYKVYDVRKMIAKSEQEIGKATAKYFFYSNIMNFFKTEITLANGEIRKRPLIETNGETGEIVWDKGRDFATVRKVLSMPQVNIVKKTEVQTGGFSKESILPKRNSDKLIARKKDWDPKKYGGFDSPTVAYSVLVVAKVEKGKSKKLKSVKELLGITIMERSSFEKNPIDFLEAKGYKEVKKDLIIKLPKYSLFELENGRKRMLASAGELQKGNELALPSKYVNFLYLASHYEKLKGSPEDNEQKQLFVEQHKHYLDEIIEQISEFSKRVILADANLDKVLSAYNKHRDKPIREQAENIIHLFTLTNLGAPAAFKYFDTTIDRKRYTSTKEVLDATLIHQSITGLYETRIDLSQLGGDGGGGSGSSGGIPWLMKKPLQLTTLVPLQEYEERLLKQTMLTGSYKEKLQSLFLKYDALWQHWENQVGHRRIKPHHIATGTVNPRPQKQYPINPKAKASIQTVINDLLKQGVLIQQNSIMNTPVYPVPKPDGKWRMVLDYREVNKTIPLIAAQNQHSAGILSSIFRGKYKTTLDLSNGFWAHSITPESYWLTAFTWLGQQYCWTRLPQGFLNSPALFNADVVDLLKEVPNVQVYVDDIYISHDDPREHLEQLEKVFSLLLNAGYVVSLKKSEIAQHEVEFLGFNITKEGRGLTETFKQKLLNITPPRDLKQLQSILGLLNFARNFIPNFSELVKPLYNIIATAPGKYITWTTDNSQQLQNIISMLNSAENLEERNPEVRLIMKVNTSPSAGYIRFYNEFAKRPIMYLNYVYTKAEVKFTNTEKLLTTIHKGLIKALDLGMGQEILVYSPIVSMTKIQKTPLPERKALPIRWITWMSYLEDPRIQFHYDKTLPELQQVPTVTDDIIAKIKHPSEFSMVFYTDGSAIKHPNVNKSHNAGMGIAQVQFKPEFTVINTWSIPLGDHTAQLAEVAAVEFACKKALKIDGPVLIVTDSFYVAESVNKELPYWQSNGFFNNKKKPLKHVSKWKSIADCIQLKPDIIIIHEKGHQPTASTFHTEGNNLADKLATQGSYVVNAGKRTADGSEFEKRTADGSEFESPKKKAKVE

SEQ ID NO: 6610 - protein, 2082 aa, synthetic construct
MPAAKRVKLDGGDKKYSIGLDIGTNSVGWAVITDEYKVPSKKFKVLGNTDRHSIKKNLIGALLFDSGETAEATRLKRTARRRYTRRKNRICYLQEIFSNEMAKVDDSFFHRLEESFLVEEDKKHERHPIFGNIVDEVAYHEKYPTIYHLRKKLVDSTDKADLRLIYLALAHMIKFRGHFLIEGDLNPDNSDVDKLFIQLVQTYNQLFEENPINASGVDAKAILSARLSKSRRLENLIAQLPGEKKNGLFGNLIALSLGLTPNFKSNFDLAEDAKLQLSKDTYDDDLDNLLAQIGDQYADLFLAAKNLSDAILLSDILRVNTEITKAPLSASMIKRYDEHHQDLTLLKALVRQQLPEKYKEIFFDQSKNGYAGYIDGGASQEEFYKFIKPILEKMDGTEELLVKLNREDLLRKQRTFDNGSIPHQIHLGELHAILRRQEDFYPFLKDNREKIEKILTFRIPYYVGPLARGNSRFAWMTRKSEETITPWNFEEVVDKGASAQSFIERMTNFDKNLPNEKVLPKHSLLYEYFTVYNELTKVKYVTEGMRKPAFLSGEQKKAIVDLLFKTNRKVTVKQLKEDYFKKIECFDSVEISGVEDRFNASLGTYHDLLKIIKDKDFLDNEENEDILEDIVLTLTLFEDREMIEERLKTYAHLFDDKVMKQLKRRRYTGWGRLSRKLINGIRDKQSGKTILDFLKSDGFANRNFMQLIHDDSLTFKEDIQKAQVSGQGDSLHEHIANLAGSPAIKKGILQTVKVVDELVKVMGRHKPENIVIEMARENQTTQKGQKNSRERMKRIEEGIKELGSQILKEHPVENTQLQNEKLYLYYLQNGRDMYVDQELDINRLSDYDVDHIVPQSFLKDDSIDNKVLTRSDKARGKSDNVPSEEVVKKMKNYWRQLLNAKLITQRKFDNLTKAERGGLSELDKAGFIKRQLVETRQITKHVAQILDSRMNTKYDENDKLIREVKVITLKSKLVSDFRKDFQFYKVREINNYHHAHDAYLNAVVGTALIKKYPKLESEFVYGDYKVYDVRKMIAKSEQEIGKATAKYFFYSNIMNFFKTEITLANGEIRKRPLIETNGETGEIVWDKGRDFATVRKVLSMPQVNIVKKTEVQTGGFSKESILPKRNSDKLIARKKDWDPKKYGGFDSPTVAYSVLVVAKVEKGKSKKLKSVKELLGITIMERSSFEKNPIDFLEAKGYKEVKKDLIIKLPKYSLFELENGRKRMLASAGELQKGNELALPSKYVNFLYLASHYEKLKGSPEDNEQKQLFVEQHKHYLDEIIEQISEFSKRVILADANLDKVLSAYNKHRDKPIREQAENIIHLFTLTNLGAPAAFKYFDTTIDRKRYTSTKEVLDATLIHQSITGLYETRIDLSQLGGDGGGGSGSSGGIPWLMKKPLQLTTLVPLQEYEERLLKQTMLTGSYKEKLQSLFLKYDALWQHWENQVGHRRIKPHHIATGTVNPRPQKQYPINPKAKASIQTVINDLLKQGVLIQQNSIMNTPVYPVPKPDGKWRMVLDYREVNKTIPLIAAQNQHSAGILSSIFRGKYKTTLDLSNGFWAHSITPESYWLTAFTWLGQQYCWTRLPQGFLNSPALFNADVVDLLKEVPNVQVYVDDIYISHDDPREHLEQLEKVFSLLLNAGYVVSLKKSEIAQHEVEFLGFNITKEGRGLTETFKQKLLNITPPRDLKQLQSILGKLNFARNFIPNFSELVKPLYNIIATAPGKYITWTTDNSQQLQNIISMLNSAENLEERNPEVRLIMKVNTSPSAGYIRFYNEFAKRPIMYLNYVYTKAEVKFTNTEKLLTTIHKGLIKALDLGMGQEILVYSPIVSMTKIQKTPLPERKALPIRWITWMSYLEDPRIQFHYDKTLPELQQVPTVTDDIIAKIKHPSEFSMVFYTDGSAIKHPNVNKSHNAGMGIAQVQFKPEFTVINTWSIPLGDHTAQLAEVAAVEFACKKALKIDGPVLIVTDSFYVAESVNKELPYWQSNGFFNNKKKPLKHVSKWKSIADCIQLKPDIIIIHEKGHQPTASTFHTEGNNLADKLATQGSYVVNAGKRTADGSEFEKRTADGSEFESPKKKAKVE

SEQ ID NO: 6611 - protein, 2089 aa, synthetic construct
MPAAKRVKLDGGDKKYSIGLDIGTNSVGWAVITDEYKVPSKKFKVLGNTDRHSIKKNLIGALLFDSGETAEATRLKRTARRRYTRRKNRICYLQEIFSNEMAKVDDSFFHRLEESFLVEEDKKHERHPIFGNIVDEVAYHEKYPTIYHLRKKLVDSTDKADLRLIYLALAHMIKFRGHFLIEGDLNPDNSDVDKLFIQLVQTYNQLFEENPINASGVDAKAILSARLSKSRRLENLIAQLPGEKKNGLFGNLIALSLGLTPNFKSNFDLAEDAKLQLSKDTYDDDLDNLLAQIGDQYADLFLAAKNLSDAILLSDILRVNTEITKAPLSASMIKRYDEHHQDLTLLKALVRQQLPEKYKEIFFDQSKNGYAGYIDGGASQEEFYKFIKPILEKMDGTEELLVKLNREDLLRKQRTFDNGSIPHQIHLGELHAILRRQEDFYPFLKDNREKIEKILTFRIPYYVGPLARGNSRFAWMTRKSEETITPWNFEEVVDKGASAQSFIERMTNFDKNLPNEKVLPKHSLLYEYFTVYNELTKVKYVTEGMRKPAFLSGEQKKAIVDLLFKTNRKVTVKQLKEDYFKKIECFDSVEISGVEDRFNASLGTYHDLLKIIKDKDFLDNEENEDILEDIVLTLTLFEDREMIEERLKTYAHLFDDKVMKQLKRRRYTGWGRLSRKLINGIRDKQSGKTILDFLKSDGFANRNFMQLIHDDSLTFKEDIQKAQVSGQGDSLHEHIANLAGSPAIKKGILQTVKVVDELVKVMGRHKPENIVIEMARENQTTQKGQKNSRERMKRIEEGIKELGSQILKEHPVENTQLQNEKLYLYYLQNGRDMYVDQELDINRLSDYDVDHIVPQSFLKDDSIDNKVLTRSDKARGKSDNVPSEEVVKKMKNYWRQLLNAKLITQRKFDNLTKAERGGLSELDKAGFIKRQLVETRQITKHVAQILDSRMNTKYDENDKLIREVKVITLKSKLVSDFRKDFQFYKVREINNYHHAHDAYLNAVVGTALIKKYPKLESEFVYGDYKVYDVRKMIAKSEQEIGKATAKYFFYSNIMNFFKTEITLANGEIRKRPLIETNGETGEIVWDKGRDFATVRKVLSMPQVNIVKKTEVQTGGFSKESILPKRNSDKLIARKKDWDPKKYGGFDSPTVAYSVLVVAKVEKGKSKKLKSVKELLGITIMERSSFEKNPIDFLEAKGYKEVKKDLIIKLPKYSLFELENGRKRMLASAGELQKGNELALPSKYVNFLYLASHYEKLKGSPEDNEQKQLFVEQHKHYLDEIIEQISEFSKRVILADANLDKVLSAYNKHRDKPIREQAENIIHLFTLTNLGAPAAFKYFDTTIDRKRYTSTKEVLDATLIHQSITGLYETRIDLSQLGGDGGGGSGSSGGVLNLEEEYRLHEKPVPSSIDPSWLQLFPTVWAERAGMGLANQVPPVVVELRSGASPVAVRQYPMSKEAREGIRPHIQRFLDLGVLVPCQSPWNTPLLPVKKPGTNDYRPVQDLREINKRVQDIHPTVPNPYNLLSSLPPSHTWYSVLDLKDAFFCLKLHPNSQPLFAFEWRDPEKGNTGQLTWTRLPQGFKNSPTLFNEALHRDLAPFRALNPQVVLLQYVDDLLVAAPTYRDCKEGTQKLLQELSKLGYRVSAKKAQLCQKEVTYLGYLLKEGKRWLTPARKATVMKIPPPTTPRQVREFLGTAGFCRLWIPGFASLAAPLYPLTKPSIPFIWTEEHQKAFDRIKEALLSAPALALPDLTKPFTLYVDERAGVARGVLTQTLGPWRRPVAYLSKKLDPVASGWPTCLKAVAAVALLLKDADKLTLGQNVTVIASHSLESIVRQPPDRWMTNARMTHYQSLLLNERVSFAPPAVLNPATLLPVESEATPVHRCSEILAEETGTRRDLKDQPLPGVPAWYTDGSSFIAEGKRRAGAAIVDGKRTVWASSLPEGTSAQKAELVALTQALRLAEGKDINIYTDSRYAFATAHIHGAIYKQRGWLTSAGKDIKNKEEILALLEAIHLPKRVAIIHCPGHQKGNDPVATGNRRADEAAKQAALSTRVLAETTKPAGKRTADGSEFEKRTADGSEFESPKKKAKVE

SEQ ID NO: 6612 - protein, 2091 aa, synthetic construct
MPAAKRVKLDGGDKKYSIGLDIGTNSVGWAVITDEYKVPSKKFKVLGNTDRHSIKKNLIGALLFDSGETAEATRLKRTARRRYTRRKNRICYLQEIFSNEMAKVDDSFFHRLEESFLVEEDKKHERHPIFGNIVDEVAYHEKYPTIYHLRKKLVDSTDKADLRLIYLALAHMIKFRGHFLIEGDLNPDNSDVDKLFIQLVQTYNQLFEENPINASGVDAKAILSARLSKSRRLENLIAQLPGEKKNGLFGNLIALSLGLTPNFKSNFDLAEDAKLQLSKDTYDDDLDNLLAQIGDQYADLFLAAKNLSDAILLSDILRVNTEITKAPLSASMIKRYDEHHQDLTLLKALVRQQLPEKYKEIFFDQSKNGYAGYIDGGASQEEFYKFIKPILEKMDGTEELLVKLNREDLLRKQRTFDNGSIPHQIHLGELHAILRRQEDFYPFLKDNREKIEKILTFRIPYYVGPLARGNSRFAWMTRKSEETITPWNFEEVVDKGASAQSFIERMTNFDKNLPNEKVLPKHSLLYEYFTVYNELTKVKYVTEGMRKPAFLSGEQKKAIVDLLFKTNRKVTVKQLKEDYFKKIECFDSVEISGVEDRFNASLGTYHDLLKIIKDKDFLDNEENEDILEDIVLTLTLFEDREMIEERLKTYAHLFDDKVMKQLKRRRYTGWGRLSRKLINGIRDKQSGKTILDFLKSDGFANRNFMQLIHDDSLTFKEDIQKAQVSGQGDSLHEHIANLAGSPAIKKGILQTVKVVDELVKVMGRHKPENIVIEMARENQTTQKGQKNSRERMKRIEEGIKELGSQILKEHPVENTQLQNEKLYLYYLQNGRDMYVDQELDINRLSDYDVDHIVPQSFLKDDSIDNKVLTRSDKARGKSDNVPSEEVVKKMKNYWRQLLNAKLITQRKFDNLTKAERGGLSELDKAGFIKRQLVETRQITKHVAQILDSRMNTKYDENDKLIREVKVITLKSKLVSDFRKDFQFYKVREINNYHHAHDAYLNAVVGTALIKKYPKLESEFVYGDYKVYDVRKMIAKSEQEIGKATAKYFFYSNIMNFFKTEITLANGEIRKRPLIETNGETGEIVWDKGRDFATVRKVLSMPQVNIVKKTEVQTGGFSKESILPKRNSDKLIARKKDWDPKKYGGFDSPTVAYSVLVVAKVEKGKSKKLKSVKELLGITIMERSSFEKNPIDFLEAKGYKEVKKDLIIKLPKYSLFELENGRKRMLASAGELQKGNELALPSKYVNFLYLASHYEKLKGSPEDNEQKQLFVEQHKHYLDEIIEQISEFSKRVILADANLDKVLSAYNKHRDKPIREQAENIIHLFTLTNLGAPAAFKYFDTTIDRKRYTSTKEVLDATLIHQSITGLYETRIDLSQLGGDGGGGSGSSGGTLNIEDEYRLHETSKEPDVPLGSTWLSDFPQAWAETGGMGLAVRQAPLIIPLKATSTPVSIKQYPMSQEARLGIKPHIQRLLDQGILVPCQSPWNTPLLPVKKPGTNDYRPVQDLREVNKRVEDIHPTVPNPYNLLSGLPPSHQWYTVLDLKDAFFCLRLHPTSQPLFAFEWRDPEMGISGQLTWTRLPQGFKNSPTLFNEALHRDLADFRIQHPDLILLQYVDDLLLAATSEQDCQRGTRALLQTLGNLGYRASAKKAQICQKQVKYLGYLLKEGQRWLTEARKETVMGQPTPKTPRQLREFLGTAGFCRLWIPGFAEMAAPLYPLTKPGTLFNWGPDQQKAYQEIKQALLTAPALGLPDLTKPFELFVDEKQGYAKGVLTQKLGPWRRPVAYLSKKLDPVAAGWPPCLRMVAAIAVLTKDAGKLTMGQPLVILAPHAVEALVKQPPDRWLSNARMTHYQAMLLDTDRVQFGPVVALNPATLLPLPEKEAPHDCLEILAETHGTRPDLTDQPIPDADYTWYTDGSSFLQEGQRRAGAAVTTETEVIWARALPAGTSAQRAELIALTQALKMAEGKKLNVYTDSRYAFATAHVHGEIYRRRGWLTSEGREIKNKNEILALLKALFLPKRLSIIHCPGHQKGNSAEARGNRMADQAAREAAMKAVLETSTLLAGKRTADGSEFEKRTADGSEFESPKKKAKVE

SEQ ID NO: 6613 - protein, 2093 aa, synthetic construct
MPAAKRVKLDGGDKKYSIGLDIGTNSVGWAVITDEYKVPSKKFKVLGNTDRHSIKKNLIGALLFDSGETAEATRLKRTARRRYTRRKNRICYLQEIFSNEMAKVDDSFFHRLEESFLVEEDKKHERHPIFGNIVDEVAYHEKYPTIYHLRKKLVDSTDKADLRLIYLALAHMIKFRGHFLIEGDLNPDNSDVDKLFIQLVQTYNQLFEENPINASGVDAKAILSARLSKSRRLENLIAQLPGEKKNGLFGNLIALSLGLTPNFKSNFDLAEDAKLQLSKDTYDDDLDNLLAQIGDQYADLFLAAKNLSDAILLSDILRVNTEITKAPLSASMIKRYDEHHQDLTLLKALVRQQLPEKYKEIFFDQSKNGYAGYIDGGASQEEFYKFIKPILEKMDGTEELLVKLNREDLLRKQRTFDNGSIPHQIHLGELHAILRRQEDFYPFLKDNREKIEKILTFRIPYYVGPLARGNSRFAWMTRKSEETITPWNFEEVVDKGASAQSFIERMTNFDKNLPNEKVLPKHSLLYEYFTVYNELTKVKYVTEGMRKPAFLSGEQKKAIVDLLFKTNRKVTVKQLKEDYFKKIECFDSVEISGVEDRFNASLGTYHDLLKIIKDKDFLDNEENEDILEDIVLTLTLFEDREMIEERLKTYAHLFDDKVMKQLKRRRYTGWGRLSRKLINGIRDKQSGKTILDFLKSDGFANRNFMQLIHDDSLTFKEDIQKAQVSGQGDSLHEHIANLAGSPAIKKGILQTVKVVDELVKVMGRHKPENIVIEMARENQTTQKGQKNSRERMKRIEEGIKELGSQILKEHPVENTQLQNEKLYLYYLQNGRDMYVDQELDINRLSDYDVDHIVPQSFLKDDSIDNKVLTRSDKARGKSDNVPSEEVVKKMKNYWRQLLNAKLITQRKFDNLTKAERGGLSELDKAGFIKRQLVETRQITKHVAQILDSRMNTKYDENDKLIREVKVITLKSKLVSDFRKDFQFYKVREINNYHHAHDAYLNAVVGTALIKKYPKLESEFVYGDYKVYDVRKMIAKSEQEIGKATAKYFFYSNIMNFFKTEITLANGEIRKRPLIETNGETGEIVWDKGRDFATVRKVLSMPQVNIVKKTEVQTGGFSKESILPKRNSDKLIARKKDWDPKKYGGFDSPTVAYSVLVVAKVEKGKSKKLKSVKELLGITIMERSSFEKNPIDFLEAKGYKEVKKDLIIKLPKYSLFELENGRKRMLASAGELQKGNELALPSKYVNFLYLASHYEKLKGSPEDNEQKQLFVEQHKHYLDEIIEQISEFSKRVILADANLDKVLSAYNKHRDKPIREQAENIIHLFTLTNLGAPAAFKYFDTTIDRKRYTSTKEVLDATLIHQSITGLYETRIDLSQLGGDGGGSSGGSGGTAPLEEEYRLFLEAPIQNVTLLEQWKREIPKVWAEINPPGLASTQAPIHVQLLSTALPVRVRQYPITLEAKRSLRETIRKFRAAGILRPVHSPWNTPLLPVRKSGTSEYRMVQDLREVNKRVETIHPTVPNPYTLLSLLPPDRIWYSVLDLKDAFFCIPLAPESQLIFAFEWADAEEGESGQLTWTRLPQGFKNSPTLFDEALNRDLQGFRLDHPSVSLLQYVDDLLIAADTQAACLSATRDLLMTLAELGYRVSGKKAQLCQEEVTYLGFKIHKGSRSLSNSRTQAILQIPVPKTKRQVREFLGTIGYCRLWIPGFAELAQPLYAATRGGNDPLVWGEKEEEAFQSLKLALTQPPALALPSLDKPFQLFVEETSGAAKGVLTQALGPWKRPVAYLSKRLDPVAAGWPRCLRAIAAAALLTREASKLTFGQDIEITSSHNLESLLRSPPDKWLTNARITQYQVLLLDPPRVRFKQTAALNPATLLPETDDTLPIHHCLDTLDSLTSTRPDLTDQPLAQAEATLFTDGSSYIRDGKRYAGAAVVTLDSVIWAEPLPIGTSAQKAELIALTKALEWSKDKSVNIYTDSRYAFATLHVHGMIYRERGLLTAGGKAIKNAPEILALLTAVWLPKRVAVMHCKGHQKDDAPTSTGNRRADEVAREVAIRPLSTQATISAGKRTADGSEFEKRTADGSEFESPKKKAKVE

SEQ ID NO: 6614 - protein, 2097 aa, synthetic construct
MPAAKRVKLDGGDKKYSIGLDIGTNSVGWAVITDEYKVPSKKFKVLGNTDRHSIKKNLIGALLFDSGETAEATRLKRTARRRYTRRKNRICYLQEIFSNEMAKVDDSFFHRLEESFLVEEDKKHERHPIFGNIVDEVAYHEKYPTIYHLRKKLVDSTDKADLRLIYLALAHMIKFRGHFLIEGDLNPDNSDVDKLFIQLVQTYNQLFEENPINASGVDAKAILSARLSKSRRLENLIAQLPGEKKNGLFGNLIALSLGLTPNFKSNFDLAEDAKLQLSKDTYDDDLDNLLAQIGDQYADLFLAAKNLSDAILLSDILRVNTEITKAPLSASMIKRYDEHHQDLTLLKALVRQQLPEKYKEIFFDQSKNGYAGYIDGGASQEEFYKFIKPILEKMDGTEELLVKLNREDLLRKQRTFDNGSIPHQIHLGELHAILRRQEDFYPFLKDNREKIEKILTFRIPYYVGPLARGNSRFAWMTRKSEETITPWNFEEVVDKGASAQSFIERMTNFDKNLPNEKVLPKHSLLYEYFTVYNELTKVKYVTEGMRKPAFLSGEQKKAIVDLLFKTNRKVTVKQLKEDYFKKIECFDSVEISGVEDRFNASLGTYHDLLKIIKDKDFLDNEENEDILEDIVLTLTLFEDREMIEERLKTYAHLFDDKVMKQLKRRRYTGWGRLSRKLINGIRDKQSGKTILDFLKSDGFANRNFMQLIHDDSLTFKEDIQKAQVSGQGDSLHEHIANLAGSPAIKKGILQTVKVVDELVKVMGRHKPENIVIEMARENQTTQKGQKNSRERMKRIEEGIKELGSQILKEHPVENTQLQNEKLYLYYLQNGRDMYVDQELDINRLSDYDVDHIVPQSFLKDDSIDNKVLTRSDKARGKSDNVPSEEVVKKMKNYWRQLLNAKLITQRKFDNLTKAERGGLSELDKAGFIKRQLVETRQITKHVAQILDSRMNTKYDENDKLIREVKVITLKSKLVSDFRKDFQFYKVREINNYHHAHDAYLNAVVGTALIKKYPKLESEFVYGDYKVYDVRKMIAKSEQEIGKATAKYFFYSNIMNFFKTEITLANGEIRKRPLIETNGETGEIVWDKGRDFATVRKVLSMPQVNIVKKTEVQTGGFSKESILPKRNSDKLIARKKDWDPKKYGGFDSPTVAYSVLVVAKVEKGKSKKLKSVKELLGITIMERSSFEKNPIDFLEAKGYKEVKKDLIIKLPKYSLFELENGRKRMLASAGELQKGNELALPSKYVNFLYLASHYEKLKGSPEDNEQKQLFVEQHKHYLDEIIEQISEFSKRVILADANLDKVLSAYNKHRDKPIREQAENIIHLFTLTNLGAPAAFKYFDTTIDRKRYTSTKEVLDATLIHQSITGLYETRIDLSQLGGDGGGSSGGSGGTVSLQDEHRLFDIPVTTSLPDVWLQDFPQAWAETGGLGRAKCQAPIIIDLKPTAVPVSIKQYPMSLEAHMGIRQHIIKFLELGVLRPCRSPWNTPLLPVKKPGTQDYRPVQDLREINKRTVDIHPTVPNPYNLLSTLKPDYSWYTVLDLKDAFFCLPLAPQSQELFAFEWKDPERGISGQLTWTRLPQGFKNSPTLFNEALHRDLTDFRTQHPEVTLLQYVDDLLLAAPTKKACTQGTRHLLQELGEKGYRASAKKAQICQTKVTYLGYILSEGKRWLTPGRIETVARIPPPRNPREVREFLGTAGFCRLWIPGFAELAAPLYALTKPSTPFTWQTEHQLAFEALKKALLSAPALGLPDTSKPFTLFLDERQGIAKGVLTQKLGPWKRPVAYLSKKLDPVAAGWPPCLRIMAATAMLVKDSAKLTLGQPLTVITPHTLEAIVRQPPDRWITNARLTHYQALLLDTDRVQFGPPVTLNPATLLPVPENQPSPHDCRQVLAETHGTREDLKDQELPDADHTWYTDGSSYLDSGTRRAGAAVVDGHNTIWAQSLPPGTSAQKAELIALTKALELSKGKKANIYTDSRYAFATAHTHGSIYERRGWLTSEGKEIKNKAEIIALLKALFLPQEVAIIHCPGHQKGQDPVAVGNRQADRVARQAAMAEVLTLATEPDNTSHITAGKRTADGSEFEKRTADGSEFESPKKKAKVE

SEQ ID NO: 6615 - protein, 2090 aa, synthetic construct
MPAAKRVKLDGGDKKYSIGLDIGTNSVGWAVITDEYKVPSKKFKVLGNTDRHSIKKNLIGALLFDSGETAEATRLKRTARRRYTRRKNRICYLQEIFSNEMAKVDDSFFHRLEESFLVEEDKKHERHPIFGNIVDEVAYHEKYPTIYHLRKKLVDSTDKADLRLIYLALAHMIKFRGHFLIEGDLNPDNSDVDKLFIQLVQTYNQLFEENPINASGVDAKAILSARLSKSRRLENLIAQLPGEKKNGLFGNLIALSLGLTPNFKSNFDLAEDAKLQLSKDTYDDDLDNLLAQIGDQYADLFLAAKNLSDAILLSDILRVNTEITKAPLSASMIKRYDEHHQDLTLLKALVRQQLPEKYKEIFFDQSKNGYAGYIDGGASQEEFYKFIKPILEKMDGTEELLVKLNREDLLRKQRTFDNGSIPHQIHLGELHAILRRQEDFYPFLKDNREKIEKILTFRIPYYVGPLARGNSRFAWMTRKSEETITPWNFEEVVDKGASAQSFIERMTNFDKNLPNEKVLPKHSLLYEYFTVYNELTKVKYVTEGMRKPAFLSGEQKKAIVDLLFKTNRKVTVKQLKEDYFKKIECFDSVEISGVEDRFNASLGTYHDLLKIIKDKDFLDNEENEDILEDIVLTLTLFEDREMIEERLKTYAHLFDDKVMKQLKRRRYTGWGRLSRKLINGIRDKQSGKTILDFLKSDGFANRNFMQLIHDDSLTFKEDIQKAQVSGQGDSLHEHIANLAGSPAIKKGILQTVKVVDELVKVMGRHKPENIVIEMARENQTTQKGQKNSRERMKRIEEGIKELGSQILKEHPVENTQLQNEKLYLYYLQNGRDMYVDQELDINRLSDYDVDHIVPQSFLKDDSIDNKVLTRSDKARGKSDNVPSEEVVKKMKNYWRQLLNAKLITQRKFDNLTKAERGGLSELDKAGFIKRQLVETRQITKHVAQILDSRMNTKYDENDKLIREVKVITLKSKLVSDFRKDFQFYKVREINNYHHAHDAYLNAVVGTALIKKYPKLESEFVYGDYKVYDVRKMIAKSEQEIGKATAKYFFYSNIMNFFKTEITLANGEIRKRPLIETNGETGEIVWDKGRDFATVRKVLSMPQVNIVKKTEVQTGGFSKESILPKRNSDKLIARKKDWDPKKYGGFDSPTVAYSVLVVAKVEKGKSKKLKSVKELLGITIMERSSFEKNPIDFLEAKGYKEVKKDLIIKLPKYSLFELENGRKRMLASAGELQKGNELALPSKYVNFLYLASHYEKLKGSPEDNEQKQLFVEQHKHYLDEIIEQISEFSKRVILADANLDKVLSAYNKHRDKPIREQAENIIHLFTLTNLGAPAAFKYFDTTIDRKRYTSTKEVLDATLIHQSITGLYETRIDLSQLGGDGGGSSGGSGGTLQLEEEYRLFEPESTQKQEMDIWLKNFPQAWAETGGMGTAHCQAPVLIQLKATATPISIRQYPMPHEAYQGIKPHIRRMLDQGILKPCQSPWNTPLLPVKKPGTEDYRPVQDLREVNKRVEDIHPTVPNPYNLLSTLPPSHPWYTVLDLKDAFFCLRLHSESQLLFAFEWRDPEIGLSGQLTWTRLPQGFKNSPTLFNEALHSDLADFRVRYPALVLLQYVDDLLLAAATRTECLEGTKALLETLGNKGYRASAKKAQICLQEVTYLGYSLKDGQRWLTKARKEAILSIPVPKNSRQVREFLGKAGYCRLFIPGFAELAAPLYPLTRPGTLFQWGTEQQLAFEDIKKALLSSPALGLPDITKPFELFIDENSGFAKGVLVQKLGPWKRPVAYLSKKLDTVASGWPPCLRMVAAIAILVKDAGKLTLGQPLTILTSHPVEALVRQPPNKWLSNARMTHYQAMLLDAERVHFGPTVSLNPATLLPLPSGGNHHDCLQILAETHGTRPDLTDQPLPDADLTWYTDGSSFIRNGEREAGAAVTTESEVIWAAPLPPGTSAQRAELIALTQALKMAEGKKLTVYTDSRYAFATTHVHGEIYRRRGWLTSEGKEIKNKNEILALLEALFLPKRLSIIHCPGHQKGDSPQAKGNRLADDTAKKAATETHSSLTVLPAGKRTADGSEFEKRTADGSEFESPKKKAKVE

SEQ ID NO: 6616 - protein, 2213 aa, synthetic construct
MPAAKRVKLDGGDKKYSIGLDIGTNSVGWAVITDEYKVPSKKFKVLGNTDRHSIKKNLIGALLFDSGETAEATRLKRTARRRYTRRKNRICYLQEIFSNEMAKVDDSFFHRLEESFLVEEDKKHERHPIFGNIVDEVAYHEKYPTIYHLRKKLVDSTDKADLRLIYLALAHMIKFRGHFLIEGDLNPDNSDVDKLFIQLVQTYNQLFEENPINASGVDAKAILSARLSKSRRLENLIAQLPGEKKNGLFGNLIALSLGLTPNFKSNFDLAEDAKLQLSKDTYDDDLDNLLAQIGDQYADLFLAAKNLSDAILLSDILRVNTEITKAPLSASMIKRYDEHHQDLTLLKALVRQQLPEKYKEIFFDQSKNGYAGYIDGGASQEEFYKFIKPILEKMDGTEELLVKLNREDLLRKQRTFDNGSIPHQIHLGELHAILRRQEDFYPFLKDNREKIEKILTFRIPYYVGPLARGNSRFAWMTRKSEETITPWNFEEVVDKGASAQSFIERMTNFDKNLPNEKVLPKHSLLYEYFTVYNELTKVKYVTEGMRKPAFLSGEQKKAIVDLLFKTNRKVTVKQLKEDYFKKIECFDSVEISGVEDRFNASLGTYHDLLKIIKDKDFLDNEENEDILEDIVLTLTLFEDREMIEERLKTYAHLFDDKVMKQLKRRRYTGWGRLSRKLINGIRDKQSGKTILDFLKSDGFANRNFMQLIHDDSLTFKEDIQKAQVSGQGDSLHEHIANLAGSPAIKKGILQTVKVVDELVKVMGRHKPENIVIEMARENQTTQKGQKNSRERMKRIEEGIKELGSQILKEHPVENTQLQNEKLYLYYLQNGRDMYVDQELDINRLSDYDVDHIVPQSFLKDDSIDNKVLTRSDKARGKSDNVPSEEVVKKMKNYWRQLLNAKLITQRKFDNLTKAERGGLSELDKAGFIKRQLVETRQITKHVAQILDSRMNTKYDENDKLIREVKVITLKSKLVSDFRKDFQFYKVREINNYHHAHDAYLNAVVGTALIKKYPKLESEFVYGDYKVYDVRKMIAKSEQEIGKATAKYFFYSNIMNFFKTEITLANGEIRKRPLIETNGETGEIVWDKGRDFATVRKVLSMPQVNIVKKTEVQTGGFSKESILPKRNSDKLIARKKDWDPKKYGGFDSPTVAYSVLVVAKVEKGKSKKLKSVKELLGITIMERSSFEKNPIDFLEAKGYKEVKKDLIIKLPKYSLFELENGRKRMLASAGELQKGNELALPSKYVNFLYLASHYEKLKGSPEDNEQKQLFVEQHKHYLDEIIEQISEFSKRVILADANLDKVLSAYNKHRDKPIREQAENIIHLFTLTNLGAPAAFKYFDTTIDRKRYTSTKEVLDATLIHQSITGLYETRIDLSQLGGDGGGSSGGSGGTLGDQGSRGSDPLPEPRVTLTVEGIPTEFLVNTGAEHSVLTKPMGKMGSKRTVVAGATGSKVYPWTTKRLLKIGQKQVTHSFLVIPECPAPLLGRDLLTKLKAQIQFSTEGPQVTWEDRPAMCLVLNLEEEYRLHEKPVPPSIDPSWLQLFPMVWAEKAGMGLANQVPPVVVELKSDASPVAVRQYPMSKEAREGIRPHIQRFLDLGILVPCQSPWNTPLLPVKKPGTNDYRPVQDLREVNKRVQDIHPTVPNPYNLLSSLPPSHTWYSVLDLKDAFFCLKLHPNSQPLFAFEWRDPEKGNTGQLTWTRLPQGFKNSPTLFNEALHRDLASFRALNPQVVMLQYVDDLLVAAPTYRDCKEGTRRLLQELSKLGYRVSAKKAQLCREEVTYLGYLLKGGKRWLTPARKATVMKIPTPTTPRQVREFLGKAGFCRLFIPGFASLAAPLYPLTRPKVPFTWTEAHQEAFGRIKEALLSAPALALPDLTKPFALYVDEKEGVARGVLTQTLGPWRRPVAYLSKKLDPVASGWPTCLKAIAAVALLLKDADKLTLGQNVLVIAPHNLESIVRQPPDRWMTNARMTHYQSLLLNERVSFAPPAILNPATLLPVESDDTPIHICSEILAEETGTRPDLRDQPLPGVPAWYTDGSSFIMDGRRQAGAAIVDNKRTVWASNLPEGTSAQKAELIALTQALRLAEGKSINIYTDSRYAFATAHVHGAIYKQRGWLTSAGKDIKNKEEILALLEAIHLPKRVAIIHCPGHQRGTDPVATGNRKADEAAKQAAQSTRILTETTKNAGKRTADGSEFEKRTADGSEFESPKKKAKVE

SEQ ID NO: 6617 - protein, 2091 aa, synthetic construct
MPAAKRVKLDGGDKKYSIGLDIGTNSVGWAVITDEYKVPSKKFKVLGNTDRHSIKKNLIGALLFDSGETAEATRLKRTARRRYTRRKNRICYLQEIFSNEMAKVDDSFFHRLEESFLVEEDKKHERHPIFGNIVDEVAYHEKYPTIYHLRKKLVDSTDKADLRLIYLALAHMIKFRGHFLIEGDLNPDNSDVDKLFIQLVQTYNQLFEENPINASGVDAKAILSARLSKSRRLENLIAQLPGEKKNGLFGNLIALSLGLTPNFKSNFDLAEDAKLQLSKDTYDDDLDNLLAQIGDQYADLFLAAKNLSDAILLSDILRVNTEITKAPLSASMIKRYDEHHQDLTLLKALVRQQLPEKYKEIFFDQSKNGYAGYIDGGASQEEFYKFIKPILEKMDGTEELLVKLNREDLLRKQRTFDNGSIPHQIHLGELHAILRRQEDFYPFLKDNREKIEKILTFRIPYYVGPLARGNSRFAWMTRKSEETITPWNFEEVVDKGASAQSFIERMTNFDKNLPNEKVLPKHSLLYEYFTVYNELTKVKYVTEGMRKPAFLSGEQKKAIVDLLFKTNRKVTVKQLKEDYFKKIECFDSVEISGVEDRFNASLGTYHDLLKIIKDKDFLDNEENEDILEDIVLTLTLFEDREMIEERLKTYAHLFDDKVMKQLKRRRYTGWGRLSRKLINGIRDKQSGKTILDFLKSDGFANRNFMQLIHDDSLTFKEDIQKAQVSGQGDSLHEHIANLAGSPAIKKGILQTVKVVDELVKVMGRHKPENIVIEMARENQTTQKGQKNSRERMKRIEEGIKELGSQILKEHPVENTQLQNEKLYLYYLQNGRDMYVDQELDINRLSDYDVDHIVPQSFLKDDSIDNKVLTRSDKARGKSDNVPSEEVVKKMKNYWRQLLNAKLITQRKFDNLTKAERGGLSELDKAGFIKRQLVETRQITKHVAQILDSRMNTKYDENDKLIREVKVITLKSKLVSDFRKDFQFYKVREINNYHHAHDAYLNAVVGTALIKKYPKLESEFVYGDYKVYDVRKMIAKSEQEIGKATAKYFFYSNIMNFFKTEITLANGEIRKRPLIETNGETGEIVWDKGRDFATVRKVLSMPQVNIVKKTEVQTGGFSKESILPKRNSDKLIARKKDWDPKKYGGFDSPTVAYSVLVVAKVEKGKSKKLKSVKELLGITIMERSSFEKNPIDFLEAKGYKEVKKDLIIKLPKYSLFELENGRKRMLASAGELQKGNELALPSKYVNFLYLASHYEKLKGSPEDNEQKQLFVEQHKHYLDEIIEQISEFSKRVILADANLDKVLSAYNKHRDKPIREQAENIIHLFTLTNLGAPAAFKYFDTTIDRKRYTSTKEVLDATLIHQSITGLYETRIDLSQLGGDGGGSSGGSGGTLGIEDEYRLHETSTEPDVSLGSTWLSDFPQAWAETGGMGLAVRQAPLIIPLKATSTPVSIQQYPMSHEARLGIKPHIQRLLDQGILVPCQSPWNTPLLPVKKPGTNDYRPVQDLREVNKRVEDIHPTVPNPYNLLSGLPPSHQWYTVLDLKDAFFCLRLHPTSQPLFAFEWRDPGMGISGQLTWTRLPQGFKNSPTLFNEALHRDLADFRIQHPDLILLQYVDDILLAATSELDCQQGTRALLQTLGDLGYRASAKKAQICQKQVKYLGYLLREGQRWLTEARKETVMGQPVPKTPRQLREFLGTAGFCRLWIPGFAEMAAPLYPLTKPGTLFSWGPDQQKAYQEIKQALLTAPALGLPDLTKPFELFVDEKQGYAKGVLTQKLGPWRRPVAYLSKKLDPVAAGWPPCLRMVAAIAVLTKDAGKLTMGQPLVILAPHAVEALVKQPPDRWLSNARMTHYQAMLLDTDRVQFGPVVALNPATLLPLPEEGAPHDCLEILAETHGTRPDLTDQPIPDADHTWYTDGSSFLQEGQRKAGAAVTTETEVIWAGALPAGTSAQRAELIALTQALKMAEGKRLNVYTDSRYAFATAHIHGEIYRRRGWLTSEGREIKNKSEILALLKALFLPKRLSIIHCLGHQKGDSAEARGNRLADQAAREAAIKTPPDTSTLLAGKRTADGSEFEKRTADGSEFESPKKKAKVE

SEQ ID NO: 6618 - protein, 2091 aa, synthetic construct
MPAAKRVKLDGGDKKYSIGLDIGTNSVGWAVITDEYKVPSKKFKVLGNTDRHSIKKNLIGALLFDSGETAEATRLKRTARRRYTRRKNRICYLQEIFSNEMAKVDDSFFHRLEESFLVEEDKKHERHPIFGNIVDEVAYHEKYPTIYHLRKKLVDSTDKADLRLIYLALAHMIKFRGHFLIEGDLNPDNSDVDKLFIQLVQTYNQLFEENPINASGVDAKAILSARLSKSRRLENLIAQLPGEKKNGLFGNLIALSLGLTPNFKSNFDLAEDAKLQLSKDTYDDDLDNLLAQIGDQYADLFLAAKNLSDAILLSDILRVNTEITKAPLSASMIKRYDEHHQDLTLLKALVRQQLPEKYKEIFFDQSKNGYAGYIDGGASQEEFYKFIKPILEKMDGTEELLVKLNREDLLRKQRTFDNGSIPHQIHLGELHAILRRQEDFYPFLKDNREKIEKILTFRIPYYVGPLARGNSRFAWMTRKSEETITPWNFEEVVDKGASAQSFIERMTNFDKNLPNEKVLPKHSLLYEYFTVYNELTKVKYVTEGMRKPAFLSGEQKKAIVDLLFKTNRKVTVKQLKEDYFKKIECFDSVEISGVEDRFNASLGTYHDLLKIIKDKDFLDNEENEDILEDIVLTLTLFEDREMIEERLKTYAHLFDDKVMKQLKRRRYTGWGRLSRKLINGIRDKQSGKTILDFLKSDGFANRNFMQLIHDDSLTFKEDIQKAQVSGQGDSLHEHIANLAGSPAIKKGILQTVKVVDELVKVMGRHKPENIVIEMARENQTTQKGQKNSRERMKRIEEGIKELGSQILKEHPVENTQLQNEKLYLYYLQNGRDMYVDQELDINRLSDYDVDHIVPQSFLKDDSIDNKVLTRSDKARGKSDNVPSEEVVKKMKNYWRQLLNAKLITQRKFDNLTKAERGGLSELDKAGFIKRQLVETRQITKHVAQILDSRMNTKYDENDKLIREVKVITLKSKLVSDFRKDFQFYKVREINNYHHAHDAYLNAVVGTALIKKYPKLESEFVYGDYKVYDVRKMIAKSEQEIGKATAKYFFYSNIMNFFKTEITLANGEIRKRPLIETNGETGEIVWDKGRDFATVRKVLSMPQVNIVKKTEVQTGGFSKESILPKRNSDKLIARKKDWDPKKYGGFDSPTVAYSVLVVAKVEKGKSKKLKSVKELLGITIMERSSFEKNPIDFLEAKGYKEVKKDLIIKLPKYSLFELENGRKRMLASAGELQKGNELALPSKYVNFLYLASHYEKLKGSPEDNEQKQLFVEQHKHYLDEIIEQISEFSKRVILADANLDKVLSAYNKHRDKPIREQAENIIHLFTLTNLGAPAAFKYFDTTIDRKRYTSTKEVLDATLIHQSITGLYETRIDLSQLGGDGGGSSGGSGGTLNIEDEYRLHETSKEPDVSLGSTWLSDFPQAWAETGGMGLAVRQAPLIIPLKATSTPVSIKQYPMSQEARLGIKPHIQRLLDQGILVPCQSPWNTPLLPVKKPGTNDYRPVQDLREVNKRVEDIHPTVPNPYNLLSGLPPSHQWYTVLDLKDAFFCLRLHPTSQPLFAFEWRDPEMGISGQLTWTRLPQGFKNSPTLFNEALHRDLAGFRIQHPDLILLQYVDDLLLAATSELDCQQGTRALLQTLGDLGYRASAKKAQICQKQVKYLGYLLKEGQRWLTEARKETVMGQPIPKTPRQLREFLGTAGFCRLWIPGFAEMAAPLYPLTKPGTLFNWGPDQQKAFQEIKQALLTAPALGLPDLTKPFELFVDEKQGYAKGVLTQKLGPWRRPVAYLSKKLDPVAAGWPPCLRMVAAIAVLTKDAGKLTMGQPLVILAPHAVEALVKQPPDRWLSNARMTHYQALLLDTDRVQFGPVVALNPATLLPLPEEGLQHDCLDILAEAHGTRSDLMDQPLPDADHTWYTDGSSFLQEGQRKAGAAVTTETEVIWARALPAGTSAQRAELIALTQALKMAEGKKLNVYTDSRYAFATAHIHGEIYRRRGWLTSEGKEIKNKDEILALLKALFLPKRLSIIHCPGHQKGNSAEARGNRMADQAAREVATRETPETSTLLAGKRTADGSEFEKRTADGSEFESPKKKAKVE

SEQ ID NO: 6619 - protein, 2089 aa, synthetic construct
MPAAKRVKLDGGDKKYSIGLDIGTNSVGWAVITDEYKVPSKKFKVLGNTDRHSIKKNLIGALLFDSGETAEATRLKRTARRRYTRRKNRICYLQEIFSNEMAKVDDSFFHRLEESFLVEEDKKHERHPIFGNIVDEVAYHEKYPTIYHLRKKLVDSTDKADLRLIYLALAHMIKFRGHFLIEGDLNPDNSDVDKLFIQLVQTYNQLFEENPINASGVDAKAILSARLSKSRRLENLIAQLPGEKKNGLFGNLIALSLGLTPNFKSNFDLAEDAKLQLSKDTYDDDLDNLLAQIGDQYADLFLAAKNLSDAILLSDILRVNTEITKAPLSASMIKRYDEHHQDLTLLKALVRQQLPEKYKEIFFDQSKNGYAGYIDGGASQEEFYKFIKPILEKMDGTEELLVKLNREDLLRKQRTFDNGSIPHQIHLGELHAILRRQEDFYPFLKDNREKIEKILTFRIPYYVGPLARGNSRFAWMTRKSEETITPWNFEEVVDKGASAQSFIERMTNFDKNLPNEKVLPKHSLLYEYFTVYNELTKVKYVTEGMRKPAFLSGEQKKAIVDLLFKTNRKVTVKQLKEDYFKKIECFDSVEISGVEDRFNASLGTYHDLLKIIKDKDFLDNEENEDILEDIVLTLTLFEDREMIEERLKTYAHLFDDKVMKQLKRRRYTGWGRLSRKLINGIRDKQSGKTILDFLKSDGFANRNFMQLIHDDSLTFKEDIQKAQVSGQGDSLHEHIANLAGSPAIKKGILQTVKVVDELVKVMGRHKPENIVIEMARENQTTQKGQKNSRERMKRIEEGIKELGSQILKEHPVENTQLQNEKLYLYYLQNGRDMYVDQELDINRLSDYDVDHIVPQSFLKDDSIDNKVLTRSDKARGKSDNVPSEEVVKKMKNYWRQLLNAKLITQRKFDNLTKAERGGLSELDKAGFIKRQLVETRQITKHVAQILDSRMNTKYDENDKLIREVKVITLKSKLVSDFRKDFQFYKVREINNYHHAHDAYLNAVVGTALIKKYPKLESEFVYGDYKVYDVRKMIAKSEQEIGKATAKYFFYSNIMNFFKTEITLANGEIRKRPLIETNGETGEIVWDKGRDFATVRKVLSMPQVNIVKKTEVQTGGFSKESILPKRNSDKLIARKKDWDPKKYGGFDSPTVAYSVLVVAKVEKGKSKKLKSVKELLGITIMERSSFEKNPIDFLEAKGYKEVKKDLIIKLPKYSLFELENGRKRMLASAGELQKGNELALPSKYVNFLYLASHYEKLKGSPEDNEQKQLFVEQHKHYLDEIIEQISEFSKRVILADANLDKVLSAYNKHRDKPIREQAENIIHLFTLTNLGAPAAFKYFDTTIDRKRYTSTKEVLDATLIHQSITGLYETRIDLSQLGGDGGGSSGGSGGVLNLEEEYRLHEKPVPSSIDPSWLQLFPTVWAERAGMGLANQVPPVVVELRSGASPVAVRQYPMSKEAREGIRPHIQRFLDLGVLVPCQSPWNTPLLPVKKPGTNDYRPVQDLREINKRVQDIHPTVPNPYNLLSSLPPSHTWYSVLDLKDAFFCLKLHPNSQPLFAFEWRDPEKGNTGQLTWTRLPQGFKNSPTLFNEALHRDLAPFRALNPQVVLLQYVDDLLVAAPTYRDCKEGTQKLLQELSKLGYRVSAKKAQLCQKEVTYLGYLLKEGKRWLTPARKATVMKIPPPTTPRQVREFLGTAGFCRLWIPGFASLAAPLYPLTKPSIPFIWTEEHQKAFDRIKEALLSAPALALPDLTKPFTLYVDERAGVARGVLTQTLGPWRRPVAYLSKKLDPVASGWPTCLKAVAAVALLLKDADKLTLGQNVTVIASHSLESIVRQPPDRWMTNARMTHYQSLLLNERVSFAPPAVLNPATLLPVESEATPVHRCSEILAEETGTRRDLKDQPLPGVPAWYTDGSSFIAEGKRRAGAAIVDGKRTVWASSLPEGTSAQKAELVALTQALRLAEGKDINIYTDSRYAFATAHIHGAIYKQRGWLTSAGKDIKNKEEILALLEAIHLPKRVAIIHCPGHQKGNDPVATGNRRADEAAKQAALSTRVLAETTKPAGKRTADGSEFEKRTADGSEFESPKKKAKVE

SEQ ID NO: 6620 - protein, 2091 aa, synthetic construct
MPAAKRVKLDGGDKKYSIGLDIGTNSVGWAVITDEYKVPSKKFKVLGNTDRHSIKKNLIGALLFDSGETAEATRLKRTARRRYTRRKNRICYLQEIFSNEMAKVDDSFFHRLEESFLVEEDKKHERHPIFGNIVDEVAYHEKYPTIYHLRKKLVDSTDKADLRLIYLALAHMIKFRGHFLIEGDLNPDNSDVDKLFIQLVQTYNQLFEENPINASGVDAKAILSARLSKSRRLENLIAQLPGEKKNGLFGNLIALSLGLTPNFKSNFDLAEDAKLQLSKDTYDDDLDNLLAQIGDQYADLFLAAKNLSDAILLSDILRVNTEITKAPLSASMIKRYDEHHQDLTLLKALVRQQLPEKYKEIFFDQSKNGYAGYIDGGASQEEFYKFIKPILEKMDGTEELLVKLNREDLLRKQRTFDNGSIPHQIHLGELHAILRRQEDFYPFLKDNREKIEKILTFRIPYYVGPLARGNSRFAWMTRKSEETITPWNFEEVVDKGASAQSFIERMTNFDKNLPNEKVLPKHSLLYEYFTVYNELTKVKYVTEGMRKPAFLSGEQKKAIVDLLFKTNRKVTVKQLKEDYFKKIECFDSVEISGVEDRFNASLGTYHDLLKIIKDKDFLDNEENEDILEDIVLTLTLFEDREMIEERLKTYAHLFDDKVMKQLKRRRYTGWGRLSRKLINGIRDKQSGKTILDFLKSDGFANRNFMQLIHDDSLTFKEDIQKAQVSGQGDSLHEHIANLAGSPAIKKGILQTVKVVDELVKVMGRHKPENIVIEMARENQTTQKGQKNSRERMKRIEEGIKELGSQILKEHPVENTQLQNEKLYLYYLQNGRDMYVDQELDINRLSDYDVDHIVPQSFLKDDSIDNKVLTRSDKARGKSDNVPSEEVVKKMKNYWRQLLNAKLITQRKFDNLTKAERGGLSELDKAGFIKRQLVETRQITKHVAQILDSRMNTKYDENDKLIREVKVITLKSKLVSDFRKDFQFYKVREINNYHHAHDAYLNAVVGTALIKKYPKLESEFVYGDYKVYDVRKMIAKSEQEIGKATAKYFFYSNIMNFFKTEITLANGEIRKRPLIETNGETGEIVWDKGRDFATVRKVLSMPQVNIVKKTEVQTGGFSKESILPKRNSDKLIARKKDWDPKKYGGFDSPTVAYSVLVVAKVEKGKSKKLKSVKELLGITIMERSSFEKNPIDFLEAKGYKEVKKDLIIKLPKYSLFELENGRKRMLASAGELQKGNELALPSKYVNFLYLASHYEKLKGSPEDNEQKQLFVEQHKHYLDEIIEQISEFSKRVILADANLDKVLSAYNKHRDKPIREQAENIIHLFTLTNLGAPAAFKYFDTTIDRKRYTSTKEVLDATLIHQSITGLYETRIDLSQLGGDGGGSSGGSGGTLNIEDEYRLHETSKEPDVPLGSTWLSDFPQAWAETGGMGLAVRQAPLIIPLKATSTPVSIKQYPMSQEARLGIKPHIQRLLDQGILVPCQSPWNTPLLPVKKPGTNDYRPVQDLREVNKRVEDIHPTVPNPYNLLSGLPPSHQWYTVLDLKDAFFCLRLHPTSQPLFAFEWRDPEMGISGQLTWTRLPQGFKNSPTLFNEALHRDLADFRIQHPDLILLQYVDDLLLAATSEQDCQRGTRALLQTLGNLGYRASAKKAQICQKQVKYLGYLLKEGQRWLTEARKETVMGQPTPKTPRQLREFLGTAGFCRLWIPGFAEMAAPLYPLTKPGTLFNWGPDQQKAYQEIKQALLTAPALGLPDLTKPFELFVDEKQGYAKGVLTQKLGPWRRPVAYLSKKLDPVAAGWPPCLRMVAAIAVLTKDAGKLTMGQPLVILAPHAVEALVKQPPDRWLSNARMTHYQAMLLDTDRVQFGPVVALNPATLLPLPEKEAPHDCLEILAETHGTRPDLTDQPIPDADYTWYTDGSSFLQEGQRRAGAAVTTETEVIWARALPAGTSAQRAELIALTQALKMAEGKKLNVYTDSRYAFATAHVHGEIYRRRGWLTSEGREIKNKNEILALLKALFLPKRLSIIHCPGHQKGNSAEARGNRMADQAAREAAMKAVLETSTLLAGKRTADGSEFEKRTADGSEFESPKKKAKVE

SEQ ID NO: 6621 - protein, 2095 aa, synthetic construct
MPAAKRVKLDGGDKKYSIGLDIGTNSVGWAVITDEYKVPSKKFKVLGNTDRHSIKKNLIGALLFDSGETAEATRLKRTARRRYTRRKNRICYLQEIFSNEMAKVDDSFFHRLEESFLVEEDKKHERHPIFGNIVDEVAYHEKYPTIYHLRKKLVDSTDKADLRLIYLALAHMIKFRGHFLIEGDLNPDNSDVDKLFIQLVQTYNQLFEENPINASGVDAKAILSARLSKSRRLENLIAQLPGEKKNGLFGNLIALSLGLTPNFKSNFDLAEDAKLQLSKDTYDDDLDNLLAQIGDQYADLFLAAKNLSDAILLSDILRVNTEITKAPLSASMIKRYDEHHQDLTLLKALVRQQLPEKYKEIFFDQSKNGYAGYIDGGASQEEFYKFIKPILEKMDGTEELLVKLNREDLLRKQRTFDNGSIPHQIHLGELHAILRRQEDFYPFLKDNREKIEKILTFRIPYYVGPLARGNSRFAWMTRKSEETITPWNFEEVVDKGASAQSFIERMTNFDKNLPNEKVLPKHSLLYEYFTVYNELTKVKYVTEGMRKPAFLSGEQKKAIVDLLFKTNRKVTVKQLKEDYFKKIECFDSVEISGVEDRFNASLGTYHDLLKIIKDKDFLDNEENEDILEDIVLTLTLFEDREMIEERLKTYAHLFDDKVMKQLKRRRYTGWGRLSRKLINGIRDKQSGKTILDFLKSDGFANRNFMQLIHDDSLTFKEDIQKAQVSGQGDSLHEHIANLAGSPAIKKGILQTVKVVDELVKVMGRHKPENIVIEMARENQTTQKGQKNSRERMKRIEEGIKELGSQILKEHPVENTQLQNEKLYLYYLQNGRDMYVDQELDINRLSDYDVDHIVPQSFLKDDSIDNKVLTRSDKARGKSDNVPSEEVVKKMKNYWRQLLNAKLITQRKFDNLTKAERGGLSELDKAGFIKRQLVETRQITKHVAQILDSRMNTKYDENDKLIREVKVITLKSKLVSDFRKDFQFYKVREINNYHHAHDAYLNAVVGTALIKKYPKLESEFVYGDYKVYDVRKMIAKSEQEIGKATAKYFFYSNIMNFFKTEITLANGEIRKRPLIETNGETGEIVWDKGRDFATVRKVLSMPQVNIVKKTEVQTGGFSKESILPKRNSDKLIARKKDWDPKKYGGFDSPTVAYSVLVVAKVEKGKSKKLKSVKELLGITIMERSSFEKNPIDFLEAKGYKEVKKDLIIKLPKYSLFELENGRKRMLASAGELQKGNELALPSKYVNFLYLASHYEKLKGSPEDNEQKQLFVEQHKHYLDEIIEQISEFSKRVILADANLDKVLSAYNKHRDKPIREQAENIIHLFTLTNLGAPAAFKYFDTTIDRKRYTSTKEVLDATLIHQSITGLYETRIDLSQLGGDGGGGSEAAAKGGTAPLEEEYRLFLEAPIQNVTLLEQWKREIPKVWAEINPPGLASTQAPIHVQLLSTALPVRVRQYPITLEAKRSLRETIRKFRAAGILRPVHSPWNTPLLPVRKSGTSEYRMVQDLREVNKRVETIHPTVPNPYTLLSLLPPDRIWYSVLDLKDAFFCIPLAPESQLIFAFEWADAEEGESGQLTWTRLPQGFKNSPTLFNEALNRDLQGFRLDHPSVSLLQYVDDLLIAADTQAACLSATRDLLMTLAELGYRVSGKKAQLCQEEVTYLGFKIHKGSRSLSNSRTQAILQIPVPKTKRQVREFLGTIGYCRLWIPGFAELAQPLYAATRPGNDPLVWGEKEEEAFQSLKLALTQPPALALPSLDKPFQLFVEETSGAAKGVLTQALGPWKRPVAYLSKRLDPVAAGWPRCLRAIAAAALLTREASKLTFGQDIEITSSHNLESLLRSPPDKWLTNARITQYQVLLLDPPRVRFKQTAALNPATLLPETDDTLPIHHCLDTLDSLTSTRPDLTDQPLAQAEATLFTDGSSYIRDGKRYAGAAVVTLDSVIWAEPLPIGTSAQKAELIALTKALEWSKDKSVNIYTDSRYAFATLHVHGMIYRERGWLTAGGKAIKNAPEILALLTAVWLPKRVAVMHCKGHQKDDAPTSTGNRRADEVAREVAIRPLSTQATISAGKRTADGSEFEKRTADGSEFESPKKKAKVE

SEQ ID NO: 6622 - protein, 2095 aa, synthetic construct
MPAAKRVKLDGGDKKYSIGLDIGTNSVGWAVITDEYKVPSKKFKVLGNTDRHSIKKNLIGALLFDSGETAEATRLKRTARRRYTRRKNRICYLQEIFSNEMAKVDDSFFHRLEESFLVEEDKKHERHPIFGNIVDEVAYHEKYPTIYHLRKKLVDSTDKADLRLIYLALAHMIKFRGHFLIEGDLNPDNSDVDKLFIQLVQTYNQLFEENPINASGVDAKAILSARLSKSRRLENLIAQLPGEKKNGLFGNLIALSLGLTPNFKSNFDLAEDAKLQLSKDTYDDDLDNLLAQIGDQYADLFLAAKNLSDAILLSDILRVNTEITKAPLSASMIKRYDEHHQDLTLLKALVRQQLPEKYKEIFFDQSKNGYAGYIDGGASQEEFYKFIKPILEKMDGTEELLVKLNREDLLRKQRTFDNGSIPHQIHLGELHAILRRQEDFYPFLKDNREKIEKILTFRIPYYVGPLARGNSRFAWMTRKSEETITPWNFEEVVDKGASAQSFIERMTNFDKNLPNEKVLPKHSLLYEYFTVYNELTKVKYVTEGMRKPAFLSGEQKKAIVDLLFKTNRKVTVKQLKEDYFKKIECFDSVEISGVEDRFNASLGTYHDLLKIIKDKDFLDNEENEDILEDIVLTLTLFEDREMIEERLKTYAHLFDDKVMKQLKRRRYTGWGRLSRKLINGIRDKQSGKTILDFLKSDGFANRNFMQLIHDDSLTFKEDIQKAQVSGQGDSLHEHIANLAGSPAIKKGILQTVKVVDELVKVMGRHKPENIVIEMARENQTTQKGQKNSRERMKRIEEGIKELGSQILKEHPVENTQLQNEKLYLYYLQNGRDMYVDQELDINRLSDYDVDHIVPQSFLKDDSIDNKVLTRSDKARGKSDNVPSEEVVKKMKNYWRQLLNAKLITQRKFDNLTKAERGGLSELDKAGFIKRQLVETRQITKHVAQILDSRMNTKYDENDKLIREVKVITLKSKLVSDFRKDFQFYKVREINNYHHAHDAYLNAVVGTALIKKYPKLESEFVYGDYKVYDVRKMIAKSEQEIGKATAKYFFYSNIMNFFKTEITLANGEIRKRPLIETNGETGEIVWDKGRDFATVRKVLSMPQVNIVKKTEVQTGGFSKESILPKRNSDKLIARKKDWDPKKYGGFDSPTVAYSVLVVAKVEKGKSKKLKSVKELLGITIMERSSFEKNPIDFLEAKGYKEVKKDLIIKLPKYSLFELENGRKRMLASAGELQKGNELALPSKYVNFLYLASHYEKLKGSPEDNEQKQLFVEQHKHYLDEIIEQISEFSKRVILADANLDKVLSAYNKHRDKPIREQAENIIHLFTLTNLGAPAAFKYFDTTIDRKRYTSTKEVLDATLIHQSITGLYETRIDLSQLGGDGGGGSEAAAKGGTAPLEEEYRLFLEAPIQNVTLLEQWKREIPKVWAEINPPGLASTQAPIHVQLLSTALPVRVRQYPITLEAKRSLRETIRKFRAAGILRPVHSPWNTPLLPVRKSGTSEYRMVQDLREVNKRVETIHPTVPNPYTLLSLLPPDRIWYSVLDLKDAFFCIPLAPESQLIFAFEWADAEEGESGQLTWTRLPQGFKNSPTLFNEALNRDLQGFRLDHPSVSLLQYVDDLLIAADTQAACLSATRDLLMTLAELGYRVSGKKAQLCQEEVTYLGFKIHKGSRSLSNSRTQAILQIPVPKTKRQVREFLGKIGYCRLFIPGFAELAQPLYAATRPGNDPLVWGEKEEEAFQSLKLALTQPPALALPSLDKPFQLFVEETSGAAKGVLTQALGPWKRPVAYLSKRLDPVAAGWPRCLRAIAAAALLTREASKLTFGQDIEITSSHNLESLLRSPPDKWLTNARITQYQVLLLDPPRVRFKQTAALNPATLLPETDDTLPIHHCLDTLDSLTSTRPDLTDQPLAQAEATLFTDGSSYIRDGKRYAGAAVVTLDSVIWAEPLPIGTSAQKAELIALTKALEWSKDKSVNIYTDSRYAFATLHVHGMIYRERGWLTAGGKAIKNAPEILALLTAVWLPKRVAVMHCKGHQKDDAPTSTGNRRADEVAREVAIRPLSTQATISAGKRTADGSEFEKRTADGSEFESPKKKAKVE

SEQ ID NO: 6623 - protein, 2092 aa, synthetic construct
MPAAKRVKLDGGDKKYSIGLDIGTNSVGWAVITDEYKVPSKKFKVLGNTDRHSIKKNLIGALLFDSGETAEATRLKRTARRRYTRRKNRICYLQEIFSNEMAKVDDSFFHRLEESFLVEEDKKHERHPIFGNIVDEVAYHEKYPTIYHLRKKLVDSTDKADLRLIYLALAHMIKFRGHFLIEGDLNPDNSDVDKLFIQLVQTYNQLFEENPINASGVDAKAILSARLSKSRRLENLIAQLPGEKKNGLFGNLIALSLGLTPNFKSNFDLAEDAKLQLSKDTYDDDLDNLLAQIGDQYADLFLAAKNLSDAILLSDILRVNTEITKAPLSASMIKRYDEHHQDLTLLKALVRQQLPEKYKEIFFDQSKNGYAGYIDGGASQEEFYKFIKPILEKMDGTEELLVKLNREDLLRKQRTFDNGSIPHQIHLGELHAILRRQEDFYPFLKDNREKIEKILTFRIPYYVGPLARGNSRFAWMTRKSEETITPWNFEEVVDKGASAQSFIERMTNFDKNLPNEKVLPKHSLLYEYFTVYNELTKVKYVTEGMRKPAFLSGEQKKAIVDLLFKTNRKVTVKQLKEDYFKKIECFDSVEISGVEDRFNASLGTYHDLLKIIKDKDFLDNEENEDILEDIVLTLTLFEDREMIEERLKTYAHLFDDKVMKQLKRRRYTGWGRLSRKLINGIRDKQSGKTILDFLKSDGFANRNFMQLIHDDSLTFKEDIQKAQVSGQGDSLHEHIANLAGSPAIKKGILQTVKVVDELVKVMGRHKPENIVIEMARENQTTQKGQKNSRERMKRIEEGIKELGSQILKEHPVENTQLQNEKLYLYYLQNGRDMYVDQELDINRLSDYDVDHIVPQSFLKDDSIDNKVLTRSDKARGKSDNVPSEEVVKKMKNYWRQLLNAKLITQRKFDNLTKAERGGLSELDKAGFIKRQLVETRQITKHVAQILDSRMNTKYDENDKLIREVKVITLKSKLVSDFRKDFQFYKVREINNYHHAHDAYLNAVVGTALIKKYPKLESEFVYGDYKVYDVRKMIAKSEQEIGKATAKYFFYSNIMNFFKTEITLANGEIRKRPLIETNGETGEIVWDKGRDFATVRKVLSMPQVNIVKKTEVQTGGFSKESILPKRNSDKLIARKKDWDPKKYGGFDSPTVAYSVLVVAKVEKGKSKKLKSVKELLGITIMERSSFEKNPIDFLEAKGYKEVKKDLIIKLPKYSLFELENGRKRMLASAGELQKGNELALPSKYVNFLYLASHYEKLKGSPEDNEQKQLFVEQHKHYLDEIIEQISEFSKRVILADANLDKVLSAYNKHRDKPIREQAENIIHLFTLTNLGAPAAFKYFDTTIDRKRYTSTKEVLDATLIHQSITGLYETRIDLSQLGGDGGGGSEAAAKGGTLQLEEEYRLFEPESTQKQEMDIWLKNFPQAWAETGGMGTAHCQAPVLIQLKATATPISIRQYPMPHEAYQGIKPHIRRMLDQGILKPCQSPWNTPLLPVKKPGTEDYRPVQDLREVNKRVEDIHPTVPNPYNLLSTLPPSHPWYTVLDLKDAFFCLRLHSESQLLFAFEWRDPEIGLSGQLTWTRLPQGFKNSPTLFNEALHSDLADFRVRYPALVLLQYVDDLLLAAATRTECLEGTKALLETLGNKGYRASAKKAQICLQEVTYLGYSLKDGQRWLTKARKEAILSIPVPKNSRQVREFLGTAGYCRLWIPGFAELAAPLYPLTRPGTLFQWGTEQQLAFEDIKKALLSSPALGLPDITKPFELFIDENSGFAKGVLVQKLGPWKRPVAYLSKKLDTVASGWPPCLRMVAAIAILVKDAGKLTLGQPLTILTSHPVEALVRQPPNKWLSNARMTHYQAMLLDAERVHFGPTVSLNPATLLPLPSGGNHHDCLQILAETHGTRPDLTDQPLPDADLTWYTDGSSFIRNGEREAGAAVTTESEVIWAAPLPPGTSAQRAELIALTQALKMAEGKKLTVYTDSRYAFATTHVHGEIYRRRGWLTSEGKEIKNKNEILALLEALFLPKRLSIIHCPGHQKGDSPQAKGNRLADDTAKKAATETHSSLTVLPAGKRTADGSEFEKRTADGSEFESPKKKAKVE

SEQ ID NO: 6624 - protein, 2124 aa, synthetic construct
MPAAKRVKLDGGDKKYSIGLDIGTNSVGWAVITDEYKVPSKKFKVLGNTDRHSIKKNLIGALLFDSGETAEATRLKRTARRRYTRRKNRICYLQEIFSNEMAKVDDSFFHRLEESFLVEEDKKHERHPIFGNIVDEVAYHEKYPTIYHLRKKLVDSTDKADLRLIYLALAHMIKFRGHFLIEGDLNPDNSDVDKLFIQLVQTYNQLFEENPINASGVDAKAILSARLSKSRRLENLIAQLPGEKKNGLFGNLIALSLGLTPNFKSNFDLAEDAKLQLSKDTYDDDLDNLLAQIGDQYADLFLAAKNLSDAILLSDILRVNTEITKAPLSASMIKRYDEHHQDLTLLKALVRQQLPEKYKEIFFDQSKNGYAGYIDGGASQEEFYKFIKPILEKMDGTEELLVKLNREDLLRKQRTFDNGSIPHQIHLGELHAILRRQEDFYPFLKDNREKIEKILTFRIPYYVGPLARGNSRFAWMTRKSEETITPWNFEEVVDKGASAQSFIERMTNFDKNLPNEKVLPKHSLLYEYFTVYNELTKVKYVTEGMRKPAFLSGEQKKAIVDLLFKTNRKVTVKQLKEDYFKKIECFDSVEISGVEDRFNASLGTYHDLLKIIKDKDFLDNEENEDILEDIVLTLTLFEDREMIEERLKTYAHLFDDKVMKQLKRRRYTGWGRLSRKLINGIRDKQSGKTILDFLKSDGFANRNFMQLIHDDSLTFKEDIQKAQVSGQGDSLHEHIANLAGSPAIKKGILQTVKVVDELVKVMGRHKPENIVIEMARENQTTQKGQKNSRERMKRIEEGIKELGSQILKEHPVENTQLQNEKLYLYYLQNGRDMYVDQELDINRLSDYDVDHIVPQSFLKDDSIDNKVLTRSDKARGKSDNVPSEEVVKKMKNYWRQLLNAKLITQRKFDNLTKAERGGLSELDKAGFIKRQLVETRQITKHVAQILDSRMNTKYDENDKLIREVKVITLKSKLVSDFRKDFQFYKVREINNYHHAHDAYLNAVVGTALIKKYPKLESEFVYGDYKVYDVRKMIAKSEQEIGKATAKYFFYSNIMNFFKTEITLANGEIRKRPLIETNGETGEIVWDKGRDFATVRKVLSMPQVNIVKKTEVQTGGFSKESILPKRNSDKLIARKKDWDPKKYGGFDSPTVAYSVLVVAKVEKGKSKKLKSVKELLGITIMERSSFEKNPIDFLEAKGYKEVKKDLIIKLPKYSLFELENGRKRMLASAGELQKGNELALPSKYVNFLYLASHYEKLKGSPEDNEQKQLFVEQHKHYLDEIIEQISEFSKRVILADANLDKVLSAYNKHRDKPIREQAENIIHLFTLTNLGAPAAFKYFDTTIDRKRYTSTKEVLDATLIHQSITGLYETRIDLSQLGGDGGGGSEAAAKGGLLGRDLLTKLKAQIQFSTEGPQVTWEDRPAMCLVLNLEEEYRLHEKPVPPSIDPSWLQLFPMVWAEKAGMGLANQVPPVVVELKSDASPVAVRQYPMSKEAREGIRPHIQRFLDLGILVPCQSPWNTPLLPVKKPGTNDYRPVQDLREVNKRVQDIHPTVPNPYNLLSSLPPSHTWYSVLDLKDAFFCLKLHPNSQPLFAFEWRDPEKGNTGQLTWTRLPQGFKNSPTLFNEALHRDLASFRALNPQVVMLQYVDDLLVAAPTYRDCKEGTRRLLQELSKLGYRVSAKKAQLCREEVTYLGYLLKGGKRWLTPARKATVMKIPTPTTPRQVREFLGTAGFCRLWIPGFASLAAPLYPLTRPKVPFTWTEAHQEAFGRIKEALLSAPALALPDLTKPFALYVDEKEGVARGVLTQTLGPWRRPVAYLSKKLDPVASGWPTCLKAIAAVALLLKDADKLTLGQNVLVIAPHNLESIVRQPPDRWMTNARMTHYQSLLLNERVSFAPPAILNPATLLPVESDDTPIHICSEILAEETGTRPDLRDQPLPGVPAWYTDGSSFIMDGRRQAGAAIVDNKRTVWASNLPEGTSAQKAELIALTQALRLAEGKSINIYTDSRYAFATAHVHGAIYKQRGWLTSAGKDIKNKEEILALLEAIHLPKRVAIIHCPGHQRGTDPVATGNRKADEAAKQAAQSTRILTETTKNAGKRTADGSEFEKRTADGSEFESPKKKAKVE

SEQ ID NO: 6625 - protein, 2215 aa, synthetic construct
MPAAKRVKLDGGDKKYSIGLDIGTNSVGWAVITDEYKVPSKKFKVLGNTDRHSIKKNLIGALLFDSGETAEATRLKRTARRRYTRRKNRICYLQEIFSNEMAKVDDSFFHRLEESFLVEEDKKHERHPIFGNIVDEVAYHEKYPTIYHLRKKLVDSTDKADLRLIYLALAHMIKFRGHFLIEGDLNPDNSDVDKLFIQLVQTYNQLFEENPINASGVDAKAILSARLSKSRRLENLIAQLPGEKKNGLFGNLIALSLGLTPNFKSNFDLAEDAKLQLSKDTYDDDLDNLLAQIGDQYADLFLAAKNLSDAILLSDILRVNTEITKAPLSASMIKRYDEHHQDLTLLKALVRQQLPEKYKEIFFDQSKNGYAGYIDGGASQEEFYKFIKPILEKMDGTEELLVKLNREDLLRKQRTFDNGSIPHQIHLGELHAILRRQEDFYPFLKDNREKIEKILTFRIPYYVGPLARGNSRFAWMTRKSEETITPWNFEEVVDKGASAQSFIERMTNFDKNLPNEKVLPKHSLLYEYFTVYNELTKVKYVTEGMRKPAFLSGEQKKAIVDLLFKTNRKVTVKQLKEDYFKKIECFDSVEISGVEDRFNASLGTYHDLLKIIKDKDFLDNEENEDILEDIVLTLTLFEDREMIEERLKTYAHLFDDKVMKQLKRRRYTGWGRLSRKLINGIRDKQSGKTILDFLKSDGFANRNFMQLIHDDSLTFKEDIQKAQVSGQGDSLHEHIANLAGSPAIKKGILQTVKVVDELVKVMGRHKPENIVIEMARENQTTQKGQKNSRERMKRIEEGIKELGSQILKEHPVENTQLQNEKLYLYYLQNGRDMYVDQELDINRLSDYDVDHIVPQSFLKDDSIDNKVLTRSDKARGKSDNVPSEEVVKKMKNYWRQLLNAKLITQRKFDNLTKAERGGLSELDKAGFIKRQLVETRQITKHVAQILDSRMNTKYDENDKLIREVKVITLKSKLVSDFRKDFQFYKVREINNYHHAHDAYLNAVVGTALIKKYPKLESEFVYGDYKVYDVRKMIAKSEQEIGKATAKYFFYSNIMNFFKTEITLANGEIRKRPLIETNGETGEIVWDKGRDFATVRKVLSMPQVNIVKKTEVQTGGFSKESILPKRNSDKLIARKKDWDPKKYGGFDSPTVAYSVLVVAKVEKGKSKKLKSVKELLGITIMERSSFEKNPIDFLEAKGYKEVKKDLIIKLPKYSLFELENGRKRMLASAGELQKGNELALPSKYVNFLYLASHYEKLKGSPEDNEQKQLFVEQHKHYLDEIIEQISEFSKRVILADANLDKVLSAYNKHRDKPIREQAENIIHLFTLTNLGAPAAFKYFDTTIDRKRYTSTKEVLDATLIHQSITGLYETRIDLSQLGGDGGGGSEAAAKGGTLGDQGSRGSDPLPEPRVTLTVEGIPTEFLVNTGAEHSVLTKPMGKMGSKRTVVAGATGSKVYPWTTKRLLKIGQKQVTHSFLVIPECPAPLLGRDLLTKLKAQIQFSTEGPQVTWEDRPAMCLVLNLEEEYRLHEKPVPPSIDPSWLQLFPMVWAEKAGMGLANQVPPVVVELKSDASPVAVRQYPMSKEAREGIRPHIQRFLDLGILVPCQSPWNTPLLPVKKPGTNDYRPVQDLREVNKRVQDIHPTVPNPYNLLSSLPPSHTWYSVLDLKDAFFCLKLHPNSQPLFAFEWRDPEKGNTGQLTWTRLPQGFKNSPTLFNEALHRDLASFRALNPQVVMLQYVDDLLVAAPTYRDCKEGTRRLLQELSKLGYRVSAKKAQLCREEVTYLGYLLKGGKRWLTPARKATVMKIPTPTTPRQVREFLGTAGFCRLWIPGFASLAAPLYPLTRPKVPFTWTEAHQEAFGRIKEALLSAPALALPDLTKPFALYVDEKEGVARGVLTQTLGPWRRPVAYLSKKLDPVASGWPTCLKAIAAVALLLKDADKLTLGQNVLVIAPHNLESIVRQPPDRWMTNARMTHYQSLLLNERVSFAPPAILNPATLLPVESDDTPIHICSEILAEETGTRPDLRDQPLPGVPAWYTDGSSFIMDGRRQAGAAIVDNKRTVWASNLPEGTSAQKAELIALTQALRLAEGKSINIYTDSRYAFATAHVHGAIYKQRGWLTSAGKDIKNKEEILALLEAIHLPKRVAIIHCPGHQRGTDPVATGNRKADEAAKQAAQSTRILTETTKNAGKRTADGSEFEKRTADGSEFESPKKKAKVE

SEQ ID NO: 6626 - protein, 2093 aa, synthetic construct
MPAAKRVKLDGGDKKYSIGLDIGTNSVGWAVITDEYKVPSKKFKVLGNTDRHSIKKNLIGALLFDSGETAEATRLKRTARRRYTRRKNRICYLQEIFSNEMAKVDDSFFHRLEESFLVEEDKKHERHPIFGNIVDEVAYHEKYPTIYHLRKKLVDSTDKADLRLIYLALAHMIKFRGHFLIEGDLNPDNSDVDKLFIQLVQTYNQLFEENPINASGVDAKAILSARLSKSRRLENLIAQLPGEKKNGLFGNLIALSLGLTPNFKSNFDLAEDAKLQLSKDTYDDDLDNLLAQIGDQYADLFLAAKNLSDAILLSDILRVNTEITKAPLSASMIKRYDEHHQDLTLLKALVRQQLPEKYKEIFFDQSKNGYAGYIDGGASQEEFYKFIKPILEKMDGTEELLVKLNREDLLRKQRTFDNGSIPHQIHLGELHAILRRQEDFYPFLKDNREKIEKILTFRIPYYVGPLARGNSRFAWMTRKSEETITPWNFEEVVDKGASAQSFIERMTNFDKNLPNEKVLPKHSLLYEYFTVYNELTKVKYVTEGMRKPAFLSGEQKKAIVDLLFKTNRKVTVKQLKEDYFKKIECFDSVEISGVEDRFNASLGTYHDLLKIIKDKDFLDNEENEDILEDIVLTLTLFEDREMIEERLKTYAHLFDDKVMKQLKRRRYTGWGRLSRKLINGIRDKQSGKTILDFLKSDGFANRNFMQLIHDDSLTFKEDIQKAQVSGQGDSLHEHIANLAGSPAIKKGILQTVKVVDELVKVMGRHKPENIVIEMARENQTTQKGQKNSRERMKRIEEGIKELGSQILKEHPVENTQLQNEKLYLYYLQNGRDMYVDQELDINRLSDYDVDHIVPQSFLKDDSIDNKVLTRSDKARGKSDNVPSEEVVKKMKNYWRQLLNAKLITQRKFDNLTKAERGGLSELDKAGFIKRQLVETRQITKHVAQILDSRMNTKYDENDKLIREVKVITLKSKLVSDFRKDFQFYKVREINNYHHAHDAYLNAVVGTALIKKYPKLESEFVYGDYKVYDVRKMIAKSEQEIGKATAKYFFYSNIMNFFKTEITLANGEIRKRPLIETNGETGEIVWDKGRDFATVRKVLSMPQVNIVKKTEVQTGGFSKESILPKRNSDKLIARKKDWDPKKYGGFDSPTVAYSVLVVAKVEKGKSKKLKSVKELLGITIMERSSFEKNPIDFLEAKGYKEVKKDLIIKLPKYSLFELENGRKRMLASAGELQKGNELALPSKYVNFLYLASHYEKLKGSPEDNEQKQLFVEQHKHYLDEIIEQISEFSKRVILADANLDKVLSAYNKHRDKPIREQAENIIHLFTLTNLGAPAAFKYFDTTIDRKRYTSTKEVLDATLIHQSITGLYETRIDLSQLGGDGGGGSEAAAKGGTLNIEDEYRLHETSKEPDVSLGSTWLSDFPQAWAETGGMGLAVRQAPLIIPLKATSTPVSIKQYPMSQEARLGIKPHIQRLLDQGILVPCQSPWNTPLLPVKKPGTNDYRPVQDLREVNKRVEDIHPTVPNPYNLLSGLPPSHQWYTVLDLKDAFFCLRLHPTSQPLFAFEWRDPEMGISGQLTWTRLPQGFKNSPTLFNEALHRDLAGFRIQHPDLILLQYVDDLLLAATSELDCQQGTRALLQTLGDLGYRASAKKAQICQKQVKYLGYLLKEGQRWLTEARKETVMGQPIPKTPRQLREFLGTAGFCRLWIPGFAEMAAPLYPLTKPGTLFNWGPDQQKAFQEIKQALLTAPALGLPDLTKPFELFVDEKQGYAKGVLTQKLGPWRRPVAYLSKKLDPVAAGWPPCLRMVAAIAVLTKDAGKLTMGQPLVILAPHAVEALVKQPPDRWLSNARMTHYQALLLDTDRVQFGPVVALNPATLLPLPEEGLQHDCLDILAEAHGTRSDLMDQPLPDADHTWYTDGSSFLQEGQRKAGAAVTTETEVIWARALPAGTSAQRAELIALTQALKMAEGKKLNVYTDSRYAFATAHIHGEIYRRRGWLTSEGKEIKNKDEILALLKALFLPKRLSIIHCPGHQKGNSAEARGNRMADQAAREVATRETPETSTLLAGKRTADGSEFEKRTADGSEFESPKKKAKVE

SEQ ID NO: 6627 - protein, 2093 aa, synthetic construct
MPAAKRVKLDGGDKKYSIGLDIGTNSVGWAVITDEYKVPSKKFKVLGNTDRHSIKKNLIGALLFDSGETAEATRLKRTARRRYTRRKNRICYLQEIFSNEMAKVDDSFFHRLEESFLVEEDKKHERHPIFGNIVDEVAYHEKYPTIYHLRKKLVDSTDKADLRLIYLALAHMIKFRGHFLIEGDLNPDNSDVDKLFIQLVQTYNQLFEENPINASGVDAKAILSARLSKSRRLENLIAQLPGEKKNGLFGNLIALSLGLTPNFKSNFDLAEDAKLQLSKDTYDDDLDNLLAQIGDQYADLFLAAKNLSDAILLSDILRVNTEITKAPLSASMIKRYDEHHQDLTLLKALVRQQLPEKYKEIFFDQSKNGYAGYIDGGASQEEFYKFIKPILEKMDGTEELLVKLNREDLLRKQRTFDNGSIPHQIHLGELHAILRRQEDFYPFLKDNREKIEKILTFRIPYYVGPLARGNSRFAWMTRKSEETITPWNFEEVVDKGASAQSFIERMTNFDKNLPNEKVLPKHSLLYEYFTVYNELTKVKYVTEGMRKPAFLSGEQKKAIVDLLFKTNRKVTVKQLKEDYFKKIECFDSVEISGVEDRFNASLGTYHDLLKIIKDKDFLDNEENEDILEDIVLTLTLFEDREMIEERLKTYAHLFDDKVMKQLKRRRYTGWGRLSRKLINGIRDKQSGKTILDFLKSDGFANRNFMQLIHDDSLTFKEDIQKAQVSGQGDSLHEHIANLAGSPAIKKGILQTVKVVDELVKVMGRHKPENIVIEMARENQTTQKGQKNSRERMKRIEEGIKELGSQILKEHPVENTQLQNEKLYLYYLQNGRDMYVDQELDINRLSDYDVDHIVPQSFLKDDSIDNKVLTRSDKARGKSDNVPSEEVVKKMKNYWRQLLNAKLITQRKFDNLTKAERGGLSELDKAGFIKRQLVETRQITKHVAQILDSRMNTKYDENDKLIREVKVITLKSKLVSDFRKDFQFYKVREINNYHHAHDAYLNAVVGTALIKKYPKLESEFVYGDYKVYDVRKMIAKSEQEIGKATAKYFFYSNIMNFFKTEITLANGEIRKRPLIETNGETGEIVWDKGRDFATVRKVLSMPQVNIVKKTEVQTGGFSKESILPKRNSDKLIARKKDWDPKKYGGFDSPTVAYSVLVVAKVEKGKSKKLKSVKELLGITIMERSSFEKNPIDFLEAKGYKEVKKDLIIKLPKYSLFELENGRKRMLASAGELQKGNELALPSKYVNFLYLASHYEKLKGSPEDNEQKQLFVEQHKHYLDEIIEQISEFSKRVILADANLDKVLSAYNKHRDKPIREQAENIIHLFTLTNLGAPAAFKYFDTTIDRKRYTSTKEVLDATLIHQSITGLYETRIDLSQLGGDGGGGSEAAAKGGTLNIEDEYRLHETSKGPDVPLGSTWLSDFPQAWAETGGMGLAVRQAPLIIPLKATSTPVSIKQYPMSQEARLGIKPHIQRLLDQGILVPCQSPWNTPLLPVKKPGTNDYRPVQDLREVNKRVEDIHPTVPNPYNLLSGLPPSHQWYTVLDLKDAFFCLRLHPTSQSLFAFEWRDPEMGISGQLTWTRLPQGFKNSPTLFNEALHRDLADFRIQHPDLILLQYVDDLLLAATSELDCQQGTRALLQTLGDLGYRASAKKAQICQKQVKYLGYLLKEGQRWLTEARKETVMGQPTPKTPRQLREFLGTAGFCRLWIPGFAEMAAPLYPLTKPGTLFEWGPDQQKAYQEIKQALLTAPALGLPDLTKPFELFVDEKQGYAKGVLTQKLGPWRRPVAYLSKKLDPVAAGWPPCLRMVAAIAVLTKDAGKLTMGQPLVILAPHAVEALVKQPPDRWLSNARMTHYQALLLDTDRVQFGPIVALNPATLLPLPEEGLQHDCLDILAEAHGTRPDLTDQPLPDADHTWYTDGSSFLQEGQRKAGAAVTTETEVVWAKALPAGTSAQRAELIALTQALKMAEGKKLNVYTDSRYAFATAHIHGEIYRRRGWLTSEGKEIKNKDEILALLKALFLPKRLSIIHCPGHQKGNRAEARGNRMADQAAREVATRETPETSTLLAGKRTADGSEFEKRTADGSEFESPKKKAKVE

SEQ ID NO: 6628 - protein, 2084 aa, synthetic construct
MPAAKRVKLDGGDKKYSIGLDIGTNSVGWAVITDEYKVPSKKFKVLGNTDRHSIKKNLIGALLFDSGETAEATRLKRTARRRYTRRKNRICYLQEIFSNEMAKVDDSFFHRLEESFLVEEDKKHERHPIFGNIVDEVAYHEKYPTIYHLRKKLVDSTDKADLRLIYLALAHMIKFRGHFLIEGDLNPDNSDVDKLFIQLVQTYNQLFEENPINASGVDAKAILSARLSKSRRLENLIAQLPGEKKNGLFGNLIALSLGLTPNFKSNFDLAEDAKLQLSKDTYDDDLDNLLAQIGDQYADLFLAAKNLSDAILLSDILRVNTEITKAPLSASMIKRYDEHHQDLTLLKALVRQQLPEKYKEIFFDQSKNGYAGYIDGGASQEEFYKFIKPILEKMDGTEELLVKLNREDLLRKQRTFDNGSIPHQIHLGELHAILRRQEDFYPFLKDNREKIEKILTFRIPYYVGPLARGNSRFAWMTRKSEETITPWNFEEVVDKGASAQSFIERMTNFDKNLPNEKVLPKHSLLYEYFTVYNELTKVKYVTEGMRKPAFLSGEQKKAIVDLLFKTNRKVTVKQLKEDYFKKIECFDSVEISGVEDRFNASLGTYHDLLKIIKDKDFLDNEENEDILEDIVLTLTLFEDREMIEERLKTYAHLFDDKVMKQLKRRRYTGWGRLSRKLINGIRDKQSGKTILDFLKSDGFANRNFMQLIHDDSLTFKEDIQKAQVSGQGDSLHEHIANLAGSPAIKKGILQTVKVVDELVKVMGRHKPENIVIEMARENQTTQKGQKNSRERMKRIEEGIKELGSQILKEHPVENTQLQNEKLYLYYLQNGRDMYVDQELDINRLSDYDVDHIVPQSFLKDDSIDNKVLTRSDKARGKSDNVPSEEVVKKMKNYWRQLLNAKLITQRKFDNLTKAERGGLSELDKAGFIKRQLVETRQITKHVAQILDSRMNTKYDENDKLIREVKVITLKSKLVSDFRKDFQFYKVREINNYHHAHDAYLNAVVGTALIKKYPKLESEFVYGDYKVYDVRKMIAKSEQEIGKATAKYFFYSNIMNFFKTEITLANGEIRKRPLIETNGETGEIVWDKGRDFATVRKVLSMPQVNIVKKTEVQTGGFSKESILPKRNSDKLIARKKDWDPKKYGGFDSPTVAYSVLVVAKVEKGKSKKLKSVKELLGITIMERSSFEKNPIDFLEAKGYKEVKKDLIIKLPKYSLFELENGRKRMLASAGELQKGNELALPSKYVNFLYLASHYEKLKGSPEDNEQKQLFVEQHKHYLDEIIEQISEFSKRVILADANLDKVLSAYNKHRDKPIREQAENIIHLFTLTNLGAPAAFKYFDTTIDRKRYTSTKEVLDATLIHQSITGLYETRIDLSQLGGDGGGGSEAAAKGGIPWLMKKPLQLTTLVPLQEYEERLLKQTMLTGSYKEKLQSLFLKYDALWQHWENQVGHRRIKPHHIATGTVNPRPQKQYPINPKAKASIQTVINDLLKQGVLIQQNSIMNTPVYPVPKPDGKWRMVLDYREVNKTIPLIAAQNQHSAGILSSIFRGKYKTTLDLSNGFWAHSITPESYWLTAFTWLGQQYCWTRLPQGFLNSPALFNADVVDLLKEVPNVQVYVDDIYISHDDPREHLEQLEKVFSLLLNAGYVVSLKKSEIAQHEVEFLGFNITKEGRGLTETFKQKLLNITPPRDLKQLQSILGLLNFARNFIPNFSELVKPLYNIIATAPGKYITWTTDNSQQLQNIISMLNSAENLEERNPEVRLIMKVNTSPSAGYIRFYNEFAKRPIMYLNYVYTKAEVKFTNTEKLLTTIHKGLIKALDLGMGQEILVYSPIVSMTKIQKTPLPERKALPIRWITWMSYLEDPRIQFHYDKTLPELQQVPTVTDDIIAKIKHPSEFSMVFYTDGSAIKHPNVNKSHNAGMGIAQVQFKPEFTVINTWSIPLGDHTAQLAEVAAVEFACKKALKIDGPVLIVTDSFYVAESVNKELPYWQSNGFFNNKKKPLKHVSKWKSIADCIQLKPDIIIIHEKGHQPTASTFHTEGNNLADKLATQGSYVVNAGKRTADGSEFEKRTADGSEFESPKKKAKVE

SEQ ID NO: 6629 - protein, 2091 aa, synthetic construct
MPAAKRVKLDGGDKKYSIGLDIGTNSVGWAVITDEYKVPSKKFKVLGNTDRHSIKKNLIGALLFDSGETAEATRLKRTARRRYTRRKNRICYLQEIFSNEMAKVDDSFFHRLEESFLVEEDKKHERHPIFGNIVDEVAYHEKYPTIYHLRKKLVDSTDKADLRLIYLALAHMIKFRGHFLIEGDLNPDNSDVDKLFIQLVQTYNQLFEENPINASGVDAKAILSARLSKSRRLENLIAQLPGEKKNGLFGNLIALSLGLTPNFKSNFDLAEDAKLQLSKDTYDDDLDNLLAQIGDQYADLFLAAKNLSDAILLSDILRVNTEITKAPLSASMIKRYDEHHQDLTLLKALVRQQLPEKYKEIFFDQSKNGYAGYIDGGASQEEFYKFIKPILEKMDGTEELLVKLNREDLLRKQRTFDNGSIPHQIHLGELHAILRRQEDFYPFLKDNREKIEKILTFRIPYYVGPLARGNSRFAWMTRKSEETITPWNFEEVVDKGASAQSFIERMTNFDKNLPNEKVLPKHSLLYEYFTVYNELTKVKYVTEGMRKPAFLSGEQKKAIVDLLFKTNRKVTVKQLKEDYFKKIECFDSVEISGVEDRFNASLGTYHDLLKIIKDKDFLDNEENEDILEDIVLTLTLFEDREMIEERLKTYAHLFDDKVMKQLKRRRYTGWGRLSRKLINGIRDKQSGKTILDFLKSDGFANRNFMQLIHDDSLTFKEDIQKAQVSGQGDSLHEHIANLAGSPAIKKGILQTVKVVDELVKVMGRHKPENIVIEMARENQTTQKGQKNSRERMKRIEEGIKELGSQILKEHPVENTQLQNEKLYLYYLQNGRDMYVDQELDINRLSDYDVDHIVPQSFLKDDSIDNKVLTRSDKARGKSDNVPSEEVVKKMKNYWRQLLNAKLITQRKFDNLTKAERGGLSELDKAGFIKRQLVETRQITKHVAQILDSRMNTKYDENDKLIREVKVITLKSKLVSDFRKDFQFYKVREINNYHHAHDAYLNAVVGTALIKKYPKLESEFVYGDYKVYDVRKMIAKSEQEIGKATAKYFFYSNIMNFFKTEITLANGEIRKRPLIETNGETGEIVWDKGRDFATVRKVLSMPQVNIVKKTEVQTGGFSKESILPKRNSDKLIARKKDWDPKKYGGFDSPTVAYSVLVVAKVEKGKSKKLKSVKELLGITIMERSSFEKNPIDFLEAKGYKEVKKDLIIKLPKYSLFELENGRKRMLASAGELQKGNELALPSKYVNFLYLASHYEKLKGSPEDNEQKQLFVEQHKHYLDEIIEQISEFSKRVILADANLDKVLSAYNKHRDKPIREQAENIIHLFTLTNLGAPAAFKYFDTTIDRKRYTSTKEVLDATLIHQSITGLYETRIDLSQLGGDGGGGSEAAAKGGVLNLEEEYRLHEKPVPSSIDPSWLQLFPTVWAERAGMGLANQVPPVVVELRSGASPVAVRQYPMSKEAREGIRPHIQRFLDLGVLVPCQSPWNTPLLPVKKPGTNDYRPVQDLREINKRVQDIHPTVPNPYNLLSSLPPSHTWYSVLDLKDAFFCLKLHPNSQPLFAFEWRDPEKGNTGQLTWTRLPQGFKNSPTLFNEALHRDLAPFRALNPQVVLLQYVDDLLVAAPTYRDCKEGTQKLLQELSKLGYRVSAKKAQLCQKEVTYLGYLLKEGKRWLTPARKATVMKIPPPTTPRQVREFLGKAGFCRLFIPGFASLAAPLYPLTKPSIPFIWTEEHQKAFDRIKEALLSAPALALPDLTKPFTLYVDERAGVARGVLTQTLGPWRRPVAYLSKKLDPVASGWPTCLKAVAAVALLLKDADKLTLGQNVTVIASHSLESIVRQPPDRWMTNARMTHYQSLLLNERVSFAPPAVLNPATLLPVESEATPVHRCSEILAEETGTRRDLKDQPLPGVPAWYTDGSSFIAEGKRRAGAAIVDGKRTVWASSLPEGTSAQKAELVALTQALRLAEGKDINIYTDSRYAFATAHIHGAIYKQRGWLTSAGKDIKNKEEILALLEAIHLPKRVAIIHCPGHQKGNDPVATGNRRADEAAKQAALSTRVLAETTKPAGKRTADGSEFEKRTADGSEFESPKKKAKVE

SEQ ID NO: 6630 - protein, 2092 aa, synthetic construct
MPAAKRVKLDGGDKKYSIGLDIGTNSVGWAVITDEYKVPSKKFKVLGNTDRHSIKKNLIGALLFDSGETAEATRLKRTARRRYTRRKNRICYLQEIFSNEMAKVDDSFFHRLEESFLVEEDKKHERHPIFGNIVDEVAYHEKYPTIYHLRKKLVDSTDKADLRLIYLALAHMIKFRGHFLIEGDLNPDNSDVDKLFIQLVQTYNQLFEENPINASGVDAKAILSARLSKSRRLENLIAQLPGEKKNGLFGNLIALSLGLTPNFKSNFDLAEDAKLQLSKDTYDDDLDNLLAQIGDQYADLFLAAKNLSDAILLSDILRVNTEITKAPLSASMIKRYDEHHQDLTLLKALVRQQLPEKYKEIFFDQSKNGYAGYIDGGASQEEFYKFIKPILEKMDGTEELLVKLNREDLLRKQRTFDNGSIPHQIHLGELHAILRRQEDFYPFLKDNREKIEKILTFRIPYYVGPLARGNSRFAWMTRKSEETITPWNFEEVVDKGASAQSFIERMTNFDKNLPNEKVLPKHSLLYEYFTVYNELTKVKYVTEGMRKPAFLSGEQKKAIVDLLFKTNRKVTVKQLKEDYFKKIECFDSVEISGVEDRFNASLGTYHDLLKIIKDKDFLDNEENEDILEDIVLTLTLFEDREMIEERLKTYAHLFDDKVMKQLKRRRYTGWGRLSRKLINGIRDKQSGKTILDFLKSDGFANRNFMQLIHDDSLTFKEDIQKAQVSGQGDSLHEHIANLAGSPAIKKGILQTVKVVDELVKVMGRHKPENIVIEMARENQTTQKGQKNSRERMKRIEEGIKELGSQILKEHPVENTQLQNEKLYLYYLQNGRDMYVDQELDINRLSDYDVDHIVPQSFLKDDSIDNKVLTRSDKARGKSDNVPSEEVVKKMKNYWRQLLNAKLITQRKFDNLTKAERGGLSELDKAGFIKRQLVETRQITKHVAQILDSRMNTKYDENDKLIREVKVITLKSKLVSDFRKDFQFYKVREINNYHHAHDAYLNAVVGTALIKKYPKLESEFVYGDYKVYDVRKMIAKSEQEIGKATAKYFFYSNIMNFFKTEITLANGEIRKRPLIETNGETGEIVWDKGRDFATVRKVLSMPQVNIVKKTEVQTGGFSKESILPKRNSDKLIARKKDWDPKKYGGFDSPTVAYSVLVVAKVEKGKSKKLKSVKELLGITIMERSSFEKNPIDFLEAKGYKEVKKDLIIKLPKYSLFELENGRKRMLASAGELQKGNELALPSKYVNFLYLASHYEKLKGSPEDNEQKQLFVEQHKHYLDEIIEQISEFSKRVILADANLDKVLSAYNKHRDKPIREQAENIIHLFTLTNLGAPAAFKYFDTTIDRKRYTSTKEVLDATLIHQSITGLYETRIDLSQLGGDGGEAAAKGGSGGTLQLEEEYRLFEPESTQKQEMDIWLKNFPQAWAETGGMGTAHCQAPVLIQLKATATPISIRQYPMPHEAYQGIKPHIRRMLDQGILKPCQSPWNTPLLPVKKPGTEDYRPVQDLREVNKRVEDIHPTVPNPYNLLSTLPPSHPWYTVLDLKDAFFCLRLHSESQLLFAFEWRDPEIGLSGQLTWTRLPQGFKNSPTLFNEALHSDLADFRVRYPALVLLQYVDDLLLAAATRTECLEGTKALLETLGNKGYRASAKKAQICLQEVTYLGYSLKDGQRWLTKARKEAILSIPVPKNSRQVREFLGKAGYCRLFIPGFAELAAPLYPLTRPGTLFQWGTEQQLAFEDIKKALLSSPALGLPDITKPFELFIDENSGFAKGVLVQKLGPWKRPVAYLSKKLDTVASGWPPCLRMVAAIAILVKDAGKLTLGQPLTILTSHPVEALVRQPPNKWLSNARMTHYQAMLLDAERVHFGPTVSLNPATLLPLPSGGNHHDCLQILAETHGTRPDLTDQPLPDADLTWYTDGSSFIRNGEREAGAAVTTESEVIWAAPLPPGTSAQRAELIALTQALKMAEGKKLTVYTDSRYAFATTHVHGEIYRRRGWLTSEGKEIKNKNEILALLEALFLPKRLSIIHCPGHQKGDSPQAKGNRLADDTAKKAATETHSSLTVLPAGKRTADGSEFEKRTADGSEFESPKKKAKVE

SEQ ID NO: 6631 - protein, 2091 aa, synthetic construct
MPAAKRVKLDGGDKKYSIGLDIGTNSVGWAVITDEYKVPSKKFKVLGNTDRHSIKKNLIGALLFDSGETAEATRLKRTARRRYTRRKNRICYLQEIFSNEMAKVDDSFFHRLEESFLVEEDKKHERHPIFGNIVDEVAYHEKYPTIYHLRKKLVDSTDKADLRLIYLALAHMIKFRGHFLIEGDLNPDNSDVDKLFIQLVQTYNQLFEENPINASGVDAKAILSARLSKSRRLENLIAQLPGEKKNGLFGNLIALSLGLTPNFKSNFDLAEDAKLQLSKDTYDDDLDNLLAQIGDQYADLFLAAKNLSDAILLSDILRVNTEITKAPLSASMIKRYDEHHQDLTLLKALVRQQLPEKYKEIFFDQSKNGYAGYIDGGASQEEFYKFIKPILEKMDGTEELLVKLNREDLLRKQRTFDNGSIPHQIHLGELHAILRRQEDFYPFLKDNREKIEKILTFRIPYYVGPLARGNSRFAWMTRKSEETITPWNFEEVVDKGASAQSFIERMTNFDKNLPNEKVLPKHSLLYEYFTVYNELTKVKYVTEGMRKPAFLSGEQKKAIVDLLFKTNRKVTVKQLKEDYFKKIECFDSVEISGVEDRFNASLGTYHDLLKIIKDKDFLDNEENEDILEDIVLTLTLFEDREMIEERLKTYAHLFDDKVMKQLKRRRYTGWGRLSRKLINGIRDKQSGKTILDFLKSDGFANRNFMQLIHDDSLTFKEDIQKAQVSGQGDSLHEHIANLAGSPAIKKGILQTVKVVDELVKVMGRHKPENIVIEMARENQTTQKGQKNSRERMKRIEEGIKELGSQILKEHPVENTQLQNEKLYLYYLQNGRDMYVDQELDINRLSDYDVDHIVPQSFLKDDSIDNKVLTRSDKARGKSDNVPSEEVVKKMKNYWRQLLNAKLITQRKFDNLTKAERGGLSELDKAGFIKRQLVETRQITKHVAQILDSRMNTKYDENDKLIREVKVITLKSKLVSDFRKDFQFYKVREINNYHHAHDAYLNAVVGTALIKKYPKLESEFVYGDYKVYDVRKMIAKSEQEIGKATAKYFFYSNIMNFFKTEITLANGEIRKRPLIETNGETGEIVWDKGRDFATVRKVLSMPQVNIVKKTEVQTGGFSKESILPKRNSDKLIARKKDWDPKKYGGFDSPTVAYSVLVVAKVEKGKSKKLKSVKELLGITIMERSSFEKNPIDFLEAKGYKEVKKDLIIKLPKYSLFELENGRKRMLASAGELQKGNELALPSKYVNFLYLASHYEKLKGSPEDNEQKQLFVEQHKHYLDEIIEQISEFSKRVILADANLDKVLSAYNKHRDKPIREQAENIIHLFTLTNLGAPAAFKYFDTTIDRKRYTSTKEVLDATLIHQSITGLYETRIDLSQLGGDGGEAAAKGGSGGVLNLEEEYRLHEKPVPSSIDPSWLQLFPTVWAERAGMGLANQVPPVVVELRSGASPVAVRQYPMSKEAREGIRPHIQKFLDLGVLVPCRSPWNTPLLPVKKPGTNDYRPVQDLREINKRVQDIHPTVPNPYNLLSSLPPSYTWYSVLDLKDAFFCLRLHPNSQPLFAFEWKDPEKGNTGQLTWTRLPQGFKNSPTLFNEALHRDLAPFRALNPQVVLLQYVDDLLVAAPTYEDCKKGTQKLLQELSKLGYRVSAKKAQLCQREVTYLGYLLKEGKRWLTPARKATVMKIPVPTTPRQVREFLGKAGFCRLFIPGFASLAAPLYPLTKPSIPFIWTEEHQQAFDHIKKALLSAPALALPDLTKPFTLYIDERAGVARGVLTQTLGPWRRPVAYLSKKLDPVASGWPTCLKAVAAVALLLKDADKLTLGQNVTVIASHSLESIVRQPPDRWMTNARMTHYQSLLLNERVSFAPPAVLNPATLLPVESEATPVHRCSEILAEETGTRRDLEDQPLPGVPTWYTDGSSFITEGKRRAGAPIVDGKRTVWASSLPEGTSAQKAELVALTQALRLAEGKNINIYTDSRYAFATAHIHGAIYKQRGWLTSAGKDIKNKEEILALLEAIHLPRRVAIIHCPGHQRGSNPVATGNRRADEAAKQAALSTRVLAGTTKPAGKRTADGSEFEKRTADGSEFESPKKKAKVE

SEQ ID NO: 6632 - protein, 2093 aa, synthetic construct
MPAAKRVKLDGGDKKYSIGLDIGTNSVGWAVITDEYKVPSKKFKVLGNTDRHSIKKNLIGALLFDSGETAEATRLKRTARRRYTRRKNRICYLQEIFSNEMAKVDDSFFHRLEESFLVEEDKKHERHPIFGNIVDEVAYHEKYPTIYHLRKKLVDSTDKADLRLIYLALAHMIKFRGHFLIEGDLNPDNSDVDKLFIQLVQTYNQLFEENPINASGVDAKAILSARLSKSRRLENLIAQLPGEKKNGLFGNLIALSLGLTPNFKSNFDLAEDAKLQLSKDTYDDDLDNLLAQIGDQYADLFLAAKNLSDAILLSDILRVNTEITKAPLSASMIKRYDEHHQDLTLLKALVRQQLPEKYKEIFFDQSKNGYAGYIDGGASQEEFYKFIKPILEKMDGTEELLVKLNREDLLRKQRTFDNGSIPHQIHLGELHAILRRQEDFYPFLKDNREKIEKILTFRIPYYVGPLARGNSRFAWMTRKSEETITPWNFEEVVDKGASAQSFIERMTNFDKNLPNEKVLPKHSLLYEYFTVYNELTKVKYVTEGMRKPAFLSGEQKKAIVDLLFKTNRKVTVKQLKEDYFKKIECFDSVEISGVEDRFNASLGTYHDLLKIIKDKDFLDNEENEDILEDIVLTLTLFEDREMIEERLKTYAHLFDDKVMKQLKRRRYTGWGRLSRKLINGIRDKQSGKTILDFLKSDGFANRNFMQLIHDDSLTFKEDIQKAQVSGQGDSLHEHIANLAGSPAIKKGILQTVKVVDELVKVMGRHKPENIVIEMARENQTTQKGQKNSRERMKRIEEGIKELGSQILKEHPVENTQLQNEKLYLYYLQNGRDMYVDQELDINRLSDYDVDHIVPQSFLKDDSIDNKVLTRSDKARGKSDNVPSEEVVKKMKNYWRQLLNAKLITQRKFDNLTKAERGGLSELDKAGFIKRQLVETRQITKHVAQILDSRMNTKYDENDKLIREVKVITLKSKLVSDFRKDFQFYKVREINNYHHAHDAYLNAVVGTALIKKYPKLESEFVYGDYKVYDVRKMIAKSEQEIGKATAKYFFYSNIMNFFKTEITLANGEIRKRPLIETNGETGEIVWDKGRDFATVRKVLSMPQVNIVKKTEVQTGGFSKESILPKRNSDKLIARKKDWDPKKYGGFDSPTVAYSVLVVAKVEKGKSKKLKSVKELLGITIMERSSFEKNPIDFLEAKGYKEVKKDLIIKLPKYSLFELENGRKRMLASAGELQKGNELALPSKYVNFLYLASHYEKLKGSPEDNEQKQLFVEQHKHYLDEIIEQISEFSKRVILADANLDKVLSAYNKHRDKPIREQAENIIHLFTLTNLGAPAAFKYFDTTIDRKRYTSTKEVLDATLIHQSITGLYETRIDLSQLGGDGGEAAAKGGSGGTLGIEDEYRLHETSTEPDVSLGSTWLSDFPQAWAETGGMGLAVRQAPLIIPLKATSTPVSIQQYPMSHEARLGIKPHIQRLLDQGILVPCQSPWNTPLLPVKKPGTNDYRPVQDLREVNKRVEDIHPTVPNPYNLLSGLPPSHQWYTVLDLKDAFFCLRLHPTSQPLFAFEWRDPGMGISGQLTWTRLPQGFKNSPTLFNEALHRDLADFRIQHPDLILLQYVDDILLAATSELDCQQGTRALLQTLGDLGYRASAKKAQICQKQVKYLGYLLREGQRWLTEARKETVMGQPVPKTPRQLREFLGTAGFCRLWIPGFAEMAAPLYPLTKPGTLFSWGPDQQKAYQEIKQALLTAPALGLPDLTKPFELFVDEKQGYAKGVLTQKLGPWRRPVAYLSKKLDPVAAGWPPCLRMVAAIAVLTKDAGKLTMGQPLVILAPHAVEALVKQPPDRWLSNARMTHYQAMLLDTDRVQFGPVVALNPATLLPLPEEGAPHDCLEILAETHGTRPDLTDQPIPDADHTWYTDGSSFLQEGQRKAGAAVTTETEVIWAGALPAGTSAQRAELIALTQALKMAEGKRLNVYTDSRYAFATAHIHGEIYRRRGWLTSEGREIKNKSEILALLKALFLPKRLSIIHCLGHQKGDSAEARGNRLADQAAREAAIKTPPDTSTLLAGKRTADGSEFEKRTADGSEFESPKKKAKVE

SEQ ID NO: 6633 - protein, 2093 aa, synthetic construct
MPAAKRVKLDGGDKKYSIGLDIGTNSVGWAVITDEYKVPSKKFKVLGNTDRHSIKKNLIGALLFDSGETAEATRLKRTARRRYTRRKNRICYLQEIFSNEMAKVDDSFFHRLEESFLVEEDKKHERHPIFGNIVDEVAYHEKYPTIYHLRKKLVDSTDKADLRLIYLALAHMIKFRGHFLIEGDLNPDNSDVDKLFIQLVQTYNQLFEENPINASGVDAKAILSARLSKSRRLENLIAQLPGEKKNGLFGNLIALSLGLTPNFKSNFDLAEDAKLQLSKDTYDDDLDNLLAQIGDQYADLFLAAKNLSDAILLSDILRVNTEITKAPLSASMIKRYDEHHQDLTLLKALVRQQLPEKYKEIFFDQSKNGYAGYIDGGASQEEFYKFIKPILEKMDGTEELLVKLNREDLLRKQRTFDNGSIPHQIHLGELHAILRRQEDFYPFLKDNREKIEKILTFRIPYYVGPLARGNSRFAWMTRKSEETITPWNFEEVVDKGASAQSFIERMTNFDKNLPNEKVLPKHSLLYEYFTVYNELTKVKYVTEGMRKPAFLSGEQKKAIVDLLFKTNRKVTVKQLKEDYFKKIECFDSVEISGVEDRFNASLGTYHDLLKIIKDKDFLDNEENEDILEDIVLTLTLFEDREMIEERLKTYAHLFDDKVMKQLKRRRYTGWGRLSRKLINGIRDKQSGKTILDFLKSDGFANRNFMQLIHDDSLTFKEDIQKAQVSGQGDSLHEHIANLAGSPAIKKGILQTVKVVDELVKVMGRHKPENIVIEMARENQTTQKGQKNSRERMKRIEEGIKELGSQILKEHPVENTQLQNEKLYLYYLQNGRDMYVDQELDINRLSDYDVDHIVPQSFLKDDSIDNKVLTRSDKARGKSDNVPSEEVVKKMKNYWRQLLNAKLITQRKFDNLTKAERGGLSELDKAGFIKRQLVETRQITKHVAQILDSRMNTKYDENDKLIREVKVITLKSKLVSDFRKDFQFYKVREINNYHHAHDAYLNAVVGTALIKKYPKLESEFVYGDYKVYDVRKMIAKSEQEIGKATAKYFFYSNIMNFFKTEITLANGEIRKRPLIETNGETGEIVWDKGRDFATVRKVLSMPQVNIVKKTEVQTGGFSKESILPKRNSDKLIARKKDWDPKKYGGFDSPTVAYSVLVVAKVEKGKSKKLKSVKELLGITIMERSSFEKNPIDFLEAKGYKEVKKDLIIKLPKYSLFELENGRKRMLASAGELQKGNELALPSKYVNFLYLASHYEKLKGSPEDNEQKQLFVEQHKHYLDEIIEQISEFSKRVILADANLDKVLSAYNKHRDKPIREQAENIIHLFTLTNLGAPAAFKYFDTTIDRKRYTSTKEVLDATLIHQSITGLYETRIDLSQLGGDGGEAAAKGGSGGTLGIEDEYRLHETSTEPDVSLGSTWLSDFPQAWAETGGMGLAVRQAPLIIPLKATSTPVSIQQYPMSHEARLGIKPHIQRLLDQGILVPCQSPWNTPLLPVKKPGTNDYRPVQDLREVNKRVEDIHPTVPNPYNLLSGLPPSHQWYTVLDLKDAFFCLRLHPTSQPLFAFEWRDPGMGISGQLTWTRLPQGFKNSPTLFDEALHRDLADFRIQHPDLILLQYVDDILLAATSELDCQQGTRALLQTLGDLGYRASAKKAQICQKQVKYLGYLLREGQRWLTEARKETVMGQPVPKTPRQLREFLGTAGFCRLWIPGFAEMAAPLYPLTKTGTLFSWGPDQQKAYQEIKQALLTAPALGLPDLTKPFELFVDEKQGYAKGVLTQKLGPWRRPVAYLSKKLDPVAAGWPPCLRMVAAIAVLTKDAGKLTMGQPLVILAPHAVEALVKQPPDRWLSNARMTHYQAMLLDTDRVQFGPVVALNPATLLPLPEEGAPHDCLEILAETHGTRPDLTDQPIPDADHTWYTDGSSFLQEGQRKAGAAVTTETEVIWAGALPAGTSAQRAELIALTQALKMAEGKRLNVYTDSRYAFATAHIHGEIYRRRGLLTSEGREIKNKSEILALLKALFLPKRLSIIHCLGHQKGDSAEARGNRLADQAAREAAIKTPPDTSTLLAGKRTADGSEFEKRTADGSEFESPKKKAKVE

SEQ ID NO: 6634 - protein, 2093 aa, synthetic construct; identical to SEQ ID NO: 6632

SEQ ID NO: 6635 - protein, 2087 aa, synthetic construct
MPAAKRVKLDGGDKKYSIGLDIGTNSVGWAVITDEYKVPSKKFKVLGNTDRHSIKKNLIGALLFDSGETAEATRLKRTARRRYTRRKNRICYLQEIFSNEMAKVDDSFFHRLEESFLVEEDKKHERHPIFGNIVDEVAYHEKYPTIYHLRKKLVDSTDKADLRLIYLALAHMIKFRGHFLIEGDLNPDNSDVDKLFIQLVQTYNQLFEENPINASGVDAKAILSARLSKSRRLENLIAQLPGEKKNGLFGNLIALSLGLTPNFKSNFDLAEDAKLQLSKDTYDDDLDNLLAQIGDQYADLFLAAKNLSDAILLSDILRVNTEITKAPLSASMIKRYDEHHQDLTLLKALVRQQLPEKYKEIFFDQSKNGYAGYIDGGASQEEFYKFIKPILEKMDGTEELLVKLNREDLLRKQRTFDNGSIPHQIHLGELHAILRRQEDFYPFLKDNREKIEKILTFRIPYYVGPLARGNSRFAWMTRKSEETITPWNFEEVVDKGASAQSFIERMTNFDKNLPNEKVLPKHSLLYEYFTVYNELTKVKYVTEGMRKPAFLSGEQKKAIVDLLFKTNRKVTVKQLKEDYFKKIECFDSVEISGVEDRFNASLGTYHDLLKIIKDKDFLDNEENEDILEDIVLTLTLFEDREMIEERLKTYAHLFDDKVMKQLKRRRYTGWGRLSRKLINGIRDKQSGKTILDFLKSDGFANRNFMQLIHDDSLTFKEDIQKAQVSGQGDSLHEHIANLAGSPAIKKGILQTVKVVDELVKVMGRHKPENIVIEMARENQTTQKGQKNSRERMKRIEEGIKELGSQILKEHPVENTQLQNEKLYLYYLQNGRDMYVDQELDINRLSDYDVDHIVPQSFLKDDSIDNKVLTRSDKARGKSDNVPSEEVVKKMKNYWRQLLNAKLITQRKFDNLTKAERGGLSELDKAGFIKRQLVETRQITKHVAQILDSRMNTKYDENDKLIREVKVITLKSKLVSDFRKDFQFYKVREINNYHHAHDAYLNAVVGTALIKKYPKLESEFVYGDYKVYDVRKMIAKSEQEIGKATAKYFFYSNIMNFFKTEITLANGEIRKRPLIETNGETGEIVWDKGRDFATVRKVLSMPQVNIVKKTEVQTGGFSKESILPKRNSDKLIARKKDWDPKKYGGFDSPTVAYSVLVVAKVEKGKSKKLKSVKELLGITIMERSSFEKNPIDFLEAKGYKEVKKDLIIKLPKYSLFELENGRKRMLASAGELQKGNELALPSKYVNFLYLASHYEKLKGSPEDNEQKQLFVEQHKHYLDEIIEQISEFSKRVILADANLDKVLSAYNKHRDKPIREQAENIIHLFTLTNLGAPAAFKYFDTTIDRKRYTSTKEVLDATLIHQSITGLYETRIDLSQLGGDGGEAAAKGGSGGTLQLDDEYRLYSPLVKPDQNIQFWLEQFPQAWAETAGMGLAKQVPPQVIQLKASATPVSVRQYPLSKEAQEGIRPHVQRLIQQGILVPVQSPWNTPLLPVRKPGTNDYRPVQDLREVNKRVQDIHPTVPNPYNLLCALPPQRSWYTVLDLKDAFFCLRLHPTSQPLFAFEWRDPGTGRTGQLTWTRLPQGFKNSPTIFDEALHRDLANFRIQHPQVTLLQYVDDLLLAGATKQDCLEGTKALLLELSDLGYRASAKKAQICRREVTYLGYSLRDGQRWLTEARKKTVVQIPAPTTAKQVREFLGTAGFCRLWIPGFATLAAPLYPLTKEKGEFSWAPEHQKAFDAIKKALLSAPALALPDVTKPFTLYVDERKGVARGVLTQTLGPWRRPVAYLSKKLDPVASGWPVCLKAIAAVAILVKDADKLTLGQNITVIAPHALENIVRQPPDRWMTNARMTHYQSLLLTERVTFAPPAALNPATLLPEETDEPVTHDCHQLLIEETGVRKDLTDIPLTGEVLTWFTDGSSYVVEGKRMAGAAVVDGTRTIWASSLPEGTSAQKAELMALTQALRLAEGKSINIYTDSRYAFATAHVHGAIYKQRGLLTSAGREIKNKEEILSLLEALHLPKRLAIIHCPGHQKAKDPISRGNQMADRVAKQAAQGVNLLAGKRTADGSEFEKRTADGSEFESPKKKAKVE

SEQ ID NO: 6636 - protein, 2087 aa, synthetic construct; identical to SEQ ID NO: 6635

SEQ ID NO: 6637 - protein, 2084 aa, synthetic construct
MPAAKRVKLDGGDKKYSIGLDIGTNSVGWAVITDEYKVPSKKFKVLGNTDRHSIKKNLIGALLFDSGETAEATRLKRTARRRYTRRKNRICYLQEIFSNEMAKVDDSFFHRLEESFLVEEDKKHERHPIFGNIVDEVAYHEKYPTIYHLRKKLVDSTDKADLRLIYLALAHMIKFRGHFLIEGDLNPDNSDVDKLFIQLVQTYNQLFEENPINASGVDAKAILSARLSKSRRLENLIAQLPGEKKNGLFGNLIALSLGLTPNFKSNFDLAEDAKLQLSKDTYDDDLDNLLAQIGDQYADLFLAAKNLSDAILLSDILRVNTEITKAPLSASMIKRYDEHHQDLTLLKALVRQQLPEKYKEIFFDQSKNGYAGYIDGGASQEEFYKFIKPILEKMDGTEELLVKLNREDLLRKQRTFDNGSIPHQIHLGELHAILRRQEDFYPFLKDNREKIEKILTFRIPYYVGPLARGNSRFAWMTRKSEETITPWNFEEVVDKGASAQSFIERMTNFDKNLPNEKVLPKHSLLYEYFTVYNELTKVKYVTEGMRKPAFLSGEQKKAIVDLLFKTNRKVTVKQLKEDYFKKIECFDSVEISGVEDRFNASLGTYHDLLKIIKDKDFLDNEENEDILEDIVLTLTLFEDREMIEERLKTYAHLFDDKVMKQLKRRRYTGWGRLSRKLINGIRDKQSGKTILDFLKSDGFANRNFMQLIHDDSLTFKEDIQKAQVSGQGDSLHEHIANLAGSPAIKKGILQTVKVVDELVKVMGRHKPENIVIEMARENQTTQKGQKNSRERMKRIEEGIKELGSQILKEHPVENTQLQNEKLYLYYLQNGRDMYVDQELDINRLSDYDVDHIVPQSFLKDDSIDNKVLTRSDKARGKSDNVPSEEVVKKMKNYWRQLLNAKLITQRKFDNLTKAERGGLSELDKAGFIKRQLVETRQITKHVAQILDSRMNTKYDENDKLIREVKVITLKSKLVSDFRKDFQFYKVREINNYHHAHDAYLNAVVGTALIKKYPKLESEFVYGDYKVYDVRKMIAKSEQEIGKATAKYFFYSNIMNFFKTEITLANGEIRKRPLIETNGETGEIVWDKGRDFATVRKVLSMPQVNIVKKTEVQTGGFSKESILPKRNSDKLIARKKDWDPKKYGGFDSPTVAYSVLVVAKVEKGKSKKLKSVKELLGITIMERSSFEKNPIDFLEAKGYKEVKKDLIIKLPKYSLFELENGRKRMLASAGELQKGNELALPSKYVNFLYLASHYEKLKGSPEDNEQKQLFVEQHKHYLDEIIEQISEFSKRVILADANLDKVLSAYNKHRDKPIREQAENIIHLFTLTNLGAPAAFKYFDTTIDRKRYTSTKEVLDATLIHQSITGLYETRIDLSQLGGDGGEAAAKGGSGGIPWLMKKPLQLTTLVPLQEYEERLLKQTMLTGSYKEKLQSLFLKYDALWQHWENQVGHRRIKPHHIATGTVNPRPQKQYPINPKAKASIQTVINDLLKQGVLIQQNSIMNTPVYPVPKPDGKWRMVLDYREVNKTIPLIAAQNQHSAGILSSIFRGKYKTTLDLSNGFWAHSITPESYWLTAFTWLGQQYCWTRLPQGFLNSPALFNADVVDLLKEVPNVQVYVDDIYISHDDPREHLEQLEKVFSLLLNAGYVVSLKKSEIAQHEVEFLGFNITKEGRGLTETFKQKLLNITPPRDLKQLQSILGLLNFARNFIPNFSELVKPLYNIIATAPGKYITWTTDNSQQLQNIISMLNSAENLEERNPEVRLIMKVNTSPSAGYIRFYNEFAKRPIMYLNYVYTKAEVKFTNTEKLLTTIHKGLIKALDLGMGQEILVYSPIVSMTKIQKTPLPERKALPIRWITWMSYLEDPRIQFHYDKTLPELQQVPTVTDDIIAKIKHPSEFSMVFYTDGSAIKHPNVNKSHNAGMGIAQVQFKPEFTVINTWSIPLGDHTAQLAEVAAVEFACKKALKIDGPVLIVTDSFYVAESVNKELPYWQSNGFFNNKKKPLKHVSKWKSIADCIQLKPDIIIIHEKGHQPTASTFHTEGNNLADKLATQGSYVVNAGKRTADGSEFEKRTADGSEFESPKKKAKVE

SEQ ID NO: 6638 - protein, 2084 aa, synthetic construct
MPAAKRVKLDGGDKKYSIGLDIGTNSVGWAVITDEYKVPSKKFKVLGNTDRHSIKKNLIGALLFDSGETAEATRLKRTARRRYTRRKNRICYLQEIFSNEMAKVDDSFFHRLEESFLVEEDKKHERHPIFGNIVDEVAYHEKYPTIYHLRKKLVDSTDKADLRLIYLALAHMIKFRGHFLIEGDLNPDNSDVDKLFIQLVQTYNQLFEENPINASGVDAKAILSARLSKSRRLENLIAQLPGEKKNGLFGNLIALSLGLTPNFKSNFDLAEDAKLQLSKDTYDDDLDNLLAQIGDQYADLFLAAKNLSDAILLSDILRVNTEITKAPLSASMIKRYDEHHQDLTLLKALVRQQLPEKYKEIFFDQSKNGYAGYIDGGASQEEFYKFIKPILEKMDGTEELLVKLNREDLLRKQRTFDNGSIPHQIHLGELHAILRRQEDFYPFLKDNREKIEKILTFRIPYYVGPLARGNSRFAWMTRKSEETITPWNFEEVVDKGASAQSFIERMTNFDKNLPNEKVLPKHSLLYEYFTVYNELTKVKYVTEGMRKPAFLSGEQKKAIVDLLFKTNRKVTVKQLKEDYFKKIECFDSVEISGVEDRFNASLGTYHDLLKIIKDKDFLDNEENEDILEDIVLTLTLFEDREMIEERLKTYAHLFDDKVMKQLKRRRYTGWGRLSRKLINGIRDKQSGKTILDFLKSDGFANRNFMQLIHDDSLTFKEDIQKAQVSGQGDSLHEHIANLAGSPAIKKGILQTVKVVDELVKVMGRHKPENIVIEMARENQTTQKGQKNSRERMKRIEEGIKELGSQILKEHPVENTQLQNEKLYLYYLQNGRDMYVDQELDINRLSDYDVDHIVPQSFLKDDSIDNKVLTRSDKARGKSDNVPSEEVVKKMKNYWRQLLNAKLITQRKFDNLTKAERGGLSELDKAGFIKRQLVETRQITKHVAQILDSRMNTKYDENDKLIREVKVITLKSKLVSDFRKDFQFYKVREINNYHHAHDAYLNAVVGTALIKKYPKLESEFVYGDYKVYDVRKMIAKSEQEIGKATAKYFFYSNIMNFFKTEITLANGEIRKRPLIETNGETGEIVWDKGRDFATVRKVLSMPQVNIVKKTEVQTGGFSKESILPKRNSDKLIARKKDWDPKKYGGFDSPTVAYSVLVVAKVEKGKSKKLKSVKELLGITIMERSSFEKNPIDFLEAKGYKEVKKDLIIKLPKYSLFELENGRKRMLASAGELQKGNELALPSKYVNFLYLASHYEKLKGSPEDNEQKQLFVEQHKHYLDEIIEQISEFSKRVILADANLDKVLSAYNKHRDKPIREQAENIIHLFTLTNLGAPAAFKYFDTTIDRKRYTSTKEVLDATLIHQSITGLYETRIDLSQLGGDGGEAAAKGGSGGIPWLMKKPLQLTTLVPLQEYEERLLKQTMLTGSYKEKLQSLFLKYDALWQHWENQVGHRRIKPHHIATGTVNPRPQKQYPINPKAKASIQTVINDLLKQGVLIQQNSIMNTPVYPVPKPDGKWRMVLDYREVNKTIPLIAAQNQHSAGILSSIFRGKYKTTLDLSNGFWAHSITPESYWLTAFTWLGQQYCWTRLPQGFLNSPALFNADVVDLLKEVPNVQVYVDDIYISHDDPREHLEQLEKVFSLLLNAGYVVSLKKSEIAQHEVEFLGFNITKEGRGLTETFKQKLLNITPPRDLKQLQSILGKLNFARNFIPNFSELVKPLYNIIATAPGKYITWTTDNSQQLQNIISMLNSAENLEERNPEVRLIMKVNTSPSAGYIRFYNEFAKRPIMYLNYVYTKAEVKFTNTEKLLTTIHKGLIKALDLGMGQEILVYSPIVSMTKIQKTPLPERKALPIRWITWMSYLEDPRIQFHYDKTLPELQQVPTVTDDIIAKIKHPSEFSMVFYTDGSAIKHPNVNKSHNAGMGIAQVQFKPEFTVINTWSIPLGDHTAQLAEVAAVEFACKKALKIDGPVLIVTDSFYVAESVNKELPYWQSNGFFNNKKKPLKHVSKWKSIADCIQLKPDIIIIHEKGHQPTASTFHTEGNNLADKLATQGSYVVNAGKRTADGSEFEKRTADGSEFESPKKKAKVE

SEQ ID NO: 6639 - protein, 2093 aa, synthetic construct
MPAAKRVKLDGGDKKYSIGLDIGTNSVGWAVITDEYKVPSKKFKVLGNTDRHSIKKNLIGALLFDSGETAEATRLKRTARRRYTRRKNRICYLQEIFSNEMAKVDDSFFHRLEESFLVEEDKKHERHPIFGNIVDEVAYHEKYPTIYHLRKKLVDSTDKADLRLIYLALAHMIKFRGHFLIEGDLNPDNSDVDKLFIQLVQTYNQLFEENPINASGVDAKAILSARLSKSRRLENLIAQLPGEKKNGLFGNLIALSLGLTPNFKSNFDLAEDAKLQLSKDTYDDDLDNLLAQIGDQYADLFLAAKNLSDAILLSDILRVNTEITKAPLSASMIKRYDEHHQDLTLLKALVRQQLPEKYKEIFFDQSKNGYAGYIDGGASQEEFYKFIKPILEKMDGTEELLVKLNREDLLRKQRTFDNGSIPHQIHLGELHAILRRQEDFYPFLKDNREKIEKILTFRIPYYVGPLARGNSRFAWMTRKSEETITPWNFEEVVDKGASAQSFIERMTNFDKNLPNEKVLPKHSLLYEYFTVYNELTKVKYVTEGMRKPAFLSGEQKKAIVDLLFKTNRKVTVKQLKEDYFKKIECFDSVEISGVEDRFNASLGTYHDLLKIIKDKDFLDNEENEDILEDIVLTLTLFEDREMIEERLKTYAHLFDDKVMKQLKRRRYTGWGRLSRKLINGIRDKQSGKTILDFLKSDGFANRNFMQLIHDDSLTFKEDIQKAQVSGQGDSLHEHIANLAGSPAIKKGILQTVKVVDELVKVMGRHKPENIVIEMARENQTTQKGQKNSRERMKRIEEGIKELGSQILKEHPVENTQLQNEKLYLYYLQNGRDMYVDQELDINRLSDYDVDHIVPQSFLKDDSIDNKVLTRSDKARGKSDNVPSEEVVKKMKNYWRQLLNAKLITQRKFDNLTKAERGGLSELDKAGFIKRQLVETRQITKHVAQILDSRMNTKYDENDKLIREVKVITLKSKLVSDFRKDFQFYKVREINNYHHAHDAYLNAVVGTALIKKYPKLESEFVYGDYKVYDVRKMIAKSEQEIGKATAKYFFYSNIMNFFKTEITLANGEIRKRPLIETNGETGEIVWDKGRDFATVRKVLSMPQVNIVKKTEVQTGGFSKESILPKRNSDKLIARKKDWDPKKYGGFDSPTVAYSVLVVAKVEKGKSKKLKSVKELLGITIMERSSFEKNPIDFLEAKGYKEVKKDLIIKLPKYSLFELENGRKRMLASAGELQKGNELALPSKYVNFLYLASHYEKLKGSPEDNEQKQLFVEQHKHYLDEIIEQISEFSKRVILADANLDKVLSAYNKHRDKPIREQAENIIHLFTLTNLGAPAAFKYFDTTIDRKRYTSTKEVLDATLIHQSITGLYETRIDLSQLGGDGGEAAAKGGSGGTLNIEDEYRLHETSKEPDVPLGSTWLSDFPQAWAETGGMGLAVRQAPLIIPLKATSTPVSIKQYPMSQEARLGIKPHIQRLLDQGILVPCQSPWNTPLLPVKKPGTNDYRPVQDLREVNKRVEDIHPTVPNPYNLLSGLPPSHQWYTVLDLKDAFFCLRLHPTSQPLFAFEWRDPEMGISGQLTWTRLPQGFKNSPTLFNEALHRDLADFRIQHPDLILLQYVDDLLLAATSEQDCQRGTRALLQTLGNLGYRASAKKAQICQKQVKYLGYLLKEGQRWLTEARKETVMGQPTPKTPRQLREFLGTAGFCRLWIPGFAEMAAPLYPLTKPGTLFNWGPDQQKAYQEIKQALLTAPALGLPDLTKPFELFVDEKQGYAKGVLTQKLGPWRRPVAYLSKKLDPVAAGWPPCLRMVAAIAVLTKDAGKLTMGQPLVILAPHAVEALVKQPPDRWLSNARMTHYQAMLLDTDRVQFGPVVALNPATLLPLPEKEAPHDCLEILAETHGTRPDLTDQPIPDADYTWYTDGSSFLQEGQRRAGAAVTTETEVIWARALPAGTSAQRAELIALTQALKMAEGKKLNVYTDSRYAFATAHVHGEIYRRRGWLTSEGREIKNKNEILALLKALFLPKRLSIIHCPGHQKGNSAEARGNRMADQAAREAAMKAVLETSTLLAGKRTADGSEFEKRTADGSEFESPKKKAKVE

SEQ ID NO: 6640 - protein, 2097 aa, synthetic construct
MPAAKRVKLDGGDKKYSIGLDIGTNSVGWAVITDEYKVPSKKFKVLGNTDRHSIKKNLIGALLFDSGETAEATRLKRTARRRYTRRKNRICYLQEIFSNEMAKVDDSFFHRLEESFLVEEDKKHERHPIFGNIVDEVAYHEKYPTIYHLRKKLVDSTDKADLRLIYLALAHMIKFRGHFLIEGDLNPDNSDVDKLFIQLVQTYNQLFEENPINASGVDAKAILSARLSKSRRLENLIAQLPGEKKNGLFGNLIALSLGLTPNFKSNFDLAEDAKLQLSKDTYDDDLDNLLAQIGDQYADLFLAAKNLSDAILLSDILRVNTEITKAPLSASMIKRYDEHHQDLTLLKALVRQQLPEKYKEIFFDQSKNGYAGYIDGGASQEEFYKFIKPILEKMDGTEELLVKLNREDLLRKQRTFDNGSIPHQIHLGELHAILRRQEDFYPFLKDNREKIEKILTFRIPYYVGPLARGNSRFAWMTRKSEETITPWNFEEVVDKGASAQSFIERMTNFDKNLPNEKVLPKHSLLYEYFTVYNELTKVKYVTEGMRKPAFLSGEQKKAIVDLLFKTNRKVTVKQLKEDYFKKIECFDSVEISGVEDRFNASLGTYHDLLKIIKDKDFLDNEENEDILEDIVLTLTLFEDREMIEERLKTYAHLFDDKVMKQLKRRRYTGWGRLSRKLINGIRDKQSGKTILDFLKSDGFANRNFMQLIHDDSLTFKEDIQKAQVSGQGDSLHEHIANLAGSPAIKKGILQTVKVVDELVKVMGRHKPENIVIEMARENQTTQKGQKNSRERMKRIEEGIKELGSQILKEHPVENTQLQNEKLYLYYLQNGRDMYVDQELDINRLSDYDVDHIVPQSFLKDDSIDNKVLTRSDKARGKSDNVPSEEVVKKMKNYWRQLLNAKLITQRKFDNLTKAERGGLSELDKAGFIKRQLVETRQITKHVAQILDSRMNTKYDENDKLIREVKVITLKSKLVSDFRKDFQFYKVREINNYHHAHDAYLNAVVGTALIKKYPKLESEFVYGDYKVYDVRKMIAKSEQEIGKATAKYFFYSNIMNFFKTEITLANGEIRKRPLIETNGETGEIVWDKGRDFATVRKVLSMPQVNIVKKTEVQTGGFSKESILPKRNSDKLIARKKDWDPKKYGGFDSPTVAYSVLVVAKVEKGKSKKLKSVKELLGITIMERSSFEKNPIDFLEAKGYKEVKKDLIIKLPKYSLFELENGRKRMLASAGELQKGNELALPSKYVNFLYLASHYEKLKGSPEDNEQKQLFVEQHKHYLDEIIEQISEFSKRVILADANLDKVLSAYNKHRDKPIREQAENIIHLFTLTNLGAPAAFKYFDTTIDRKRYTSTKEVLDATLIHQSITGLYETRIDLSQLGGDGGGGSPAPGGTVSLQDEHRLFDIPVTTSLPDVWLQDFPQAWAETGGLGRAKCQAPIIIDLKPTAVPVSIKQYPMSLEAHMGIRQHIIKFLELGVLRPCRSPWNTPLLPVKKPGTQDYRPVQDLREINKRTVDIHPTVPNPYNLLSTLKPDYSWYTVLDLKDAFFCLPLAPQSQELFAFEWKDPERGISGQLTWTRLPQGFKNSPTLFNEALHRDLTDFRTQHPEVTLLQYVDDLLLAAPTKKACTQGTRHLLQELGEKGYRASAKKAQICQTKVTYLGYILSEGKRWLTPGRIETVARIPPPRNPREVREFLGTAGFCRLWIPGFAELAAPLYALTKPSTPFTWQTEHQLAFEALKKALLSAPALGLPDTSKPFTLFLDERQGIAKGVLTQKLGPWKRPVAYLSKKLDPVAAGWPPCLRIMAATAMLVKDSAKLTLGQPLTVITPHTLEAIVRQPPDRWITNARLTHYQALLLDTDRVQFGPPVTLNPATLLPVPENQPSPHDCRQVLAETHGTREDLKDQELPDADHTWYTDGSSYLDSGTRRAGAAVVDGHNTIWAQSLPPGTSAQKAELIALTKALELSKGKKANIYTDSRYAFATAHTHGSIYERRGWLTSEGKEIKNKAEIIALLKALFLPQEVAIIHCPGHQKGQDPVAVGNRQADRVARQAAMAEVLTLATEPDNTSHITAGKRTADGSEFEKRTADGSEFESPKKKAKVE

SEQ ID NO: 6641 - protein, 2168 aa, synthetic construct
MPAAKRVKLDGGDKKYSIGLDIGTNSVGWAVITDEYKVPSKKFKVLGNTDRHSIKKNLIGALLFDSGETAEATRLKRTARRRYTRRKNRICYLQEIFSNEMAKVDDSFFHRLEESFLVEEDKKHERHPIFGNIVDEVAYHEKYPTIYHLRKKLVDSTDKADLRLIYLALAHMIKFRGHFLIEGDLNPDNSDVDKLFIQLVQTYNQLFEENPINASGVDAKAILSARLSKSRRLENLIAQLPGEKKNGLFGNLIALSLGLTPNFKSNFDLAEDAKLQLSKDTYDDDLDNLLAQIGDQYADLFLAAKNLSDAILLSDILRVNTEITKAPLSASMIKRYDEHHQDLTLLKALVRQQLPEKYKEIFFDQSKNGYAGYIDGGASQEEFYKFIKPILEKMDGTEELLVKLNREDLLRKQRTFDNGSIPHQIHLGELHAILRRQEDFYPFLKDNREKIEKILTFRIPYYVGPLARGNSRFAWMTRKSEETITPWNFEEVVDKGASAQSFIERMTNFDKNLPNEKVLPKHSLLYEYFTVYNELTKVKYVTEGMRKPAFLSGEQKKAIVDLLFKTNRKVTVKQLKEDYFKKIECFDSVEISGVEDRFNASLGTYHDLLKIIKDKDFLDNEENEDILEDIVLTLTLFEDREMIEERLKTYAHLFDDKVMKQLKRRRYTGWGRLSRKLINGIRDKQSGKTILDFLKSDGFANRNFMQLIHDDSLTFKEDIQKAQVSGQGDSLHEHIANLAGSPAIKKGILQTVKVVDELVKVMGRHKPENIVIEMARENQTTQKGQKNSRERMKRIEEGIKELGSQILKEHPVENTQLQNEKLYLYYLQNGRDMYVDQELDINRLSDYDVDHIVPQSFLKDDSIDNKVLTRSDKARGKSDNVPSEEVVKKMKNYWRQLLNAKLITQRKFDNLTKAERGGLSELDKAGFIKRQLVETRQITKHVAQILDSRMNTKYDENDKLIREVKVITLKSKLVSDFRKDFQFYKVREINNYHHAHDAYLNAVVGTALIKKYPKLESEFVYGDYKVYDVRKMIAKSEQEIGKATAKYFFYSNIMNFFKTEITLANGEIRKRPLIETNGETGEIVWDKGRDFATVRKVLSMPQVNIVKKTEVQTGGFSKESILPKRNSDKLIARKKDWDPKKYGGFDSPTVAYSVLVVAKVEKGKSKKLKSVKELLGITIMERSSFEKNPIDFLEAKGYKEVKKDLIIKLPKYSLFELENGRKRMLASAGELQKGNELALPSKYVNFLYLASHYEKLKGSPEDNEQKQLFVEQHKHYLDEIIEQISEFSKRVILADANLDKVLSAYNKHRDKPIREQAENIIHLFTLTNLGAPAAFKYFDTTIDRKRYTSTKEVLDATLIHQSITGLYETRIDLSQLGGDGGGGSPAPGGMDLLKPLTVERKGVKIKGYWNSQADITCVPKDLLQGEEPVRQQNVTTIHGTQEGDVYYVNLKIDGRRINTEVIGTTLDYAIITPGDVPWILKKPLELTIKLDLEEQQGTLLNNSILSKKGKEELKQLFEKYSALWQSWENQVGHRRIRPHKIATGTVKPTPQKQYHINPKAKPDIQIVINDLLKQGVLIQKESTMNTPVYPVPKPNGRWRMVLDYRAVNKVTPLIAVQNQHSYGILGSLFKGRYKTTIDLSNGFWAHPIVPEDYWITAFTWQGKQYCWTVLPQGFLNSPGLFNGDVVDLLQGIPNVEVYVDDVYISHDSEKEHLEYLDILFNRLKEAGYIISLKKSNIANSIVDFLGFQITNEGRGLTDTFKEKLENITAPTTLKQLQSILGLLNFARNFIPDFTELIAPLYALIPKSPKNYVPWQIEHSTTLETLITKLNGAEYLQGRKGDKTLIMKVNASYTTGYIRYYNEGEKKPISYVSIVFSKTELKFTELEKLLTTVHKGLLKALDLSMGQNIHVYSPIVSMQNIQKTPQTAKKALASRWLSWLSYLEDPRIRFFYDPQMPALKDLPAVDTGKDNKKHPSNFQHIFYTDGSAITSPTKEGHLNAGMGIVYFINKDGNLQKQQEWSISLGNHTAQFAEIAAFEFALKKCLPLGGNILVVTDSNYVAKAYNEELDVWASNGFVNNRKKPLKHISKWKSVADLKRLRPDVVVTHEPGHQKLDSSPHAYGNNLADQLATQASFKVHAGKRTADGSEFEKRTADGSEFESPKKKAKVE

SEQ ID NO: 6642 - protein, 2090 aa, synthetic construct
MPAAKRVKLDGGDKKYSIGLDIGTNSVGWAVITDEYKVPSKKFKVLGNTDRHSIKKNLIGALLFDSGETAEATRLKRTARRRYTRRKNRICYLQEIFSNEMAKVDDSFFHRLEESFLVEEDKKHERHPIFGNIVDEVAYHEKYPTIYHLRKKLVDSTDKADLRLIYLALAHMIKFRGHFLIEGDLNPDNSDVDKLFIQLVQTYNQLFEENPINASGVDAKAILSARLSKSRRLENLIAQLPGEKKNGLFGNLIALSLGLTPNFKSNFDLAEDAKLQLSKDTYDDDLDNLLAQIGDQYADLFLAAKNLSDAILLSDILRVNTEITKAPLSASMIKRYDEHHQDLTLLKALVRQQLPEKYKEIFFDQSKNGYAGYIDGGASQEEFYKFIKPILEKMDGTEELLVKLNREDLLRKQRTFDNGSIPHQIHLGELHAILRRQEDFYPFLKDNREKIEKILTFRIPYYVGPLARGNSRFAWMTRKSEETITPWNFEEVVDKGASAQSFIERMTNFDKNLPNEKVLPKHSLLYEYFTVYNELTKVKYVTEGMRKPAFLSGEQKKAIVDLLFKTNRKVTVKQLKEDYFKKIECFDSVEISGVEDRFNASLGTYHDLLKIIKDKDFLDNEENEDILEDIVLTLTLFEDREMIEERLKTYAHLFDDKVMKQLKRRRYTGWGRLSRKLINGIRDKQSGKTILDFLKSDGFANRNFMQLIHDDSLTFKEDIQKAQVSGQGDSLHEHIANLAGSPAIKKGILQTVKVVDELVKVMGRHKPENIVIEMARENQTTQKGQKNSRERMKRIEEGIKELGSQILKEHPVENTQLQNEKLYLYYLQNGRDMYVDQELDINRLSDYDVDHIVPQSFLKDDSIDNKVLTRSDKARGKSDNVPSEEVVKKMKNYWRQLLNAKLITQRKFDNLTKAERGGLSELDKAGFIKRQLVETRQITKHVAQILDSRMNTKYDENDKLIREVKVITLKSKLVSDFRKDFQFYKVREINNYHHAHDAYLNAVVGTALIKKYPKLESEFVYGDYKVYDVRKMIAKSEQEIGKATAKYFFYSNIMNFFKTEITLANGEIRKRPLIETNGETGEIVWDKGRDFATVRKVLSMPQVNIVKKTEVQTGGFSKESILPKRNSDKLIARKKDWDPKKYGGFDSPTVAYSVLVVAKVEKGKSKKLKSVKELLGITIMERSSFEKNPIDFLEAKGYKEVKKDLIIKLPKYSLFELENGRKRMLASAGELQKGNELALPSKYVNFLYLASHYEKLKGSPEDNEQKQLFVEQHKHYLDEIIEQISEFSKRVILADANLDKVLSAYNKHRDKPIREQAENIIHLFTLTNLGAPAAFKYFDTTIDRKRYTSTKEVLDATLIHQSITGLYETRIDLSQLGGDGGGGSPAPGGTLQLEEEYRLFEPESTQKQEMDIWLKNFPQAWAETGGMGTAHCQAPVLIQLKATATPISIRQYPMPHEAYQGIKPHIRRMLDQGILKPCQSPWNTPLLPVKKPGTEDYRPVQDLREVNKRVEDIHPTVPNPYNLLSTLPPSHPWYTVLDLKDAFFCLRLHSESQLLFAFEWRDPEIGLSGQLTWTRLPQGFKNSPTLFNEALHSDLADFRVRYPALVLLQYVDDLLLAAATRTECLEGTKALLETLGNKGYRASAKKAQICLQEVTYLGYSLKDGQRWLTKARKEAILSIPVPKNSRQVREFLGKAGYCRLFIPGFAELAAPLYPLTRPGTLFQWGTEQQLAFEDIKKALLSSPALGLPDITKPFELFIDENSGFAKGVLVQKLGPWKRPVAYLSKKLDTVASGWPPCLRMVAAIAILVKDAGKLTLGQPLTILTSHPVEALVRQPPNKWLSNARMTHYQAMLLDAERVHFGPTVSLNPATLLPLPSGGNHHDCLQILAETHGTRPDLTDQPLPDADLTWYTDGSSFIRNGEREAGAAVTTESEVIWAAPLPPGTSAQRAELIALTQALKMAEGKKLTVYTDSRYAFATTHVHGEIYRRRGWLTSEGKEIKNKNEILALLEALFLPKRLSIIHCPGHQKGDSPQAKGNRLADDTAKKAATETHSSLTVLPAGKRTADGSEFEKRTADGSEFESPKKKAKVE

SEQ ID NO: 6643 - protein, 2171 aa, synthetic construct
MPAAKRVKLDGGDKKYSIGLDIGTNSVGWAVITDEYKVPSKKFKVLGNTDRHSIKKNLIGALLFDSGETAEATRLKRTARRRYTRRKNRICYLQEIFSNEMAKVDDSFFHRLEESFLVEEDKKHERHPIFGNIVDEVAYHEKYPTIYHLRKKLVDSTDKADLRLIYLALAHMIKFRGHFLIEGDLNPDNSDVDKLFIQLVQTYNQLFEENPINASGVDAKAILSARLSKSRRLENLIAQLPGEKKNGLFGNLIALSLGLTPNFKSNFDLAEDAKLQLSKDTYDDDLDNLLAQIGDQYADLFLAAKNLSDAILLSDILRVNTEITKAPLSASMIKRYDEHHQDLTLLKALVRQQLPEKYKEIFFDQSKNGYAGYIDGGASQEEFYKFIKPILEKMDGTEELLVKLNREDLLRKQRTFDNGSIPHQIHLGELHAILRRQEDFYPFLKDNREKIEKILTFRIPYYVGPLARGNSRFAWMTRKSEETITPWNFEEVVDKGASAQSFIERMTNFDKNLPNEKVLPKHSLLYEYFTVYNELTKVKYVTEGMRKPAFLSGEQKKAIVDLLFKTNRKVTVKQLKEDYFKKIECFDSVEISGVEDRFNASLGTYHDLLKIIKDKDFLDNEENEDILEDIVLTLTLFEDREMIEERLKTYAHLFDDKVMKQLKRRRYTGWGRLSRKLINGIRDKQSGKTILDFLKSDGFANRNFMQLIHDDSLTFKEDIQKAQVSGQGDSLHEHIANLAGSPAIKKGILQTVKVVDELVKVMGRHKPENIVIEMARENQTTQKGQKNSRERMKRIEEGIKELGSQILKEHPVENTQLQNEKLYLYYLQNGRDMYVDQELDINRLSDYDVDHIVPQSFLKDDSIDNKVLTRSDKARGKSDNVPSEEVVKKMKNYWRQLLNAKLITQRKFDNLTKAERGGLSELDKAGFIKRQLVETRQITKHVAQILDSRMNTKYDENDKLIREVKVITLKSKLVSDFRKDFQFYKVREINNYHHAHDAYLNAVVGTALIKKYPKLESEFVYGDYKVYDVRKMIAKSEQEIGKATAKYFFYSNIMNFFKTEITLANGEIRKRPLIETNGETGEIVWDKGRDFATVRKVLSMPQVNIVKKTEVQTGGFSKESILPKRNSDKLIARKKDWDPKKYGGFDSPTVAYSVLVVAKVEKGKSKKLKSVKELLGITIMERSSFEKNPIDFLEAKGYKEVKKDLIIKLPKYSLFELENGRKRMLASAGELQKGNELALPSKYVNFLYLASHYEKLKGSPEDNEQKQLFVEQHKHYLDEIIEQISEFSKRVILADANLDKVLSAYNKHRDKPIREQAENIIHLFTLTNLGAPAAFKYFDTTIDRKRYTSTKEVLDATLIHQSITGLYETRIDLSQLGGDGGGGSPAPGGMNPLQLLQPLPAEIKGTKLLAHWNSGATITCIPESFLEDEQPIKKTLIKTIHGEKQQNVYYVTFKVKGRKVEAEVIASPYEYILLSPTDVPWLTQQPLQLTILVPLQEYQEKILSKTALPEDQKQQLKTLFVKYDNLWQHWENQVGHRKIRPHNIATGDYPPRPQKQYPINPKAKPSIQIVIDDLLKQGVLTPQNSTMNTPVYPVPKPDGRWRMVLDYREVNKTIPLTAAQNQHSAGILATIVRQKYKTTLDLANGFWAHPITPESYWLTAFTWQGKQYCWTRLPQGFLNSPALFNADVVDLLKEIPNVQVYVDDIYLSHDDPKEHVQQLEKVFQILLQAGYVVSLKKSEIGQKTVEFLGFNITKEGRGLTDTFKTKLLNITPPKDLKQLQSILGKLNFARNFIPNFAELVQPLYNLIAPAKGKYIEWSEENTKQLNMVIEALNTASNLEERLPEQRLVIKVNTSPSAGYVRYYNETGKKPIMYLNYVFSKAELKFSMLEKLLTTMHKALIKAMDLAMGQEILVYSPIVSMTKIQKTPLPERKALPIRWITWMTYLEDPRIQFHYDKTLPELKHIPDVYTSSQSPVKHPSQYEGVFYTDGSAIKSPDPTKSNNAGMGIVHATYKPEYQVLNQWSIPLGNHTAQMAEIAAVEFACKKALKIPGPVLVITDSFYVAESANKELPYWKSNGFVNNKKKPLKHISKWKSIAECLSMKPDITIQHEKGISLQIPVFILKGNALADKLATQGSYVVNAGKRTADGSEFEKRTADGSEFESPKKKAKVE

SEQ ID NO: 6644 - protein, 2089 aa, synthetic construct
MPAAKRVKLDGGDKKYSIGLDIGTNSVGWAVITDEYKVPSKKFKVLGNTDRHSIKKNLIGALLFDSGETAEATRLKRTARRRYTRRKNRICYLQEIFSNEMAKVDDSFFHRLEESFLVEEDKKHERHPIFGNIVDEVAYHEKYPTIYHLRKKLVDSTDKADLRLIYLALAHMIKFRGHFLIEGDLNPDNSDVDKLFIQLVQTYNQLFEENPINASGVDAKAILSARLSKSRRLENLIAQLPGEKKNGLFGNLIALSLGLTPNFKSNFDLAEDAKLQLSKDTYDDDLDNLLAQIGDQYADLFLAAKNLSDAILLSDILRVNTEITKAPLSASMIKRYDEHHQDLTLLKALVRQQLPEKYKEIFFDQSKNGYAGYIDGGASQEEFYKFIKPILEKMDGTEELLVKLNREDLLRKQRTFDNGSIPHQIHLGELHAILRRQEDFYPFLKDNREKIEKILTFRIPYYVGPLARGNSRFAWMTRKSEETITPWNFEEVVDKGASAQSFIERMTNFDKNLPNEKVLPKHSLLYEYFTVYNELTKVKYVTEGMRKPAFLSGEQKKAIVDLLFKTNRKVTVKQLKEDYFKKIECFDSVEISGVEDRFNASLGTYHDLLKIIKDKDFLDNEENEDILEDIVLTLTLFEDREMIEERLKTYAHLFDDKVMKQLKRRRYTGWGRLSRKLINGIRDKQSGKTILDFLKSDGFANRNFMQLIHDDSLTFKEDIQKAQVSGQGDSLHEHIANLAGSPAIKKGILQTVKVVDELVKVMGRHKPENIVIEMARENQTTQKGQKNSRERMKRIEEGIKELGSQILKEHPVENTQLQNEKLYLYYLQNGRDMYVDQELDINRLSDYDVDHIVPQSFLKDDSIDNKVLTRSDKARGKSDNVPSEEVVKKMKNYWRQLLNAKLITQRKFDNLTKAERGGLSELDKAGFIKRQLVETRQITKHVAQILDSRMNTKYDENDKLIREVKVITLKSKLVSDFRKDFQFYKVREINNYHHAHDAYLNAVVGTALIKKYPKLESEFVYGDYKVYDVRKMIAKSEQEIGKATAKYFFYSNIMNFFKTEITLANGEIRKRPLIETNGETGEIVWDKGRDFATVRKVLSMPQVNIVKKTEVQTGGFSKESILPKRNSDKLIARKKDWDPKKYGGFDSPTVAYSVLVVAKVEKGKSKKLKSVKELLGITIMERSSFEKNPIDFLEAKGYKEVKKDLIIKLPKYSLFELENGRKRMLASAGELQKGNELALPSKYVNFLYLASHYEKLKGSPEDNEQKQLFVEQHKHYLDEIIEQISEFSKRVILADANLDKVLSAYNKHRDKPIREQAENIIHLFTLTNLGAPAAFKYFDTTIDRKRYTSTKEVLDATLIHQSITGLYETRIDLSQLGGDGGGGSPAPGGVLNLEEEYRLHEKPVPSSIDPSWLQLFPTVWAERAGMGLANQVPPVVVELRSGASPVAVRQYPMSKEAREGIRPHIQKFLDLGVLVPCRSPWNTPLLPVKKPGTNDYRPVQDLREINKRVQDIHPTVPNPYNLLSSLPPSYTWYSVLDLKDAFFCLRLHPNSQPLFAFEWKDPEKGNTGQLTWTRLPQGFKNSPTLFNEALHRDLAPFRALNPQVVLLQYVDDLLVAAPTYEDCKKGTQKLLQELSKLGYRVSAKKAQLCQREVTYLGYLLKEGKRWLTPARKATVMKIPVPTTPRQVREFLGTAGFCRLWIPGFASLAAPLYPLTKPSIPFIWTEEHQQAFDHIKKALLSAPALALPDLTKPFTLYIDERAGVARGVLTQTLGPWRRPVAYLSKKLDPVASGWPTCLKAVAAVALLLKDADKLTLGQNVTVIASHSLESIVRQPPDRWMTNARMTHYQSLLLNERVSFAPPAVLNPATLLPVESEATPVHRCSEILAEETGTRRDLEDQPLPGVPTWYTDGSSFITEGKRRAGAPIVDGKRTVWASSLPEGTSAQKAELVALTQALRLAEGKNINIYTDSRYAFATAHIHGAIYKQRGWLTSAGKDIKNKEEILALLEAIHLPRRVAIIHCPGHQRGSNPVATGNRRADEAAKQAALSTRVLAGTTKPAGKRTADGSEFEKRTADGSEFESPKKKAKVE

SEQ ID NO: 6645 - protein, 2213 aa, synthetic construct
MPAAKRVKLDGGDKKYSIGLDIGTNSVGWAVITDEYKVPSKKFKVLGNTDRHSIKKNLIGALLFDSGETAEATRLKRTARRRYTRRKNRICYLQEIFSNEMAKVDDSFFHRLEESFLVEEDKKHERHPIFGNIVDEVAYHEKYPTIYHLRKKLVDSTDKADLRLIYLALAHMIKFRGHFLIEGDLNPDNSDVDKLFIQLVQTYNQLFEENPINASGVDAKAILSARLSKSRRLENLIAQLPGEKKNGLFGNLIALSLGLTPNFKSNFDLAEDAKLQLSKDTYDDDLDNLLAQIGDQYADLFLAAKNLSDAILLSDILRVNTEITKAPLSASMIKRYDEHHQDLTLLKALVRQQLPEKYKEIFFDQSKNGYAGYIDGGASQEEFYKFIKPILEKMDGTEELLVKLNREDLLRKQRTFDNGSIPHQIHLGELHAILRRQEDFYPFLKDNREKIEKILTFRIPYYVGPLARGNSRFAWMTRKSEETITPWNFEEVVDKGASAQSFIERMTNFDKNLPNEKVLPKHSLLYEYFTVYNELTKVKYVTEGMRKPAFLSGEQKKAIVDLLFKTNRKVTVKQLKEDYFKKIECFDSVEISGVEDRFNASLGTYHDLLKIIKDKDFLDNEENEDILEDIVLTLTLFEDREMIEERLKTYAHLFDDKVMKQLKRRRYTGWGRLSRKLINGIRDKQSGKTILDFLKSDGFANRNFMQLIHDDSLTFKEDIQKAQVSGQGDSLHEHIANLAGSPAIKKGILQTVKVVDELVKVMGRHKPENIVIEMARENQTTQKGQKNSRERMKRIEEGIKELGSQILKEHPVENTQLQNEKLYLYYLQNGRDMYVDQELDINRLSDYDVDHIVPQSFLKDDSIDNKVLTRSDKARGKSDNVPSEEVVKKMKNYWRQLLNAKLITQRKFDNLTKAERGGLSELDKAGFIKRQLVETRQITKHVAQILDSRMNTKYDENDKLIREVKVITLKSKLVSDFRKDFQFYKVREINNYHHAHDAYLNAVVGTALIKKYPKLESEFVYGDYKVYDVRKMIAKSEQEIGKATAKYFFYSNIMNFFKTEITLANGEIRKRPLIETNGETGEIVWDKGRDFATVRKVLSMPQVNIVKKTEVQTGGFSKESILPKRNSDKLIARKKDWDPKKYGGFDSPTVAYSVLVVAKVEKGKSKKLKSVKELLGITIMERSSFEKNPIDFLEAKGYKEVKKDLIIKLPKYSLFELENGRKRMLASAGELQKGNELALPSKYVNFLYLASHYEKLKGSPEDNEQKQLFVEQHKHYLDEIIEQISEFSKRVILADANLDKVLSAYNKHRDKPIREQAENIIHLFTLTNLGAPAAFKYFDTTIDRKRYTSTKEVLDATLIHQSITGLYETRIDLSQLGGDGGGGSPAPGGTLGDQGSRGSDPLPEPRVTLTVEGIPTEFLVNTGAEHSVLTKPMGKMGSKRTVVAGATGSKVYPWTTKRLLKIGQKQVTHSFLVIPECPAPLLGRDLLTKLKAQIQFSTEGPQVTWEDRPAMCLVLNLEEEYRLHEKPVPPSIDPSWLQLFPMVWAEKAGMGLANQVPPVVVELKSDASPVAVRQYPMSKEAREGIRPHIQRFLDLGILVPCQSPWNTPLLPVKKPGTNDYRPVQDLREVNKRVQDIHPTVPNPYNLLSSLPPSHTWYSVLDLKDAFFCLKLHPNSQPLFAFEWRDPEKGNTGQLTWTRLPQGFKNSPTLFNEALHRDLASFRALNPQVVMLQYVDDLLVAAPTYRDCKEGTRRLLQELSKLGYRVSAKKAQLCREEVTYLGYLLKGGKRWLTPARKATVMKIPTPTTPRQVREFLGTAGFCRLWIPGFASLAAPLYPLTRPKVPFTWTEAHQEAFGRIKEALLSAPALALPDLTKPFALYVDEKEGVARGVLTQTLGPWRRPVAYLSKKLDPVASGWPTCLKAIAAVALLLKDADKLTLGQNVLVIAPHNLESIVRQPPDRWMTNARMTHYQSLLLNERVSFAPPAILNPATLLPVESDDTPIHICSEILAEETGTRPDLRDQPLPGVPAWYTDGSSFIMDGRRQAGAAIVDNKRTVWASNLPEGTSAQKAELIALTQALRLAEGKSINIYTDSRYAFATAHVHGAIYKQRGWLTSAGKDIKNKEEILALLEAIHLPKRVAIIHCPGHQRGTDPVATGNRKADEAAKQAAQSTRILTETTKNAGKRTADGSEFEKRTADGSEFESPKKKAKVE

SEQ ID NO: 6646 - protein, 2213 aa, synthetic construct
MPAAKRVKLDGGDKKYSIGLDIGTNSVGWAVITDEYKVPSKKFKVLGNTDRHSIKKNLIGALLFDSGETAEATRLKRTARRRYTRRKNRICYLQEIFSNEMAKVDDSFFHRLEESFLVEEDKKHERHPIFGNIVDEVAYHEKYPTIYHLRKKLVDSTDKADLRLIYLALAHMIKFRGHFLIEGDLNPDNSDVDKLFIQLVQTYNQLFEENPINASGVDAKAILSARLSKSRRLENLIAQLPGEKKNGLFGNLIALSLGLTPNFKSNFDLAEDAKLQLSKDTYDDDLDNLLAQIGDQYADLFLAAKNLSDAILLSDILRVNTEITKAPLSASMIKRYDEHHQDLTLLKALVRQQLPEKYKEIFFDQSKNGYAGYIDGGASQEEFYKFIKPILEKMDGTEELLVKLNREDLLRKQRTFDNGSIPHQIHLGELHAILRRQEDFYPFLKDNREKIEKILTFRIPYYVGPLARGNSRFAWMTRKSEETITPWNFEEVVDKGASAQSFIERMTNFDKNLPNEKVLPKHSLLYEYFTVYNELTKVKYVTEGMRKPAFLSGEQKKAIVDLLFKTNRKVTVKQLKEDYFKKIECFDSVEISGVEDRFNASLGTYHDLLKIIKDKDFLDNEENEDILEDIVLTLTLFEDREMIEERLKTYAHLFDDKVMKQLKRRRYTGWGRLSRKLINGIRDKQSGKTILDFLKSDGFANRNFMQLIHDDSLTFKEDIQKAQVSGQGDSLHEHIANLAGSPAIKKGILQTVKVVDELVKVMGRHKPENIVIEMARENQTTQKGQKNSRERMKRIEEGIKELGSQILKEHPVENTQLQNEKLYLYYLQNGRDMYVDQELDINRLSDYDVDHIVPQSFLKDDSIDNKVLTRSDKARGKSDNVPSEEVVKKMKNYWRQLLNAKLITQRKFDNLTKAERGGLSELDKAGFIKRQLVETRQITKHVAQILDSRMNTKYDENDKLIREVKVITLKSKLVSDFRKDFQFYKVREINNYHHAHDAYLNAVVGTALIKKYPKLESEFVYGDYKVYDVRKMIAKSEQEIGKATAKYFFYSNIMNFFKTEITLANGEIRKRPLIETNGETGEIVWDKGRDFATVRKVLSMPQVNIVKKTEVQTGGFSKESILPKRNSDKLIARKKDWDPKKYGGFDSPTVAYSVLVVAKVEKGKSKKLKSVKELLGITIMERSSFEKNPIDFLEAKGYKEVKKDLIIKLPKYSLFELENGRKRMLASAGELQKGNELALPSKYVNFLYLASHYEKLKGSPEDNEQKQLFVEQHKHYLDEIIEQISEFSKRVILADANLDKVLSAYNKHRDKPIREQAENIIHLFTLTNLGAPAAFKYFDTTIDRKRYTSTKEVLDATLIHQSITGLYETRIDLSQLGGDGGGGSPAPGGTLGDQGSRGSDPLPEPRVTLTVEGIPTEFLVNTGAEHSVLTKPMGKMGSKRTVVAGATGSKVYPWTTKRLLKIGQKQVTHSFLVIPECPAPLLGRDLLTKLKAQIQFSTEGPQVTWEDRPAMCLVLNLEEEYRLHEKPVPPSIDPSWLQLFPMVWAEKAGMGLANQVPPVVVELKSDASPVAVRQYPMSKEAREGIRPHIQRFLDLGILVPCQSPWNTPLLPVKKPGTNDYRPVQDLREVNKRVQDIHPTVPNPYNLLSSLPPSHTWYSVLDLKDAFFCLKLHPNSQPLFAFEWRDPEKGNTGQLTWTRLPQGFKNSPTLFNEALHRDLASFRALNPQVVMLQYVDDLLVAAPTYRDCKEGTRRLLQELSKLGYRVSAKKAQLCREEVTYLGYLLKGGKRWLTPARKATVMKIPTPTTPRQVREFLGKAGFCRLFIPGFASLAAPLYPLTRPKVPFTWTEAHQEAFGRIKEALLSAPALALPDLTKPFALYVDEKEGVARGVLTQTLGPWRRPVAYLSKKLDPVASGWPTCLKAIAAVALLLKDADKLTLGQNVLVIAPHNLESIVRQPPDRWMTNARMTHYQSLLLNERVSFAPPAILNPATLLPVESDDTPIHICSEILAEETGTRPDLRDQPLPGVPAWYTDGSSFIMDGRRQAGAAIVDNKRTVWASNLPEGTSAQKAELIALTQALRLAEGKSINIYTDSRYAFATAHVHGAIYKQRGWLTSAGKDIKNKEEILALLEAIHLPKRVAIIHCPGHQRGTDPVATGNRKADEAAKQAAQSTRILTETTKNAGKRTADGSEFEKRTADGSEFESPKKKAKVE

SEQ ID NO: 6647 - protein, 2091 aa, synthetic construct
MPAAKRVKLDGGDKKYSIGLDIGTNSVGWAVITDEYKVPSKKFKVLGNTDRHSIKKNLIGALLFDSGETAEATRLKRTARRRYTRRKNRICYLQEIFSNEMAKVDDSFFHRLEESFLVEEDKKHERHPIFGNIVDEVAYHEKYPTIYHLRKKLVDSTDKADLRLIYLALAHMIKFRGHFLIEGDLNPDNSDVDKLFIQLVQTYNQLFEENPINASGVDAKAILSARLSKSRRLENLIAQLPGEKKNGLFGNLIALSLGLTPNFKSNFDLAEDAKLQLSKDTYDDDLDNLLAQIGDQYADLFLAAKNLSDAILLSDILRVNTEITKAPLSASMIKRYDEHHQDLTLLKALVRQQLPEKYKEIFFDQSKNGYAGYIDGGASQEEFYKFIKPILEKMDGTEELLVKLNREDLLRKQRTFDNGSIPHQIHLGELHAILRRQEDFYPFLKDNREKIEKILTFRIPYYVGPLARGNSRFAWMTRKSEETITPWNFEEVVDKGASAQSFIERMTNFDKNLPNEKVLPKHSLLYEYFTVYNELTKVKYVTEGMRKPAFLSGEQKKAIVDLLFKTNRKVTVKQLKEDYFKKIECFDSVEISGVEDRFNASLGTYHDLLKIIKDKDFLDNEENEDILEDIVLTLTLFEDREMIEERLKTYAHLFDDKVMKQLKRRRYTGWGRLSRKLINGIRDKQSGKTILDFLKSDGFANRNFMQLIHDDSLTFKEDIQKAQVSGQGDSLHEHIANLAGSPAIKKGILQTVKVVDELVKVMGRHKPENIVIEMARENQTTQKGQKNSRERMKRIEEGIKELGSQILKEHPVENTQLQNEKLYLYYLQNGRDMYVDQELDINRLSDYDVDHIVPQSFLKDDSIDNKVLTRSDKARGKSDNVPSEEVVKKMKNYWRQLLNAKLITQRKFDNLTKAERGGLSELDKAGFIKRQLVETRQITKHVAQILDSRMNTKYDENDKLIREVKVITLKSKLVSDFRKDFQFYKVREINNYHHAHDAYLNAVVGTALIKKYPKLESEFVYGDYKVYDVRKMIAKSEQEIGKATAKYFFYSNIMNFFKTEITLANGEIRKRPLIETNGETGEIVWDKGRDFATVRKVLSMPQVNIVKKTEVQTGGFSKESILPKRNSDKLIARKKDWDPKKYGGFDSPTVAYSVLVVAKVEKGKSKKLKSVKELLGITIMERSSFEKNPIDFLEAKGYKEVKKDLIIKLPKYSLFELENGRKRMLASAGELQKGNELALPSKYVNFLYLASHYEKLKGSPEDNEQKQLFVEQHKHYLDEIIEQISEFSKRVILADANLDKVLSAYNKHRDKPIREQAENIIHLFTLTNLGAPAAFKYFDTTIDRKRYTSTKEVLDATLIHQSITGLYETRIDLSQLGGDGGGGSPAPGGTLNIEDEYRLHETSKEPDVSLGSTWLSDFPQAWAETGGMGLAVRQAPLIIPLKATSTPVSIKQYPMSQEARLGIKPHIQRLLDQGILVPCQSPWNTPLLPVKKPGTNDYRPVQDLREVNKRVEDIHPTVPNPYNLLSGLPPSHQWYTVLDLKDAFFCLRLHPTSQPLFAFEWRDPEMGISGQLTWTRLPQGFKNSPTLFNEALHRDLAGFRIQHPDLILLQYVDDLLLAATSELDCQQGTRALLQTLGDLGYRASAKKAQICQKQVKYLGYLLKEGQRWLTEARKETVMGQPIPKTPRQLREFLGTAGFCRLWIPGFAEMAAPLYPLTKPGTLFNWGPDQQKAFQEIKQALLTAPALGLPDLTKPFELFVDEKQGYAKGVLTQKLGPWRRPVAYLSKKLDPVAAGWPPCLRMVAAIAVLTKDAGKLTMGQPLVILAPHAVEALVKQPPDRWLSNARMTHYQALLLDTDRVQFGPVVALNPATLLPLPEEGLQHDCLDILAEAHGTRSDLMDQPLPDADHTWYTDGSSFLQEGQRKAGAAVTTETEVIWARALPAGTSAQRAELIALTQALKMAEGKKLNVYTDSRYAFATAHIHGEIYRRRGWLTSEGKEIKNKDEILALLKALFLPKRLSIIHCPGHQKGNSAEARGNRMADQAAREVATRETPETSTLLAGKRTADGSEFEKRTADGSEFESPKKKAKVE

SEQ ID NO: 6648 - protein, 2091 aa, synthetic construct
MPAAKRVKLDGGDKKYSIGLDIGTNSVGWAVITDEYKVPSKKFKVLGNTDRHSIKKNLIGALLFDSGETAEATRLKRTARRRYTRRKNRICYLQEIFSNEMAKVDDSFFHRLEESFLVEEDKKHERHPIFGNIVDEVAYHEKYPTIYHLRKKLVDSTDKADLRLIYLALAHMIKFRGHFLIEGDLNPDNSDVDKLFIQLVQTYNQLFEENPINASGVDAKAILSARLSKSRRLENLIAQLPGEKKNGLFGNLIALSLGLTPNFKSNFDLAEDAKLQLSKDTYDDDLDNLLAQIGDQYADLFLAAKNLSDAILLSDILRVNTEITKAPLSASMIKRYDEHHQDLTLLKALVRQQLPEKYKEIFFDQSKNGYAGYIDGGASQEEFYKFIKPILEKMDGTEELLVKLNREDLLRKQRTFDNGSIPHQIHLGELHAILRRQEDFYPFLKDNREKIEKILTFRIPYYVGPLARGNSRFAWMTRKSEETITPWNFEEVVDKGASAQSFIERMTNFDKNLPNEKVLPKHSLLYEYFTVYNELTKVKYVTEGMRKPAFLSGEQKKAIVDLLFKTNRKVTVKQLKEDYFKKIECFDSVEISGVEDRFNASLGTYHDLLKIIKDKDFLDNEENEDILEDIVLTLTLFEDREMIEERLKTYAHLFDDKVMKQLKRRRYTGWGRLSRKLINGIRDKQSGKTILDFLKSDGFANRNFMQLIHDDSLTFKEDIQKAQVSGQGDSLHEHIANLAGSPAIKKGILQTVKVVDELVKVMGRHKPENIVIEMARENQTTQKGQKNSRERMKRIEEGIKELGSQILKEHPVENTQLQNEKLYLYYLQNGRDMYVDQELDINRLSDYDVDHIVPQSFLKDDSIDNKVLTRSDKARGKSDNVPSEEVVKKMKNYWRQLLNAKLITQRKFDNLTKAERGGLSELDKAGFIKRQLVETRQITKHVAQILDSRMNTKYDENDKLIREVKVITLKSKLVSDFRKDFQFYKVREINNYHHAHDAYLNAVVGTALIKKYPKLESEFVYGDYKVYDVRKMIAKSEQEIGKATAKYFFYSNIMNFFKTEITLANGEIRKRPLIETNGETGEIVWDKGRDFATVRKVLSMPQVNIVKKTEVQTGGFSKESILPKRNSDKLIARKKDWDPKKYGGFDSPTVAYSVLVVAKVEKGKSKKLKSVKELLGITIMERSSFEKNPIDFLEAKGYKEVKKDLIIKLPKYSLFELENGRKRMLASAGELQKGNELALPSKYVNFLYLASHYEKLKGSPEDNEQKQLFVEQHKHYLDEIIEQISEFSKRVILADANLDKVLSAYNKHRDKPIREQAENIIHLFTLTNLGAPAAFKYFDTTIDRKRYTSTKEVLDATLIHQSITGLYETRIDLSQLGGDGGGGSPAPGGTLNIEDEYRLHETSKGPDVPLGSTWLSDFPQAWAETGGMGLAVRQAPLIIPLKATSTPVSIKQYPMSQEARLGIKPHIQRLLDQGILVPCQSPWNTPLLPVKKPGTNDYRPVQDLREVNKRVEDIHPTVPNPYNLLSGLPPSHQWYTVLDLKDAFFCLRLHPTSQSLFAFEWRDPEMGISGQLTWTRLPQGFKNSPTLFNEALHRDLADFRIQHPDLILLQYVDDLLLAATSELDCQQGTRALLQTLGDLGYRASAKKAQICQKQVKYLGYLLKEGQRWLTEARKETVMGQPTPKTPRQLREFLGKAGFCRLFIPGFAEMAAPLYPLTKPGTLFEWGPDQQKAYQEIKQALLTAPALGLPDLTKPFELFVDEKQGYAKGVLTQKLGPWRRPVAYLSKKLDPVAAGWPPCLRMVAAIAVLTKDAGKLTMGQPLVILAPHAVEALVKQPPDRWLSNARMTHYQALLLDTDRVQFGPIVALNPATLLPLPEEGLQHDCLDILAEAHGTRPDLTDQPLPDADHTWYTDGSSFLQEGQRKAGAAVTTETEVVWAKALPAGTSAQRAELIALTQALKMAEGKKLNVYTDSRYAFATAHIHGEIYRRRGWLTSEGKEIKNKDEILALLKALFLPKRLSIIHCPGHQKGNRAEARGNRMADQAAREVATRETPETSTLLAGKRTADGSEFEKRTADGSEFESPKKKAKVE

SEQ ID NO: 6649 - protein, 2082 aa, synthetic construct
MPAAKRVKLDGGDKKYSIGLDIGTNSVGWAVITDEYKVPSKKFKVLGNTDRHSIKKNLIGALLFDSGETAEATRLKRTARRRYTRRKNRICYLQEIFSNEMAKVDDSFFHRLEESFLVEEDKKHERHPIFGNIVDEVAYHEKYPTIYHLRKKLVDSTDKADLRLIYLALAHMIKFRGHFLIEGDLNPDNSDVDKLFIQLVQTYNQLFEENPINASGVDAKAILSARLSKSRRLENLIAQLPGEKKNGLFGNLIALSLGLTPNFKSNFDLAEDAKLQLSKDTYDDDLDNLLAQIGDQYADLFLAAKNLSDAILLSDILRVNTEITKAPLSASMIKRYDEHHQDLTLLKALVRQQLPEKYKEIFFDQSKNGYAGYIDGGASQEEFYKFIKPILEKMDGTEELLVKLNREDLLRKQRTFDNGSIPHQIHLGELHAILRRQEDFYPFLKDNREKIEKILTFRIPYYVGPLARGNSRFAWMTRKSEETITPWNFEEVVDKGASAQSFIERMTNFDKNLPNEKVLPKHSLLYEYFTVYNELTKVKYVTEGMRKPAFLSGEQKKAIVDLLFKTNRKVTVKQLKEDYFKKIECFDSVEISGVEDRFNASLGTYHDLLKIIKDKDFLDNEENEDILEDIVLTLTLFEDREMIEERLKTYAHLFDDKVMKQLKRRRYTGWGRLSRKLINGIRDKQSGKTILDFLKSDGFANRNFMQLIHDDSLTFKEDIQKAQVSGQGDSLHEHIANLAGSPAIKKGILQTVKVVDELVKVMGRHKPENIVIEMARENQTTQKGQKNSRERMKRIEEGIKELGSQILKEHPVENTQLQNEKLYLYYLQNGRDMYVDQELDINRLSDYDVDHIVPQSFLKDDSIDNKVLTRSDKARGKSDNVPSEEVVKKMKNYWRQLLNAKLITQRKFDNLTKAERGGLSELDKAGFIKRQLVETRQITKHVAQILDSRMNTKYDENDKLIREVKVITLKSKLVSDFRKDFQFYKVREINNYHHAHDAYLNAVVGTALIKKYPKLESEFVYGDYKVYDVRKMIAKSEQEIGKATAKYFFYSNIMNFFKTEITLANGEIRKRPLIETNGETGEIVWDKGRDFATVRKVLSMPQVNIVKKTEVQTGGFSKESILPKRNSDKLIARKKDWDPKKYGGFDSPTVAYSVLVVAKVEKGKSKKLKSVKELLGITIMERSSFEKNPIDFLEAKGYKEVKKDLIIKLPKYSLFELENGRKRMLASAGELQKGNELALPSKYVNFLYLASHYEKLKGSPEDNEQKQLFVEQHKHYLDEIIEQISEFSKRVILADANLDKVLSAYNKHRDKPIREQAENIIHLFTLTNLGAPAAFKYFDTTIDRKRYTSTKEVLDATLIHQSITGLYETRIDLSQLGGDGGGGSPAPGGIPWLMKKPLQLTTLVPLQEYEERLLKQTMLTGSYKEKLQSLFLKYDALWQHWENQVGHRRIKPHHIATGTVNPRPQKQYPINPKAKASIQTVINDLLKQGVLIQQNSIMNTPVYPVPKPDGKWRMVLDYREVNKTIPLIAAQNQHSAGILSSIFRGKYKTTLDLSNGFWAHSITPESYWLTAFTWLGQQYCWTRLPQGFLNSPALFNADVVDLLKEVPNVQVYVDDIYISHDDPREHLEQLEKVFSLLLNAGYVVSLKKSEIAQHEVEFLGFNITKEGRGLTETFKQKLLNITPPRDLKQLQSILGKLNFARNFIPNFSELVKPLYNIIATAPGKYITWTTDNSQQLQNIISMLNSAENLEERNPEVRLIMKVNTSPSAGYIRFYNEFAKRPIMYLNYVYTKAEVKFTNTEKLLTTIHKGLIKALDLGMGQEILVYSPIVSMTKIQKTPLPERKALPIRWITWMSYLEDPRIQFHYDKTLPELQQVPTVTDDIIAKIKHPSEFSMVFYTDGSAIKHPNVNKSHNAGMGIAQVQFKPEFTVINTWSIPLGDHTAQLAEVAAVEFACKKALKIDGPVLIVTDSFYVAESVNKELPYWQSNGFFNNKKKPLKHVSKWKSIADCIQLKPDIIIIHEKGHQPTASTFHTEGNNLADKLATQGSYVVNAGKRTADGSEFEKRTADGSEFESPKKKAKVE

SEQ ID NO: 6650 - protein, 2089 aa, synthetic construct
MPAAKRVKLDGGDKKYSIGLDIGTNSVGWAVITDEYKVPSKKFKVLGNTDRHSIKKNLIGALLFDSGETAEATRLKRTARRRYTRRKNRICYLQEIFSNEMAKVDDSFFHRLEESFLVEEDKKHERHPIFGNIVDEVAYHEKYPTIYHLRKKLVDSTDKADLRLIYLALAHMIKFRGHFLIEGDLNPDNSDVDKLFIQLVQTYNQLFEENPINASGVDAKAILSARLSKSRRLENLIAQLPGEKKNGLFGNLIALSLGLTPNFKSNFDLAEDAKLQLSKDTYDDDLDNLLAQIGDQYADLFLAAKNLSDAILLSDILRVNTEITKAPLSASMIKRYDEHHQDLTLLKALVRQQLPEKYKEIFFDQSKNGYAGYIDGGASQEEFYKFIKPILEKMDGTEELLVKLNREDLLRKQRTFDNGSIPHQIHLGELHAILRRQEDFYPFLKDNREKIEKILTFRIPYYVGPLARGNSRFAWMTRKSEETITPWNFEEVVDKGASAQSFIERMTNFDKNLPNEKVLPKHSLLYEYFTVYNELTKVKYVTEGMRKPAFLSGEQKKAIVDLLFKTNRKVTVKQLKEDYFKKIECFDSVEISGVEDRFNASLGTYHDLLKIIKDKDFLDNEENEDILEDIVLTLTLFEDREMIEERLKTYAHLFDDKVMKQLKRRRYTGWGRLSRKLINGIRDKQSGKTILDFLKSDGFANRNFMQLIHDDSLTFKEDIQKAQVSGQGDSLHEHIANLAGSPAIKKGILQTVKVVDELVKVMGRHKPENIVIEMARENQTTQKGQKNSRERMKRIEEGIKELGSQILKEHPVENTQLQNEKLYLYYLQNGRDMYVDQELDINRLSDYDVDHIVPQSFLKDDSIDNKVLTRSDKARGKSDNVPSEEVVKKMKNYWRQLLNAKLITQRKFDNLTKAERGGLSELDKAGFIKRQLVETRQITKHVAQILDSRMNTKYDENDKLIREVKVITLKSKLVSDFRKDFQFYKVREINNYHHAHDAYLNAVVGTALIKKYPKLESEFVYGDYKVYDVRKMIAKSEQEIGKATAKYFFYSNIMNFFKTEITLANGEIRKRPLIETNGETGEIVWDKGRDFATVRKVLSMPQVNIVKKTEVQTGGFSKESILPKRNSDKLIARKKDWDPKKYGGFDSPTVAYSVLVVAKVEKGKSKKLKSVKELLGITIMERSSFEKNPIDFLEAKGYKEVKKDLIIKLPKYSLFELENGRKRMLASAGELQKGNELALPSKYVNFLYLASHYEKLKGSPEDNEQKQLFVEQHKHYLDEIIEQISEFSKRVILADANLDKVLSAYNKHRDKPIREQAENIIHLFTLTNLGAPAAFKYFDTTIDRKRYTSTKEVLDATLIHQSITGLYETRIDLSQLGGDGGGGSPAPGGVLNLEEEYRLHEKPVPSSIDPSWLQLFPTVWAERAGMGLANQVPPVVVELRSGASPVAVRQYPMSKEAREGIRPHIQRFLDLGVLVPCQSPWNTPLLPVKKPGTNDYRPVQDLREINKRVQDIHPTVPNPYNLLSSLPPSHTWYSVLDLKDAFFCLKLHPNSQPLFAFEWRDPEKGNTGQLTWTRLPQGFKNSPTLFNEALHRDLAPFRALNPQVVLLQYVDDLLVAAPTYRDCKEGTQKLLQELSKLGYRVSAKKAQLCQKEVTYLGYLLKEGKRWLTPARKATVMKIPPPTTPRQVREFLGKAGFCRLFIPGFASLAAPLYPLTKPSIPFIWTEEHQKAFDRIKEALLSAPALALPDLTKPFTLYVDERAGVARGVLTQTLGPWRRPVAYLSKKLDPVASGWPTCLKAVAAVALLLKDADKLTLGQNVTVIASHSLESIVRQPPDRWMTNARMTHYQSLLLNERVSFAPPAVLNPATLLPVESEATPVHRCSEILAEETGTRRDLKDQPLPGVPAWYTDGSSFIAEGKRRAGAAIVDGKRTVWASSLPEGTSAQKAELVALTQALRLAEGKDINIYTDSRYAFATAHIHGAIYKQRGWLTSAGKDIKNKEEILALLEAIHLPKRVAIIHCPGHQKGNDPVATGNRRADEAAKQAALSTRVLAETTKPAGKRTADGSEFEKRTADGSEFESPKKKAKVE

SEQ ID NO: 6651 - protein, 2093 aa, synthetic construct
MPAAKRVKLDGGDKKYSIGLDIGTNSVGWAVITDEYKVPSKKFKVLGNTDRHSIKKNLIGALLFDSGETAEATRLKRTARRRYTRRKNRICYLQEIFSNEMAKVDDSFFHRLEESFLVEEDKKHERHPIFGNIVDEVAYHEKYPTIYHLRKKLVDSTDKADLRLIYLALAHMIKFRGHFLIEGDLNPDNSDVDKLFIQLVQTYNQLFEENPINASGVDAKAILSARLSKSRRLENLIAQLPGEKKNGLFGNLIALSLGLTPNFKSNFDLAEDAKLQLSKDTYDDDLDNLLAQIGDQYADLFLAAKNLSDAILLSDILRVNTEITKAPLSASMIKRYDEHHQDLTLLKALVRQQLPEKYKEIFFDQSKNGYAGYIDGGASQEEFYKFIKPILEKMDGTEELLVKLNREDLLRKQRTFDNGSIPHQIHLGELHAILRRQEDFYPFLKDNREKIEKILTFRIPYYVGPLARGNSRFAWMTRKSEETITPWNFEEVVDKGASAQSFIERMTNFDKNLPNEKVLPKHSLLYEYFTVYNELTKVKYVTEGMRKPAFLSGEQKKAIVDLLFKTNRKVTVKQLKEDYFKKIECFDSVEISGVEDRFNASLGTYHDLLKIIKDKDFLDNEENEDILEDIVLTLTLFEDREMIEERLKTYAHLFDDKVMKQLKRRRYTGWGRLSRKLINGIRDKQSGKTILDFLKSDGFANRNFMQLIHDDSLTFKEDIQKAQVSGQGDSLHEHIANLAGSPAIKKGILQTVKVVDELVKVMGRHKPENIVIEMARENQTTQKGQKNSRERMKRIEEGIKELGSQILKEHPVENTQLQNEKLYLYYLQNGRDMYVDQELDINRLSDYDVDHIVPQSFLKDDSIDNKVLTRSDKARGKSDNVPSEEVVKKMKNYWRQLLNAKLITQRKFDNLTKAERGGLSELDKAGFIKRQLVETRQITKHVAQILDSRMNTKYDENDKLIREVKVITLKSKLVSDFRKDFQFYKVREINNYHHAHDAYLNAVVGTALIKKYPKLESEFVYGDYKVYDVRKMIAKSEQEIGKATAKYFFYSNIMNFFKTEITLANGEIRKRPLIETNGETGEIVWDKGRDFATVRKVLSMPQVNIVKKTEVQTGGFSKESILPKRNSDKLIARKKDWDPKKYGGFDSPTVAYSVLVVAKVEKGKSKKLKSVKELLGITIMERSSFEKNPIDFLEAKGYKEVKKDLIIKLPKYSLFELENGRKRMLASAGELQKGNELALPSKYVNFLYLASHYEKLKGSPEDNEQKQLFVEQHKHYLDEIIEQISEFSKRVILADANLDKVLSAYNKHRDKPIREQAENIIHLFTLTNLGAPAAFKYFDTTIDRKRYTSTKEVLDATLIHQSITGLYETRIDLSQLGGDGGPAPGGSGGTAPLEEEYRLFLEAPIQNVTLLEQWKREIPKVWAEINPPGLASTQAPIHVQLLSTALPVRVRQYPITLEAKRSLRETIRKFRAAGILRPVHSPWNTPLLPVRKSGTSEYRMVQDLREVNKRVETIHPTVPNPYTLLSLLPPDRIWYSVLDLKDAFFCIPLAPESQLIFAFEWADAEEGESGQLTWTRLPQGFKNSPTLFNEALNRDLQGFRLDHPSVSLLQYVDDLLIAADTQAACLSATRDLLMTLAELGYRVSGKKAQLCQEEVTYLGFKIHKGSRSLSNSRTQAILQIPVPKTKRQVREFLGTIGYCRLWIPGFAELAQPLYAATRPGNDPLVWGEKEEEAFQSLKLALTQPPALALPSLDKPFQLFVEETSGAAKGVLTQALGPWKRPVAYLSKRLDPVAAGWPRCLRAIAAAALLTREASKLTFGQDIEITSSHNLESLLRSPPDKWLTNARITQYQVLLLDPPRVRFKQTAALNPATLLPETDDTLPIHHCLDTLDSLTSTRPDLTDQPLAQAEATLFTDGSSYIRDGKRYAGAAVVTLDSVIWAEPLPIGTSAQKAELIALTKALEWSKDKSVNIYTDSRYAFATLHVHGMIYRERGWLTAGGKAIKNAPEILALLTAVWLPKRVAVMHCKGHQKDDAPTSTGNRRADEVAREVAIRPLSTQATISAGKRTADGSEFEKRTADGSEFESPKKKAKVE

SEQ ID NO: 6652 - protein, 2093 aa, synthetic construct
MPAAKRVKLDGGDKKYSIGLDIGTNSVGWAVITDEYKVPSKKFKVLGNTDRHSIKKNLIGALLFDSGETAEATRLKRTARRRYTRRKNRICYLQEIFSNEMAKVDDSFFHRLEESFLVEEDKKHERHPIFGNIVDEVAYHEKYPTIYHLRKKLVDSTDKADLRLIYLALAHMIKFRGHFLIEGDLNPDNSDVDKLFIQLVQTYNQLFEENPINASGVDAKAILSARLSKSRRLENLIAQLPGEKKNGLFGNLIALSLGLTPNFKSNFDLAEDAKLQLSKDTYDDDLDNLLAQIGDQYADLFLAAKNLSDAILLSDILRVNTEITKAPLSASMIKRYDEHHQDLTLLKALVRQQLPEKYKEIFFDQSKNGYAGYIDGGASQEEFYKFIKPILEKMDGTEELLVKLNREDLLRKQRTFDNGSIPHQIHLGELHAILRRQEDFYPFLKDNREKIEKILTFRIPYYVGPLARGNSRFAWMTRKSEETITPWNFEEVVDKGASAQSFIERMTNFDKNLPNEKVLPKHSLLYEYFTVYNELTKVKYVTEGMRKPAFLSGEQKKAIVDLLFKTNRKVTVKQLKEDYFKKIECFDSVEISGVEDRFNASLGTYHDLLKIIKDKDFLDNEENEDILEDIVLTLTLFEDREMIEERLKTYAHLFDDKVMKQLKRRRYTGWGRLSRKLINGIRDKQSGKTILDFLKSDGFANRNFMQLIHDDSLTFKEDIQKAQVSGQGDSLHEHIANLAGSPAIKKGILQTVKVVDELVKVMGRHKPENIVIEMARENQTTQKGQKNSRERMKRIEEGIKELGSQILKEHPVENTQLQNEKLYLYYLQNGRDMYVDQELDINRLSDYDVDHIVPQSFLKDDSIDNKVLTRSDKARGKSDNVPSEEVVKKMKNYWRQLLNAKLITQRKFDNLTKAERGGLSELDKAGFIKRQLVETRQITKHVAQILDSRMNTKYDENDKLIREVKVITLKSKLVSDFRKDFQFYKVREINNYHHAHDAYLNAVVGTALIKKYPKLESEFVYGDYKVYDVRKMIAKSEQEIGKATAKYFFYSNIMNFFKTEITLANGEIRKRPLIETNGETGEIVWDKGRDFATVRKVLSMPQVNIVKKTEVQTGGFSKESILPKRNSDKLIARKKDWDPKKYGGFDSPTVAYSVLVVAKVEKGKSKKLKSVKELLGITIMERSSFEKNPIDFLEAKGYKEVKKDLIIKLPKYSLFELENGRKRMLASAGELQKGNELALPSKYVNFLYLASHYEKLKGSPEDNEQKQLFVEQHKHYLDEIIEQISEFSKRVILADANLDKVLSAYNKHRDKPIREQAENIIHLFTLTNLGAPAAFKYFDTTIDRKRYTSTKEVLDATLIHQSITGLYETRIDLSQLGGDGGPAPGGSGGTAPLEEEYRLFLEAPIQNVTLLEQWKREIPKVWAEINPPGLASTQAPIHVQLLSTALPVRVRQYPITLEAKRSLRETIRKFRAAGILRPVHSPWNTPLLPVRKSGTSEYRMVQDLREVNKRVETIHPTVPNPYTLLSLLPPDRIWYSVLDLKDAFFCIPLAPESQLIFAFEWADAEEGESGQLTWTRLPQGFKNSPTLFNEALNRDLQGFRLDHPSVSLLQYVDDLLIAADTQAACLSATRDLLMTLAELGYRVSGKKAQLCQEEVTYLGFKIHKGSRSLSNSRTQAILQIPVPKTKRQVREFLGKIGYCRLFIPGFAELAQPLYAATRPGNDPLVWGEKEEEAFQSLKLALTQPPALALPSLDKPFQLFVEETSGAAKGVLTQALGPWKRPVAYLSKRLDPVAAGWPRCLRAIAAAALLTREASKLTFGQDIEITSSHNLESLLRSPPDKWLTNARITQYQVLLLDPPRVRFKQTAALNPATLLPETDDTLPIHHCLDTLDSLTSTRPDLTDQPLAQAEATLFTDGSSYIRDGKRYAGAAVVTLDSVIWAEPLPIGTSAQKAELIALTKALEWSKDKSVNIYTDSRYAFATLHVHGMIYRERGWLTAGGKAIKNAPEILALLTAVWLPKRVAVMHCKGHQKDDAPTSTGNRRADEVAREVAIRPLSTQATISAGKRTADGSEFEKRTADGSEFESPKKKAKVE

SEQ ID NO: 6653 - protein, 2089 aa, synthetic construct
MPAAKRVKLDGGDKKYSIGLDIGTNSVGWAVITDEYKVPSKKFKVLGNTDRHSIKKNLIGALLFDSGETAEATRLKRTARRRYTRRKNRICYLQEIFSNEMAKVDDSFFHRLEESFLVEEDKKHERHPIFGNIVDEVAYHEKYPTIYHLRKKLVDSTDKADLRLIYLALAHMIKFRGHFLIEGDLNPDNSDVDKLFIQLVQTYNQLFEENPINASGVDAKAILSARLSKSRRLENLIAQLPGEKKNGLFGNLIALSLGLTPNFKSNFDLAEDAKLQLSKDTYDDDLDNLLAQIGDQYADLFLAAKNLSDAILLSDILRVNTEITKAPLSASMIKRYDEHHQDLTLLKALVRQQLPEKYKEIFFDQSKNGYAGYIDGGASQEEFYKFIKPILEKMDGTEELLVKLNREDLLRKQRTFDNGSIPHQIHLGELHAILRRQEDFYPFLKDNREKIEKILTFRIPYYVGPLARGNSRFAWMTRKSEETITPWNFEEVVDKGASAQSFIERMTNFDKNLPNEKVLPKHSLLYEYFTVYNELTKVKYVTEGMRKPAFLSGEQKKAIVDLLFKTNRKVTVKQLKEDYFKKIECFDSVEISGVEDRFNASLGTYHDLLKIIKDKDFLDNEENEDILEDIVLTLTLFEDREMIEERLKTYAHLFDDKVMKQLKRRRYTGWGRLSRKLINGIRDKQSGKTILDFLKSDGFANRNFMQLIHDDSLTFKEDIQKAQVSGQGDSLHEHIANLAGSPAIKKGILQTVKVVDELVKVMGRHKPENIVIEMARENQTTQKGQKNSRERMKRIEEGIKELGSQILKEHPVENTQLQNEKLYLYYLQNGRDMYVDQELDINRLSDYDVDHIVPQSFLKDDSIDNKVLTRSDKARGKSDNVPSEEVVKKMKNYWRQLLNAKLITQRKFDNLTKAERGGLSELDKAGFIKRQLVETRQITKHVAQILDSRMNTKYDENDKLIREVKVITLKSKLVSDFRKDFQFYKVREINNYHHAHDAYLNAVVGTALIKKYPKLESEFVYGDYKVYDVRKMIAKSEQEIGKATAKYFFYSNIMNFFKTEITLANGEIRKRPLIETNGETGEIVWDKGRDFATVRKVLSMPQVNIVKKTEVQTGGFSKESILPKRNSDKLIARKKDWDPKKYGGFDSPTVAYSVLVVAKVEKGKSKKLKSVKELLGITIMERSSFEKNPIDFLEAKGYKEVKKDLIIKLPKYSLFELENGRKRMLASAGELQKGNELALPSKYVNFLYLASHYEKLKGSPEDNEQKQLFVEQHKHYLDEIIEQISEFSKRVILADANLDKVLSAYNKHRDKPIREQAENIIHLFTLTNLGAPAAFKYFDTTIDRKRYTSTKEVLDATLIHQSITGLYETRIDLSQLGGDGGPAPGGSGGVLNLEEEYRLHEKPVPSSIDPSWLQLFPTVWAERAGMGLANQVPPVVVELRSGASPVAVRQYPMSKEAREGIRPHIQKFLDLGVLVPCRSPWNTPLLPVKKPGTNDYRPVQDLREINKRVQDIHPTVPNPYNLLSSLPPSYTWYSVLDLKDAFFCLRLHPNSQPLFAFEWKDPEKGNTGQLTWTRLPQGFKNSPTLFDEALHRDLAPFRALNPQVVLLQYVDDLLVAAPTYEDCKKGTQKLLQELSKLGYRVSAKKAQLCQREVTYLGYLLKEGKRWLTPARKATVMKIPVPTTPRQVREFLGTAGFCRLWIPGFASLAAPLYPLTKESIPFIWTEEHQQAFDHIKKALLSAPALALPDLTKPFTLYIDERAGVARGVLTQTLGPWRRPVAYLSKKLDPVASGWPTCLKAVAAVALLLKDADKLTLGQNVTVIASHSLESIVRQPPDRWMTNARMTHYQSLLLNERVSFAPPAVLNPATLLPVESEATPVHRCSEILAEETGTRRDLEDQPLPGVPTWYTDGSSFITEGKRRAGAPIVDGKRTVWASSLPEGTSAQKAELVALTQALRLAEGKNINIYTDSRYAFATAHIHGAIYKQRGLLTSAGKDIKNKEEILALLEAIHLPRRVAIIHCPGHQRGSNPVATGNRRADEAAKQAALSTRVLAGTTKPAGKRTADGSEFEKRTADGSEFESPKKKAKVE

SEQ ID NO: 6654 - protein, 2213 aa, synthetic construct
MPAAKRVKLDGGDKKYSIGLDIGTNSVGWAVITDEYKVPSKKFKVLGNTDRHSIKKNLIGALLFDSGETAEATRLKRTARRRYTRRKNRICYLQEIFSNEMAKVDDSFFHRLEESFLVEEDKKHERHPIFGNIVDEVAYHEKYPTIYHLRKKLVDSTDKADLRLIYLALAHMIKFRGHFLIEGDLNPDNSDVDKLFIQLVQTYNQLFEENPINASGVDAKAILSARLSKSRRLENLIAQLPGEKKNGLFGNLIALSLGLTPNFKSNFDLAEDAKLQLSKDTYDDDLDNLLAQIGDQYADLFLAAKNLSDAILLSDILRVNTEITKAPLSASMIKRYDEHHQDLTLLKALVRQQLPEKYKEIFFDQSKNGYAGYIDGGASQEEFYKFIKPILEKMDGTEELLVKLNREDLLRKQRTFDNGSIPHQIHLGELHAILRRQEDFYPFLKDNREKIEKILTFRIPYYVGPLARGNSRFAWMTRKSEETITPWNFEEVVDKGASAQSFIERMTNFDKNLPNEKVLPKHSLLYEYFTVYNELTKVKYVTEGMRKPAFLSGEQKKAIVDLLFKTNRKVTVKQLKEDYFKKIECFDSVEISGVEDRFNASLGTYHDLLKIIKDKDFLDNEENEDILEDIVLTLTLFEDREMIEERLKTYAHLFDDKVMKQLKRRRYTGWGRLSRKLINGIRDKQSGKTILDFLKSDGFANRNFMQLIHDDSLTFKEDIQKAQVSGQGDSLHEHIANLAGSPAIKKGILQTVKVVDELVKVMGRHKPENIVIEMARENQTTQKGQKNSRERMKRIEEGIKELGSQILKEHPVENTQLQNEKLYLYYLQNGRDMYVDQELDINRLSDYDVDHIVPQSFLKDDSIDNKVLTRSDKARGKSDNVPSEEVVKKMKNYWRQLLNAKLITQRKFDNLTKAERGGLSELDKAGFIKRQLVETRQITKHVAQILDSRMNTKYDENDKLIREVKVITLKSKLVSDFRKDFQFYKVREINNYHHAHDAYLNAVVGTALIKKYPKLESEFVYGDYKVYDVRKMIAKSEQEIGKATAKYFFYSNIMNFFKTEITLANGEIRKRPLIETNGETGEIVWDKGRDFATVRKVLSMPQVNIVKKTEVQTGGFSKESILPKRNSDKLIARKKDWDPKKYGGFDSPTVAYSVLVVAKVEKGKSKKLKSVKELLGITIMERSSFEKNPIDFLEAKGYKEVKKDLIIKLPKYSLFELENGRKRMLASAGELQKGNELALPSKYVNFLYLASHYEKLKGSPEDNEQKQLFVEQHKHYLDEIIEQISEFSKRVILADANLDKVLSAYNKHRDKPIREQAENIIHLFTLTNLGAPAAFKYFDTTIDRKRYTSTKEVLDATLIHQSITGLYETRIDLSQLGGDGGPAPGGSGGTLGDQGSRGSDPLPEPRVTLTVEGIPTEFLVNTGAEHSVLTKPMGKMGSKRTVVAGATGSKVYPWTTKRLLKIGQKQVTHSFLVIPECPAPLLGRDLLTKLKAQIQFSTEGPQVTWEDRPAMCLVLNLEEEYRLHEKPVPPSIDPSWLQLFPMVWAEKAGMGLANQVPPVVVELKSDASPVAVRQYPMSKEAREGIRPHIQRFLDLGILVPCQSPWNTPLLPVKKPGTNDYRPVQDLREVNKRVQDIHPTVPNPYNLLSSLPPSHTWYSVLDLKDAFFCLKLHPNSQPLFAFEWRDPEKGNTGQLTWTRLPQGFKNSPTLFNEALHRDLASFRALNPQVVMLQYVDDLLVAAPTYRDCKEGTRRLLQELSKLGYRVSAKKAQLCREEVTYLGYLLKGGKRWLTPARKATVMKIPTPTTPRQVREFLGTAGFCRLWIPGFASLAAPLYPLTRPKVPFTWTEAHQEAFGRIKEALLSAPALALPDLTKPFALYVDEKEGVARGVLTQTLGPWRRPVAYLSKKLDPVASGWPTCLKAIAAVALLLKDADKLTLGQNVLVIAPHNLESIVRQPPDRWMTNARMTHYQSLLLNERVSFAPPAILNPATLLPVESDDTPIHICSEILAEETGTRPDLRDQPLPGVPAWYTDGSSFIMDGRRQAGAAIVDNKRTVWASNLPEGTSAQKAELIALTQALRLAEGKSINIYTDSRYAFATAHVHGAIYKQRGWLTSAGKDIKNKEEILALLEAIHLPKRVAIIHCPGHQRGTDPVATGNRKADEAAKQAAQSTRILTETTKNAGKRTADGSEFEKRTADGSEFESPKKKAKVE

SEQ ID NO: 6655 - protein, 2091 aa, synthetic construct
MPAAKRVKLDGGDKKYSIGLDIGTNSVGWAVITDEYKVPSKKFKVLGNTDRHSIKKNLIGALLFDSGETAEATRLKRTARRRYTRRKNRICYLQEIFSNEMAKVDDSFFHRLEESFLVEEDKKHERHPIFGNIVDEVAYHEKYPTIYHLRKKLVDSTDKADLRLIYLALAHMIKFRGHFLIEGDLNPDNSDVDKLFIQLVQTYNQLFEENPINASGVDAKAILSARLSKSRRLENLIAQLPGEKKNGLFGNLIALSLGLTPNFKSNFDLAEDAKLQLSKDTYDDDLDNLLAQIGDQYADLFLAAKNLSDAILLSDILRVNTEITKAPLSASMIKRYDEHHQDLTLLKALVRQQLPEKYKEIFFDQSKNGYAGYIDGGASQEEFYKFIKPILEKMDGTEELLVKLNREDLLRKQRTFDNGSIPHQIHLGELHAILRRQEDFYPFLKDNREKIEKILTFRIPYYVGPLARGNSRFAWMTRKSEETITPWNFEEVVDKGASAQSFIERMTNFDKNLPNEKVLPKHSLLYEYFTVYNELTKVKYVTEGMRKPAFLSGEQKKAIVDLLFKTNRKVTVKQLKEDYFKKIECFDSVEISGVEDRFNASLGTYHDLLKIIKDKDFLDNEENEDILEDIVLTLTLFEDREMIEERLKTYAHLFDDKVMKQLKRRRYTGWGRLSRKLINGIRDKQSGKTILDFLKSDGFANRNFMQLIHDDSLTFKEDIQKAQVSGQGDSLHEHIANLAGSPAIKKGILQTVKVVDELVKVMGRHKPENIVIEMARENQTTQKGQKNSRERMKRIEEGIKELGSQILKEHPVENTQLQNEKLYLYYLQNGRDMYVDQELDINRLSDYDVDHIVPQSFLKDDSIDNKVLTRSDKARGKSDNVPSEEVVKKMKNYWRQLLNAKLITQRKFDNLTKAERGGLSELDKAGFIKRQLVETRQITKHVAQILDSRMNTKYDENDKLIREVKVITLKSKLVSDFRKDFQFYKVREINNYHHAHDAYLNAVVGTALIKKYPKLESEFVYGDYKVYDVRKMIAKSEQEIGKATAKYFFYSNIMNFFKTEITLANGEIRKRPLIETNGETGEIVWDKGRDFATVRKVLSMPQVNIVKKTEVQTGGFSKESILPKRNSDKLIARKKDWDPKKYGGFDSPTVAYSVLVVAKVEKGKSKKLKSVKELLGITIMERSSFEKNPIDFLEAKGYKEVKKDLIIKLPKYSLFELENGRKRMLASAGELQKGNELALPSKYVNFLYLASHYEKLKGSPEDNEQKQLFVEQHKHYLDEIIEQISEFSKRVILADANLDKVLSAYNKHRDKPIREQAENIIHLFTLTNLGAPAAFKYFDTTIDRKRYTSTKEVLDATLIHQSITGLYETRIDLSQLGGDGGPAPGGSGGTLNLEDEYRLYETSAEPEVSPGSTWLSDFPQAWAETGGMGLAVRQAPLIIPLKATSTPVSIKQYPMSQEAKLGIKPHIQRLLDQGILVPCQSPWNTPLLPVKKPGTNDYRPVQDLREVNKRVEDIHPTVPNPYNLLSGLPPSHRWYTVLDLKDAFFCLRLHPTSQPLFAFEWRDPGMGISGQLTWTRLPQGFKNSPTLFNEALHRDLADFRIQHPDLILLQYVDDILLAATSELDCQQGTRALLLTLGNLGYRASAKKAQLCQKQVKYLGYLLKEGQRWLTEARKETVMGQPTPKTPRQLREFLGKAGFCRLFIPGFAEMAAPLYPLTKPGTLFNWGPDQQKAYQEIKQALLTAPALGLPDLTKPFELFVDEKQGYAKGVLTQKLGPWRRPVAYLSKKLDPVAAGWPPCLRMVAAIAVLRKDAGKLTMGQPLVILAPHAVEALVKQPPDRWLSNARMTHYQAMLLDTDRVQFGPVVALNPATLLPLPEEGAPHDCLEILAETHGTRPDLTDQPIPDADHTWYTDGSSFLQEGQRKAGAAVTTETEVIWARALPAGTSAQRAELIALTQALKMAEGKRLNVYTDSRYAFATAHIHGEIYRRRGWLTSEGREIKNKSEILALLKALFLPKRLSIIHCLGHQKGDSAEARGNRLADQAAREAAIKTPPDTSTLLAGKRTADGSEFEKRTADGSEFESPKKKAKVE

SEQ ID NO: 6656 - protein, 2082 aa, synthetic construct
MPAAKRVKLDGGDKKYSIGLDIGTNSVGWAVITDEYKVPSKKFKVLGNTDRHSIKKNLIGALLFDSGETAEATRLKRTARRRYTRRKNRICYLQEIFSNEMAKVDDSFFHRLEESFLVEEDKKHERHPIFGNIVDEVAYHEKYPTIYHLRKKLVDSTDKADLRLIYLALAHMIKFRGHFLIEGDLNPDNSDVDKLFIQLVQTYNQLFEENPINASGVDAKAILSARLSKSRRLENLIAQLPGEKKNGLFGNLIALSLGLTPNFKSNFDLAEDAKLQLSKDTYDDDLDNLLAQIGDQYADLFLAAKNLSDAILLSDILRVNTEITKAPLSASMIKRYDEHHQDLTLLKALVRQQLPEKYKEIFFDQSKNGYAGYIDGGASQEEFYKFIKPILEKMDGTEELLVKLNREDLLRKQRTFDNGSIPHQIHLGELHAILRRQEDFYPFLKDNREKIEKILTFRIPYYVGPLARGNSRFAWMTRKSEETITPWNFEEVVDKGASAQSFIERMTNFDKNLPNEKVLPKHSLLYEYFTVYNELTKVKYVTEGMRKPAFLSGEQKKAIVDLLFKTNRKVTVKQLKEDYFKKIECFDSVEISGVEDRFNASLGTYHDLLKIIKDKDFLDNEENEDILEDIVLTLTLFEDREMIEERLKTYAHLFDDKVMKQLKRRRYTGWGRLSRKLINGIRDKQSGKTILDFLKSDGFANRNFMQLIHDDSLTFKEDIQKAQVSGQGDSLHEHIANLAGSPAIKKGILQTVKVVDELVKVMGRHKPENIVIEMARENQTTQKGQKNSRERMKRIEEGIKELGSQILKEHPVENTQLQNEKLYLYYLQNGRDMYVDQELDINRLSDYDVDHIVPQSFLKDDSIDNKVLTRSDKARGKSDNVPSEEVVKKMKNYWRQLLNAKLITQRKFDNLTKAERGGLSELDKAGFIKRQLVETRQITKHVAQILDSRMNTKYDENDKLIREVKVITLKSKLVSDFRKDFQFYKVREINNYHHAHDAYLNAVVGTALIKKYPKLESEFVYGDYKVYDVRKMIAKSEQEIGKATAKYFFYSNIMNFFKTEITLANGEIRKRPLIETNGETGEIVWDKGRDFATVRKVLSMPQVNIVKKTEVQTGGFSKESILPKRNSDKLIARKKDWDPKKYGGFDSPTVAYSVLVVAKVEKGKSKKLKSVKELLGITIMERSSFEKNPIDFLEAKGYKEVKKDLIIKLPKYSLFELENGRKRMLASAGELQKGNELALPSKYVNFLYLASHYEKLKGSPEDNEQKQLFVEQHKHYLDEIIEQISEFSKRVILADANLDKVLSAYNKHRDKPIREQAENIIHLFTLTNLGAPAAFKYFDTTIDRKRYTSTKEVLDATLIHQSITGLYETRIDLSQLGGDGGPAPGGSGGIPWLMKKPLQLTTLVPLQEYEERLLKQTMLTGSYKEKLQSLFLKYDALWQHWENQVGHRRIKPHHIATGTVNPRPQKQYPINPKAKASIQTVINDLLKQGVLIQQNSIMNTPVYPVPKPDGKWRMVLDYREVNKTIPLIAAQNQHSAGILSSIFRGKYKTTLDLSNGFWAHSITPESYWLTAFTWLGQQYCWTRLPQGFLNSPALFNADVVDLLKEVPNVQVYVDDIYISHDDPREHLEQLEKVFSLLLNAGYVVSLKKSEIAQHEVEFLGFNITKEGRGLTETFKQKLLNITPPRDLKQLQSILGKLNFARNFIPNFSELVKPLYNIIATAPGKYITWTTDNSQQLQNIISMLNSAENLEERNPEVRLIMKVNTSPSAGYIRFYNEFAKRPIMYLNYVYTKAEVKFTNTEKLLTTIHKGLIKALDLGMGQEILVYSPIVSMTKIQKTPLPERKALPIRWITWMSYLEDPRIQFHYDKTLPELQQVPTVTDDIIAKIKHPSEFSMVFYTDGSAIKHPNVNKSHNAGMGIAQVQFKPEFTVINTWSIPLGDHTAQLAEVAAVEFACKKALKIDGPVLIVTDSFYVAESVNKELPYWQSNGFFNNKKKPLKHVSKWKSIADCIQLKPDIIIIHEKGHQPTASTFHTEGNNLADKLATQGSYVVNAGKRTADGSEFEKRTADGSEFESPKKKAKVE

SEQ ID NO: 6657 - protein, 2089 aa, synthetic construct
MPAAKRVKLDGGDKKYSIGLDIGTNSVGWAVITDEYKVPSKKFKVLGNTDRHSIKKNLIGALLFDSGETAEATRLKRTARRRYTRRKNRICYLQEIFSNEMAKVDDSFFHRLEESFLVEEDKKHERHPIFGNIVDEVAYHEKYPTIYHLRKKLVDSTDKADLRLIYLALAHMIKFRGHFLIEGDLNPDNSDVDKLFIQLVQTYNQLFEENPINASGVDAKAILSARLSKSRRLENLIAQLPGEKKNGLFGNLIALSLGLTPNFKSNFDLAEDAKLQLSKDTYDDDLDNLLAQIGDQYADLFLAAKNLSDAILLSDILRVNTEITKAPLSASMIKRYDEHHQDLTLLKALVRQQLPEKYKEIFFDQSKNGYAGYIDGGASQEEFYKFIKPILEKMDGTEELLVKLNREDLLRKQRTFDNGSIPHQIHLGELHAILRRQEDFYPFLKDNREKIEKILTFRIPYYVGPLARGNSRFAWMTRKSEETITPWNFEEVVDKGASAQSFIERMTNFDKNLPNEKVLPKHSLLYEYFTVYNELTKVKYVTEGMRKPAFLSGEQKKAIVDLLFKTNRKVTVKQLKEDYFKKIECFDSVEISGVEDRFNASLGTYHDLLKIIKDKDFLDNEENEDILEDIVLTLTLFEDREMIEERLKTYAHLFDDKVMKQLKRRRYTGWGRLSRKLINGIRDKQSGKTILDFLKSDGFANRNFMQLIHDDSLTFKEDIQKAQVSGQGDSLHEHIANLAGSPAIKKGILQTVKVVDELVKVMGRHKPENIVIEMARENQTTQKGQKNSRERMKRIEEGIKELGSQILKEHPVENTQLQNEKLYLYYLQNGRDMYVDQELDINRLSDYDVDHIVPQSFLKDDSIDNKVLTRSDKARGKSDNVPSEEVVKKMKNYWRQLLNAKLITQRKFDNLTKAERGGLSELDKAGFIKRQLVETRQITKHVAQILDSRMNTKYDENDKLIREVKVITLKSKLVSDFRKDFQFYKVREINNYHHAHDAYLNAVVGTALIKKYPKLESEFVYGDYKVYDVRKMIAKSEQEIGKATAKYFFYSNIMNFFKTEITLANGEIRKRPLIETNGETGEIVWDKGRDFATVRKVLSMPQVNIVKKTEVQTGGFSKESILPKRNSDKLIARKKDWDPKKYGGFDSPTVAYSVLVVAKVEKGKSKKLKSVKELLGITIMERSSFEKNPIDFLEAKGYKEVKKDLIIKLPKYSLFELENGRKRMLASAGELQKGNELALPSKYVNFLYLASHYEKLKGSPEDNEQKQLFVEQHKHYLDEIIEQISEFSKRVILADANLDKVLSAYNKHRDKPIREQAENIIHLFTLTNLGAPAAFKYFDTTIDRKRYTSTKEVLDATLIHQSITGLYETRIDLSQLGGDGGPAPGGSGGVLNLEEEYRLHEKPVPSSIDPSWLQLFPTVWAERAGMGLANQVPPVVVELRSGASPVAVRQYPMSKEAREGIRPHIQRFLDLGVLVPCQSPWNTPLLPVKKPGTNDYRPVQDLREINKRVQDIHPTVPNPYNLLSSLPPSHTWYSVLDLKDAFFCLKLHPNSQPLFAFEWRDPEKGNTGQLTWTRLPQGFKNSPTLFNEALHRDLAPFRALNPQVVLLQYVDDLLVAAPTYRDCKEGTQKLLQELSKLGYRVSAKKAQLCQKEVTYLGYLLKEGKRWLTPARKATVMKIPPPTTPRQVREFLGTAGFCRLWIPGFASLAAPLYPLTKPSIPFIWTEEHQKAFDRIKEALLSAPALALPDLTKPFTLYVDERAGVARGVLTQTLGPWRRPVAYLSKKLDPVASGWPTCLKAVAAVALLLKDADKLTLGQNVTVIASHSLESIVRQPPDRWMTNARMTHYQSLLLNERVSFAPPAVLNPATLLPVESEATPVHRCSEILAEETGTRRDLKDQPLPGVPAWYTDGSSFIAEGKRRAGAAIVDGKRTVWASSLPEGTSAQKAELVALTQALRLAEGKDINIYTDSRYAFATAHIHGAIYKQRGWLTSAGKDIKNKEEILALLEAIHLPKRVAIIHCPGHQKGNDPVATGNRRADEAAKQAALSTRVLAETTKPAGKRTADGSEFEKRTADGSEFESPKKKAKVE

SEQ ID NO: 6658 - protein, 2091 aa, synthetic construct
MPAAKRVKLDGGDKKYSIGLDIGTNSVGWAVITDEYKVPSKKFKVLGNTDRHSIKKNLIGALLFDSGETAEATRLKRTARRRYTRRKNRICYLQEIFSNEMAKVDDSFFHRLEESFLVEEDKKHERHPIFGNIVDEVAYHEKYPTIYHLRKKLVDSTDKADLRLIYLALAHMIKFRGHFLIEGDLNPDNSDVDKLFIQLVQTYNQLFEENPINASGVDAKAILSARLSKSRRLENLIAQLPGEKKNGLFGNLIALSLGLTPNFKSNFDLAEDAKLQLSKDTYDDDLDNLLAQIGDQYADLFLAAKNLSDAILLSDILRVNTEITKAPLSASMIKRYDEHHQDLTLLKALVRQQLPEKYKEIFFDQSKNGYAGYIDGGASQEEFYKFIKPILEKMDGTEELLVKLNREDLLRKQRTFDNGSIPHQIHLGELHAILRRQEDFYPFLKDNREKIEKILTFRIPYYVGPLARGNSRFAWMTRKSEETITPWNFEEVVDKGASAQSFIERMTNFDKNLPNEKVLPKHSLLYEYFTVYNELTKVKYVTEGMRKPAFLSGEQKKAIVDLLFKTNRKVTVKQLKEDYFKKIECFDSVEISGVEDRFNASLGTYHDLLKIIKDKDFLDNEENEDILEDIVLTLTLFEDREMIEERLKTYAHLFDDKVMKQLKRRRYTGWGRLSRKLINGIRDKQSGKTILDFLKSDGFANRNFMQLIHDDSLTFKEDIQKAQVSGQGDSLHEHIANLAGSPAIKKGILQTVKVVDELVKVMGRHKPENIVIEMARENQTTQKGQKNSRERMKRIEEGIKELGSQILKEHPVENTQLQNEKLYLYYLQNGRDMYVDQELDINRLSDYDVDHIVPQSFLKDDSIDNKVLTRSDKARGKSDNVPSEEVVKKMKNYWRQLLNAKLITQRKFDNLTKAERGGLSELDKAGFIKRQLVETRQITKHVAQILDSRMNTKYDENDKLIREVKVITLKSKLVSDFRKDFQFYKVREINNYHHAHDAYLNAVVGTALIKKYPKLESEFVYGDYKVYDVRKMIAKSEQEIGKATAKYFFYSNIMNFFKTEITLANGEIRKRPLIETNGETGEIVWDKGRDFATVRKVLSMPQVNIVKKTEVQTGGFSKESILPKRNSDKLIARKKDWDPKKYGGFDSPTVAYSVLVVAKVEKGKSKKLKSVKELLGITIMERSSFEKNPIDFLEAKGYKEVKKDLIIKLPKYSLFELENGRKRMLASAGELQKGNELALPSKYVNFLYLASHYEKLKGSPEDNEQKQLFVEQHKHYLDEIIEQISEFSKRVILADANLDKVLSAYNKHRDKPIREQAENIIHLFTLTNLGAPAAFKYFDTTIDRKRYTSTKEVLDATLIHQSITGLYETRIDLSQLGGDGGPAPGGSGGTLNIEDEYRLHETSKEPDVPLGSTWLSDFPQAWAETGGMGLAVRQAPLIIPLKATSTPVSIKQYPMSQEARLGIKPHIQRLLDQGILVPCQSPWNTPLLPVKKPGTNDYRPVQDLREVNKRVEDIHPTVPNPYNLLSGLPPSHQWYTVLDLKDAFFCLRLHPTSQPLFAFEWRDPEMGISGQLTWTRLPQGFKNSPTLFNEALHRDLADFRIQHPDLILLQYVDDLLLAATSEQDCQRGTRALLQTLGNLGYRASAKKAQICQKQVKYLGYLLKEGQRWLTEARKETVMGQPTPKTPRQLREFLGTAGFCRLWIPGFAEMAAPLYPLTKPGTLFNWGPDQQKAYQEIKQALLTAPALGLPDLTKPFELFVDEKQGYAKGVLTQKLGPWRRPVAYLSKKLDPVAAGWPPCLRMVAAIAVLTKDAGKLTMGQPLVILAPHAVEALVKQPPDRWLSNARMTHYQAMLLDTDRVQFGPVVALNPATLLPLPEKEAPHDCLEILAETHGTRPDLTDQPIPDADYTWYTDGSSFLQEGQRRAGAAVTTETEVIWARALPAGTSAQRAELIALTQALKMAEGKKLNVYTDSRYAFATAHVHGEIYRRRGWLTSEGREIKNKNEILALLKALFLPKRLSIIHCPGHQKGNSAEARGNRMADQAAREAAMKAVLETSTLLAGKRTADGSEFEKRTADGSEFESPKKKAKVE

SEQ ID NO: 6659 - protein, 2093 aa, synthetic construct
MPAAKRVKLDGGDKKYSIGLDIGTNSVGWAVITDEYKVPSKKFKVLGNTDRHSIKKNLIGALLFDSGETAEATRLKRTARRRYTRRKNRICYLQEIFSNEMAKVDDSFFHRLEESFLVEEDKKHERHPIFGNIVDEVAYHEKYPTIYHLRKKLVDSTDKADLRLIYLALAHMIKFRGHFLIEGDLNPDNSDVDKLFIQLVQTYNQLFEENPINASGVDAKAILSARLSKSRRLENLIAQLPGEKKNGLFGNLIALSLGLTPNFKSNFDLAEDAKLQLSKDTYDDDLDNLLAQIGDQYADLFLAAKNLSDAILLSDILRVNTEITKAPLSASMIKRYDEHHQDLTLLKALVRQQLPEKYKEIFFDQSKNGYAGYIDGGASQEEFYKFIKPILEKMDGTEELLVKLNREDLLRKQRTFDNGSIPHQIHLGELHAILRRQEDFYPFLKDNREKIEKILTFRIPYYVGPLARGNSRFAWMTRKSEETITPWNFEEVVDKGASAQSFIERMTNFDKNLPNEKVLPKHSLLYEYFTVYNELTKVKYVTEGMRKPAFLSGEQKKAIVDLLFKTNRKVTVKQLKEDYFKKIECFDSVEISGVEDRFNASLGTYHDLLKIIKDKDFLDNEENEDILEDIVLTLTLFEDREMIEERLKTYAHLFDDKVMKQLKRRRYTGWGRLSRKLINGIRDKQSGKTILDFLKSDGFANRNFMQLIHDDSLTFKEDIQKAQVSGQGDSLHEHIANLAGSPAIKKGILQTVKVVDELVKVMGRHKPENIVIEMARENQTTQKGQKNSRERMKRIEEGIKELGSQILKEHPVENTQLQNEKLYLYYLQNGRDMYVDQELDINRLSDYDVDHIVPQSFLKDDSIDNKVLTRSDKARGKSDNVPSEEVVKKMKNYWRQLLNAKLITQRKFDNLTKAERGGLSELDKAGFIKRQLVETRQITKHVAQILDSRMNTKYDENDKLIREVKVITLKSKLVSDFRKDFQFYKVREINNYHHAHDAYLNAVVGTALIKKYPKLESEFVYGDYKVYDVRKMIAKSEQEIGKATAKYFFYSNIMNFFKTEITLANGEIRKRPLIETNGETGEIVWDKGRDFATVRKVLSMPQVNIVKKTEVQTGGFSKESILPKRNSDKLIARKKDWDPKKYGGFDSPTVAYSVLVVAKVEKGKSKKLKSVKELLGITIMERSSFEKNPIDFLEAKGYKEVKKDLIIKLPKYSLFELENGRKRMLASAGELQKGNELALPSKYVNFLYLASHYEKLKGSPEDNEQKQLFVEQHKHYLDEIIEQISEFSKRVILADANLDKVLSAYNKHRDKPIREQAENIIHLFTLTNLGAPAAFKYFDTTIDRKRYTSTKEVLDATLIHQSITGLYETRIDLSQLGGDGGGGGGSSGGTAPLEEEYRLFLEAPIQNVTLLEQWKREIPKVWAEINPPGLASTQAPIHVQLLSTALPVRVRQYPITLEAKRSLRETIRKFRAAGILRPVHSPWNTPLLPVRKSGTSEYRMVQDLREVNKRVETIHPTVPNPYTLLSLLPPDRIWYSVLDLKDAFFCIPLAPESQLIFAFEWADAEEGESGQLTWTRLPQGFKNSPTLFNEALNRDLQGFRLDHPSVSLLQYVDDLLIAADTQAACLSATRDLLMTLAELGYRVSGKKAQLCQEEVTYLGFKIHKGSRSLSNSRTQAILQIPVPKTKRQVREFLGTIGYCRLWIPGFAELAQPLYAATRPGNDPLVWGEKEEEAFQSLKLALTQPPALALPSLDKPFQLFVEETSGAAKGVLTQALGPWKRPVAYLSKRLDPVAAGWPRCLRAIAAAALLTREASKLTFGQDIEITSSHNLESLLRSPPDKWLTNARITQYQVLLLDPPRVRFKQTAALNPATLLPETDDTLPIHHCLDTLDSLTSTRPDLTDQPLAQAEATLFTDGSSYIRDGKRYAGAAVVTLDSVIWAEPLPIGTSAQKAELIALTKALEWSKDKSVNIYTDSRYAFATLHVHGMIYRERGWLTAGGKAIKNAPEILALLTAVWLPKRVAVMHCKGHQKDDAPTSTGNRRADEVAREVAIRPLSTQATISAGKRTADGSEFEKRTADGSEFESPKKKAKVE

SEQ ID NO: 6660 - protein, 2082 aa, synthetic construct
MPAAKRVKLDGGDKKYSIGLDIGTNSVGWAVITDEYKVPSKKFKVLGNTDRHSIKKNLIGALLFDSGETAEATRLKRTARRRYTRRKNRICYLQEIFSNEMAKVDDSFFHRLEESFLVEEDKKHERHPIFGNIVDEVAYHEKYPTIYHLRKKLVDSTDKADLRLIYLALAHMIKFRGHFLIEGDLNPDNSDVDKLFIQLVQTYNQLFEENPINASGVDAKAILSARLSKSRRLENLIAQLPGEKKNGLFGNLIALSLGLTPNFKSNFDLAEDAKLQLSKDTYDDDLDNLLAQIGDQYADLFLAAKNLSDAILLSDILRVNTEITKAPLSASMIKRYDEHHQDLTLLKALVRQQLPEKYKEIFFDQSKNGYAGYIDGGASQEEFYKFIKPILEKMDGTEELLVKLNREDLLRKQRTFDNGSIPHQIHLGELHAILRRQEDFYPFLKDNREKIEKILTFRIPYYVGPLARGNSRFAWMTRKSEETITPWNFEEVVDKGASAQSFIERMTNFDKNLPNEKVLPKHSLLYEYFTVYNELTKVKYVTEGMRKPAFLSGEQKKAIVDLLFKTNRKVTVKQLKEDYFKKIECFDSVEISGVEDRFNASLGTYHDLLKIIKDKDFLDNEENEDILEDIVLTLTLFEDREMIEERLKTYAHLFDDKVMKQLKRRRYTGWGRLSRKLINGIRDKQSGKTILDFLKSDGFANRNFMQLIHDDSLTFKEDIQKAQVSGQGDSLHEHIANLAGSPAIKKGILQTVKVVDELVKVMGRHKPENIVIEMARENQTTQKGQKNSRERMKRIEEGIKELGSQILKEHPVENTQLQNEKLYLYYLQNGRDMYVDQELDINRLSDYDVDHIVPQSFLKDDSIDNKVLTRSDKARGKSDNVPSEEVVKKMKNYWRQLLNAKLITQRKFDNLTKAERGGLSELDKAGFIKRQLVETRQITKHVAQILDSRMNTKYDENDKLIREVKVITLKSKLVSDFRKDFQFYKVREINNYHHAHDAYLNAVVGTALIKKYPKLESEFVYGDYKVYDVRKMIAKSEQEIGKATAKYFFYSNIMNFFKTEITLANGEIRKRPLIETNGETGEIVWDKGRDFATVRKVLSMPQVNIVKKTEVQTGGFSKESILPKRNSDKLIARKKDWDPKKYGGFDSPTVAYSVLVVAKVEKGKSKKLKSVKELLGITIMERSSFEKNPIDFLEAKGYKEVKKDLIIKLPKYSLFELENGRKRMLASAGELQKGNELALPSKYVNFLYLASHYEKLKGSPEDNEQKQLFVEQHKHYLDEIIEQISEFSKRVILADANLDKVLSAYNKHRDKPIREQAENIIHLFTLTNLGAPAAFKYFDTTIDRKRYTSTKEVLDATLIHQSITGLYETRIDLSQLGGDGGGGGGSSGGVPWILKKPLELTIKLDLEEQQGTLLNNSILSKKGKEELKQLFEKYSALWQSWENQVGHRRIRPHKIATGTVKPTPQKQYHINPKAKPDIQIVINDLLKQGVLIQKESTMNTPVYPVPKPNGRWRMVLDYRAVNKVTPLIAVQNQHSYGILGSLFKGRYKTTIDLSNGFWAHPIVPEDYWITAFTWQGKQYCWTVLPQGFLNSPGLFTGDVVDLLQGIPNVEVYVDDVYISHDSEKEHLEYLDILFNRLKEAGYIISLKKSNIANSIVDFLGFQITNEGRGLTDTFKEKLENITAPTTLKQLQSILGLLNFARNFIPDFTELIAPLYALIPKSTKNYVPWQIEHSTTLETLITKLNGAEYLQGRKGDKTLIMKVNASYTTGYIRYYNEGEKKPISYVSIVFSKTELKFTELEKLLTTVHKGLLKALDLSMGQNIHVYSPIVSMQNIQKTPQTAKKALASRWLSWLSYLEDPRIRFFYDPQMPALKDLPAVDTGKDNKKHPSNFQHIFYTDGSAITSPTKEGHLNAGMGIVYFINKDGNLQKQQEWSISLGNHTAQFAEIAAFEFALKKCLPLGGNILVVTDSNYVAKAYNEELDVWASNGFVNNRKKPLKHISKWKSVADLKRLRPDVVVTHEPGHQKLDSSPHAYGNNLADQLATQASFKVHAGKRTADGSEFEKRTADGSEFESPKKKAKVE

SEQ ID NO: 6661 - protein, 2091 aa, synthetic construct
MPAAKRVKLDGGDKKYSIGLDIGTNSVGWAVITDEYKVPSKKFKVLGNTDRHSIKKNLIGALLFDSGETAEATRLKRTARRRYTRRKNRICYLQEIFSNEMAKVDDSFFHRLEESFLVEEDKKHERHPIFGNIVDEVAYHEKYPTIYHLRKKLVDSTDKADLRLIYLALAHMIKFRGHFLIEGDLNPDNSDVDKLFIQLVQTYNQLFEENPINASGVDAKAILSARLSKSRRLENLIAQLPGEKKNGLFGNLIALSLGLTPNFKSNFDLAEDAKLQLSKDTYDDDLDNLLAQIGDQYADLFLAAKNLSDAILLSDILRVNTEITKAPLSASMIKRYDEHHQDLTLLKALVRQQLPEKYKEIFFDQSKNGYAGYIDGGASQEEFYKFIKPILEKMDGTEELLVKLNREDLLRKQRTFDNGSIPHQIHLGELHAILRRQEDFYPFLKDNREKIEKILTFRIPYYVGPLARGNSRFAWMTRKSEETITPWNFEEVVDKGASAQSFIERMTNFDKNLPNEKVLPKHSLLYEYFTVYNELTKVKYVTEGMRKPAFLSGEQKKAIVDLLFKTNRKVTVKQLKEDYFKKIECFDSVEISGVEDRFNASLGTYHDLLKIIKDKDFLDNEENEDILEDIVLTLTLFEDREMIEERLKTYAHLFDDKVMKQLKRRRYTGWGRLSRKLINGIRDKQSGKTILDFLKSDGFANRNFMQLIHDDSLTFKEDIQKAQVSGQGDSLHEHIANLAGSPAIKKGILQTVKVVDELVKVMGRHKPENIVIEMARENQTTQKGQKNSRERMKRIEEGIKELGSQILKEHPVENTQLQNEKLYLYYLQNGRDMYVDQELDINRLSDYDVDHIVPQSFLKDDSIDNKVLTRSDKARGKSDNVPSEEVVKKMKNYWRQLLNAKLITQRKFDNLTKAERGGLSELDKAGFIKRQLVETRQITKHVAQILDSRMNTKYDENDKLIREVKVITLKSKLVSDFRKDFQFYKVREINNYHHAHDAYLNAVVGTALIKKYPKLESEFVYGDYKVYDVRKMIAKSEQEIGKATAKYFFYSNIMNFFKTEITLANGEIRKRPLIETNGETGEIVWDKGRDFATVRKVLSMPQVNIVKKTEVQTGGFSKESILPKRNSDKLIARKKDWDPKKYGGFDSPTVAYSVLVVAKVEKGKSKKLKSVKELLGITIMERSSFEKNPIDFLEAKGYKEVKKDLIIKLPKYSLFELENGRKRMLASAGELQKGNELALPSKYVNFLYLASHYEKLKGSPEDNEQKQLFVEQHKHYLDEIIEQISEFSKRVILADANLDKVLSAYNKHRDKPIREQAENIIHLFTLTNLGAPAAFKYFDTTIDRKRYTSTKEVLDATLIHQSITGLYETRIDLSQLGGDGGGGGGSSGGTLGIEDEYRLHETSTEPDVSLGSTWLSDFPQAWAETGGMGLAVRQAPLIIPLKATSTPVSIQQYPMSHEARLGIKPHIQRLLDQGILVPCQSPWNTPLLPVKKPGTNDYRPVQDLREVNKRVEDIHPTVPNPYNLLSGLPPSHQWYTVLDLKDAFFCLRLHPTSQPLFAFEWRDPGMGISGQLTWTRLPQGFKNSPTLFDEALHRDLADFRIQHPDLILLQYVDDILLAATSELDCQQGTRALLQTLGDLGYRASAKKAQICQKQVKYLGYLLREGQRWLTEARKETVMGQPVPKTPRQLREFLGTAGFCRLWIPGFAEMAAPLYPLTKTGTLFSWGPDQQKAYQEIKQALLTAPALGLPDLTKPFELFVDEKQGYAKGVLTQKLGPWRRPVAYLSKKLDPVAAGWPPCLRMVAAIAVLTKDAGKLTMGQPLVILAPHAVEALVKQPPDRWLSNARMTHYQAMLLDTDRVQFGPVVALNPATLLPLPEEGAPHDCLEILAETHGTRPDLTDQPIPDADHTWYTDGSSFLQEGQRKAGAAVTTETEVIWAGALPAGTSAQRAELIALTQALKMAEGKRLNVYTDSRYAFATAHIHGEIYRRRGLLTSEGREIKNKSEILALLKALFLPKRLSIIHCLGHQKGDSAEARGNRLADQAAREAAIKTPPDTSTLLAGKRTADGSEFEKRTADGSEFESPKKKAKVE

SEQ ID NO: 6662 - protein, 2091 aa, synthetic construct
MPAAKRVKLDGGDKKYSIGLDIGTNSVGWAVITDEYKVPSKKFKVLGNTDRHSIKKNLIGALLFDSGETAEATRLKRTARRRYTRRKNRICYLQEIFSNEMAKVDDSFFHRLEESFLVEEDKKHERHPIFGNIVDEVAYHEKYPTIYHLRKKLVDSTDKADLRLIYLALAHMIKFRGHFLIEGDLNPDNSDVDKLFIQLVQTYNQLFEENPINASGVDAKAILSARLSKSRRLENLIAQLPGEKKNGLFGNLIALSLGLTPNFKSNFDLAEDAKLQLSKDTYDDDLDNLLAQIGDQYADLFLAAKNLSDAILLSDILRVNTEITKAPLSASMIKRYDEHHQDLTLLKALVRQQLPEKYKEIFFDQSKNGYAGYIDGGASQEEFYKFIKPILEKMDGTEELLVKLNREDLLRKQRTFDNGSIPHQIHLGELHAILRRQEDFYPFLKDNREKIEKILTFRIPYYVGPLARGNSRFAWMTRKSEETITPWNFEEVVDKGASAQSFIERMTNFDKNLPNEKVLPKHSLLYEYFTVYNELTKVKYVTEGMRKPAFLSGEQKKAIVDLLFKTNRKVTVKQLKEDYFKKIECFDSVEISGVEDRFNASLGTYHDLLKIIKDKDFLDNEENEDILEDIVLTLTLFEDREMIEERLKTYAHLFDDKVMKQLKRRRYTGWGRLSRKLINGIRDKQSGKTILDFLKSDGFANRNFMQLIHDDSLTFKEDIQKAQVSGQGDSLHEHIANLAGSPAIKKGILQTVKVVDELVKVMGRHKPENIVIEMARENQTTQKGQKNSRERMKRIEEGIKELGSQILKEHPVENTQLQNEKLYLYYLQNGRDMYVDQELDINRLSDYDVDHIVPQSFLKDDSIDNKVLTRSDKARGKSDNVPSEEVVKKMKNYWRQLLNAKLITQRKFDNLTKAERGGLSELDKAGFIKRQLVETRQITKHVAQILDSRMNTKYDENDKLIREVKVITLKSKLVSDFRKDFQFYKVREINNYHHAHDAYLNAVVGTALIKKYPKLESEFVYGDYKVYDVRKMIAKSEQEIGKATAKYFFYSNIMNFFKTEITLANGEIRKRPLIETNGETGEIVWDKGRDFATVRKVLSMPQVNIVKKTEVQTGGFSKESILPKRNSDKLIARKKDWDPKKYGGFDSPTVAYSVLVVAKVEKGKSKKLKSVKELLGITIMERSSFEKNPIDFLEAKGYKEVKKDLIIKLPKYSLFELENGRKRMLASAGELQKGNELALPSKYVNFLYLASHYEKLKGSPEDNEQKQLFVEQHKHYLDEIIEQISEFSKRVILADANLDKVLSAYNKHRDKPIREQAENIIHLFTLTNLGAPAAFKYFDTTIDRKRYTSTKEVLDATLIHQSITGLYETRIDLSQLGGDGGGGGGSSGGTLNIEDEYRLHETSKEPDVSLGSTWLSDFPQAWAETGGMGLAVRQAPLIIPLKATSTPVSIKQYPMSQEARLGIKPHIQRLLDQGILVPCQSPWNTPLLPVKKPGTNDYRPVQDLREVNKRVEDIHPTVPNPYNLLSGLPPSHQWYTVLDLKDAFFCLRLHPTSQPLFAFEWRDPEMGISGQLTWTRLPQGFKNSPTLFNEALHRDLAGFRIQHPDLILLQYVDDLLLAATSELDCQQGTRALLQTLGDLGYRASAKKAQICQKQVKYLGYLLKEGQRWLTEARKETVMGQPIPKTPRQLREFLGTAGFCRLWIPGFAEMAAPLYPLTKPGTLFNWGPDQQKAFQEIKQALLTAPALGLPDLTKPFELFVDEKQGYAKGVLTQKLGPWRRPVAYLSKKLDPVAAGWPPCLRMVAAIAVLTKDAGKLTMGQPLVILAPHAVEALVKQPPDRWLSNARMTHYQALLLDTDRVQFGPVVALNPATLLPLPEEGLQHDCLDILAEAHGTRSDLMDQPLPDADHTWYTDGSSFLQEGQRKAGAAVTTETEVIWARALPAGTSAQRAELIALTQALKMAEGKKLNVYTDSRYAFATAHIHGEIYRRRGWLTSEGKEIKNKDEILALLKALFLPKRLSIIHCPGHQKGNSAEARGNRMADQAAREVATRETPETSTLLAGKRTADGSEFEKRTADGSEFESPKKKAKVE

SEQ ID NO: 6663 - protein, 2091 aa, synthetic construct
MPAAKRVKLDGGDKKYSIGLDIGTNSVGWAVITDEYKVPSKKFKVLGNTDRHSIKKNLIGALLFDSGETAEATRLKRTARRRYTRRKNRICYLQEIFSNEMAKVDDSFFHRLEESFLVEEDKKHERHPIFGNIVDEVAYHEKYPTIYHLRKKLVDSTDKADLRLIYLALAHMIKFRGHFLIEGDLNPDNSDVDKLFIQLVQTYNQLFEENPINASGVDAKAILSARLSKSRRLENLIAQLPGEKKNGLFGNLIALSLGLTPNFKSNFDLAEDAKLQLSKDTYDDDLDNLLAQIGDQYADLFLAAKNLSDAILLSDILRVNTEITKAPLSASMIKRYDEHHQDLTLLKALVRQQLPEKYKEIFFDQSKNGYAGYIDGGASQEEFYKFIKPILEKMDGTEELLVKLNREDLLRKQRTFDNGSIPHQIHLGELHAILRRQEDFYPFLKDNREKIEKILTFRIPYYVGPLARGNSRFAWMTRKSEETITPWNFEEVVDKGASAQSFIERMTNFDKNLPNEKVLPKHSLLYEYFTVYNELTKVKYVTEGMRKPAFLSGEQKKAIVDLLFKTNRKVTVKQLKEDYFKKIECFDSVEISGVEDRFNASLGTYHDLLKIIKDKDFLDNEENEDILEDIVLTLTLFEDREMIEERLKTYAHLFDDKVMKQLKRRRYTGWGRLSRKLINGIRDKQSGKTILDFLKSDGFANRNFMQLIHDDSLTFKEDIQKAQVSGQGDSLHEHIANLAGSPAIKKGILQTVKVVDELVKVMGRHKPENIVIEMARENQTTQKGQKNSRERMKRIEEGIKELGSQILKEHPVENTQLQNEKLYLYYLQNGRDMYVDQELDINRLSDYDVDHIVPQSFLKDDSIDNKVLTRSDKARGKSDNVPSEEVVKKMKNYWRQLLNAKLITQRKFDNLTKAERGGLSELDKAGFIKRQLVETRQITKHVAQILDSRMNTKYDENDKLIREVKVITLKSKLVSDFRKDFQFYKVREINNYHHAHDAYLNAVVGTALIKKYPKLESEFVYGDYKVYDVRKMIAKSEQEIGKATAKYFFYSNIMNFFKTEITLANGEIRKRPLIETNGETGEIVWDKGRDFATVRKVLSMPQVNIVKKTEVQTGGFSKESILPKRNSDKLIARKKDWDPKKYGGFDSPTVAYSVLVVAKVEKGKSKKLKSVKELLGITIMERSSFEKNPIDFLEAKGYKEVKKDLIIKLPKYSLFELENGRKRMLASAGELQKGNELALPSKYVNFLYLASHYEKLKGSPEDNEQKQLFVEQHKHYLDEIIEQISEFSKRVILADANLDKVLSAYNKHRDKPIREQAENIIHLFTLTNLGAPAAFKYFDTTIDRKRYTSTKEVLDATLIHQSITGLYETRIDLSQLGGDGGGGGGSSGGTLNIEDEHRLHETSKEPDVSLGSTWLSDFPQAWAETGGMGLAVRQAPLIIPLKATSTPVSIKQYPMSQEARLGIKPHIQRLLDQGILVPCQSPWNTPLLPVKKPGTNDYRPVQDLREVNKRVEDIHPTVPNPYNLLSGLPPSHQWYTVLDLKDAFFCLRLHPTSQPLFAFEWRDPEMGISGQLTWTRLPQGFKNSPTLFNEALHRDLADFRIQHPDLILLQYVDDLLLAATSELDCQQGTRALLQTLGNLGYRASAKKAQICQKQVKYLGYLLKEGQRWLTEARKETVMGQPTPKTPRQLREFLGTAGFCRLWIPGFAEMAAPLYPLTKPGTLFNWGPDQQKAYQEIKQALLTAPALGLPDLTKPFELFVDEKQGYAKGVLTQKLGPWRRPVAYLSKKLDPVAAGWPPCLRMVAAIAVLTKDAGKLTMGQPLVILAPHAVEALVKQPPDRWLSNARMTHYQALLLDTDRVQFGPVVALNPATLLPLPEEGLQHNCLDILAEAHGTRPDLTDQPLPDADHTWYTDGSSLLQEGQRKAGAAVTTETEVIWAKALPAGTSAQRAELIALTQALKMAEGKKLNVYTDSRYAFATAHIHGEIYRRRGWLTSEGKEIKNKDEILALLKALFLPKRLSIIHCPGHQKGHSAEARGNRMADQAARKAAITETPDTSTLLAGKRTADGSEFEKRTADGSEFESPKKKAKVE

SEQ ID NO: 6664 - protein, 2091 aa, synthetic construct; identical to SEQ ID NO: 6663

SEQ ID NO: 6665 - protein, 2083 aa, synthetic construct
MPAAKRVKLDGGDKKYSIGLDIGTNSVGWAVITDEYKVPSKKFKVLGNTDRHSIKKNLIGALLFDSGETAEATRLKRTARRRYTRRKNRICYLQEIFSNEMAKVDDSFFHRLEESFLVEEDKKHERHPIFGNIVDEVAYHEKYPTIYHLRKKLVDSTDKADLRLIYLALAHMIKFRGHFLIEGDLNPDNSDVDKLFIQLVQTYNQLFEENPINASGVDAKAILSARLSKSRRLENLIAQLPGEKKNGLFGNLIALSLGLTPNFKSNFDLAEDAKLQLSKDTYDDDLDNLLAQIGDQYADLFLAAKNLSDAILLSDILRVNTEITKAPLSASMIKRYDEHHQDLTLLKALVRQQLPEKYKEIFFDQSKNGYAGYIDGGASQEEFYKFIKPILEKMDGTEELLVKLNREDLLRKQRTFDNGSIPHQIHLGELHAILRRQEDFYPFLKDNREKIEKILTFRIPYYVGPLARGNSRFAWMTRKSEETITPWNFEEVVDKGASAQSFIERMTNFDKNLPNEKVLPKHSLLYEYFTVYNELTKVKYVTEGMRKPAFLSGEQKKAIVDLLFKTNRKVTVKQLKEDYFKKIECFDSVEISGVEDRFNASLGTYHDLLKIIKDKDFLDNEENEDILEDIVLTLTLFEDREMIEERLKTYAHLFDDKVMKQLKRRRYTGWGRLSRKLINGIRDKQSGKTILDFLKSDGFANRNFMQLIHDDSLTFKEDIQKAQVSGQGDSLHEHIANLAGSPAIKKGILQTVKVVDELVKVMGRHKPENIVIEMARENQTTQKGQKNSRERMKRIEEGIKELGSQILKEHPVENTQLQNEKLYLYYLQNGRDMYVDQELDINRLSDYDVDHIVPQSFLKDDSIDNKVLTRSDKARGKSDNVPSEEVVKKMKNYWRQLLNAKLITQRKFDNLTKAERGGLSELDKAGFIKRQLVETRQITKHVAQILDSRMNTKYDENDKLIREVKVITLKSKLVSDFRKDFQFYKVREINNYHHAHDAYLNAVVGTALIKKYPKLESEFVYGDYKVYDVRKMIAKSEQEIGKATAKYFFYSNIMNFFKTEITLANGEIRKRPLIETNGETGEIVWDKGRDFATVRKVLSMPQVNIVKKTEVQTGGFSKESILPKRNSDKLIARKKDWDPKKYGGFDSPTVAYSVLVVAKVEKGKSKKLKSVKELLGITIMERSSFEKNPIDFLEAKGYKEVKKDLIIKLPKYSLFELENGRKRMLASAGELQKGNELALPSKYVNFLYLASHYEKLKGSPEDNEQKQLFVEQHKHYLDEIIEQISEFSKRVILADANLDKVLSAYNKHRDKPIREQAENIIHLFTLTNLGAPAAFKYFDTTIDRKRYTSTKEVLDATLIHQSITGLYETRIDLSQLGGDGGGGGGSSGGLDDEYRLYSPLVKPDQNIQFWLEQFPQAWAETAGMGLAKQVPPQVIQLKASATPVSVRQYPLSKEAQEGIRPHVQRLIQQGILVPVQSPWNTPLLPVRKPGTNDYRPVQDLREVNKRVQDIHPTVPNPYNLLCALPPQRSWYTVLDLKDAFFCLRLHPTSQPLFAFEWRDPGTGRTGQLTWTRLPQGFKNSPTIFNEALHRDLANFRIQHPQVTLLQYVDDLLLAGATKQDCLEGTKALLLELSDLGYRASAKKAQICRREVTYLGYSLRDGQRWLTEARKKTVVQIPAPTTAKQVREFLGKAGFCRLFIPGFATLAAPLYPLTKPKGEFSWAPEHQKAFDAIKKALLSAPALALPDVTKPFTLYVDERKGVARGVLTQTLGPWRRPVAYLSKKLDPVASGWPVCLKAIAAVAILVKDADKLTLGQNITVIAPHALENIVRQPPDRWMTNARMTHYQSLLLTERVTFAPPAALNPATLLPEETDEPVTHDCHQLLIEETGVRKDLTDIPLTGEVLTWFTDGSSYVVEGKRMAGAAVVDGTRTIWASSLPEGTSAQKAELMALTQALRLAEGKSINIYTDSRYAFATAHVHGAIYKQRGWLTSAGREIKNKEEILSLLEALHLPKRLAIIHCPGHQKAKDPISRGNQMADRVAKQAAQGVNLLPAGKRTADGSEFEKRTADGSEFESPKKKAKVE

SEQ ID NO: 6666 - protein, 2083 aa, synthetic construct; identical to SEQ ID NO: 6665

SEQ ID NO: 6667 - protein, 2082 aa, synthetic construct
MPAAKRVKLDGGDKKYSIGLDIGTNSVGWAVITDEYKVPSKKFKVLGNTDRHSIKKNLIGALLFDSGETAEATRLKRTARRRYTRRKNRICYLQEIFSNEMAKVDDSFFHRLEESFLVEEDKKHERHPIFGNIVDEVAYHEKYPTIYHLRKKLVDSTDKADLRLIYLALAHMIKFRGHFLIEGDLNPDNSDVDKLFIQLVQTYNQLFEENPINASGVDAKAILSARLSKSRRLENLIAQLPGEKKNGLFGNLIALSLGLTPNFKSNFDLAEDAKLQLSKDTYDDDLDNLLAQIGDQYADLFLAAKNLSDAILLSDILRVNTEITKAPLSASMIKRYDEHHQDLTLLKALVRQQLPEKYKEIFFDQSKNGYAGYIDGGASQEEFYKFIKPILEKMDGTEELLVKLNREDLLRKQRTFDNGSIPHQIHLGELHAILRRQEDFYPFLKDNREKIEKILTFRIPYYVGPLARGNSRFAWMTRKSEETITPWNFEEVVDKGASAQSFIERMTNFDKNLPNEKVLPKHSLLYEYFTVYNELTKVKYVTEGMRKPAFLSGEQKKAIVDLLFKTNRKVTVKQLKEDYFKKIECFDSVEISGVEDRFNASLGTYHDLLKIIKDKDFLDNEENEDILEDIVLTLTLFEDREMIEERLKTYAHLFDDKVMKQLKRRRYTGWGRLSRKLINGIRDKQSGKTILDFLKSDGFANRNFMQLIHDDSLTFKEDIQKAQVSGQGDSLHEHIANLAGSPAIKKGILQTVKVVDELVKVMGRHKPENIVIEMARENQTTQKGQKNSRERMKRIEEGIKELGSQILKEHPVENTQLQNEKLYLYYLQNGRDMYVDQELDINRLSDYDVDHIVPQSFLKDDSIDNKVLTRSDKARGKSDNVPSEEVVKKMKNYWRQLLNAKLITQRKFDNLTKAERGGLSELDKAGFIKRQLVETRQITKHVAQILDSRMNTKYDENDKLIREVKVITLKSKLVSDFRKDFQFYKVREINNYHHAHDAYLNAVVGTALIKKYPKLESEFVYGDYKVYDVRKMIAKSEQEIGKATAKYFFYSNIMNFFKTEITLANGEIRKRPLIETNGETGEIVWDKGRDFATVRKVLSMPQVNIVKKTEVQTGGFSKESILPKRNSDKLIARKKDWDPKKYGGFDSPTVAYSVLVVAKVEKGKSKKLKSVKELLGITIMERSSFEKNPIDFLEAKGYKEVKKDLIIKLPKYSLFELENGRKRMLASAGELQKGNELALPSKYVNFLYLASHYEKLKGSPEDNEQKQLFVEQHKHYLDEIIEQISEFSKRVILADANLDKVLSAYNKHRDKPIREQAENIIHLFTLTNLGAPAAFKYFDTTIDRKRYTSTKEVLDATLIHQSITGLYETRIDLSQLGGDGGGGGGSSGGIPWLMKKPLQLTTLVPLQEYEERLLKQTMLTGSYKEKLQSLFLKYDALWQHWENQVGHRRIKPHHIATGTVNPRPQKQYPINPKAKASIQTVINDLLKQGVLIQQNSIMNTPVYPVPKPDGKWRMVLDYREVNKTIPLIAAQNQHSAGILSSIFRGKYKTTLDLSNGFWAHSITPESYWLTAFTWLGQQYCWTRLPQGFLNSPALFNADVVDLLKEVPNVQVYVDDIYISHDDPREHLEQLEKVFSLLLNAGYVVSLKKSEIAQHEVEFLGFNITKEGRGLTETFKQKLLNITPPRDLKQLQSILGLLNFARNFIPNFSELVKPLYNIIATAPGKYITWTTDNSQQLQNIISMLNSAENLEERNPEVRLIMKVNTSPSAGYIRFYNEFAKRPIMYLNYVYTKAEVKFTNTEKLLTTIHKGLIKALDLGMGQEILVYSPIVSMTKIQKTPLPERKALPIRWITWMSYLEDPRIQFHYDKTLPELQQVPTVTDDIIAKIKHPSEFSMVFYTDGSAIKHPNVNKSHNAGMGIAQVQFKPEFTVINTWSIPLGDHTAQLAEVAAVEFACKKALKIDGPVLIVTDSFYVAESVNKELPYWQSNGFFNNKKKPLKHVSKWKSIADCIQLKPDIIIIHEKGHQPTASTFHTEGNNLADKLATQGSYVVNAGKRTADGSEFEKRTADGSEFESPKKKAKVE

SEQ ID NO: 6668 - protein, 2089 aa, synthetic construct
MPAAKRVKLDGGDKKYSIGLDIGTNSVGWAVITDEYKVPSKKFKVLGNTDRHSIKKNLIGALLFDSGETAEATRLKRTARRRYTRRKNRICYLQEIFSNEMAKVDDSFFHRLEESFLVEEDKKHERHPIFGNIVDEVAYHEKYPTIYHLRKKLVDSTDKADLRLIYLALAHMIKFRGHFLIEGDLNPDNSDVDKLFIQLVQTYNQLFEENPINASGVDAKAILSARLSKSRRLENLIAQLPGEKKNGLFGNLIALSLGLTPNFKSNFDLAEDAKLQLSKDTYDDDLDNLLAQIGDQYADLFLAAKNLSDAILLSDILRVNTEITKAPLSASMIKRYDEHHQDLTLLKALVRQQLPEKYKEIFFDQSKNGYAGYIDGGASQEEFYKFIKPILEKMDGTEELLVKLNREDLLRKQRTFDNGSIPHQIHLGELHAILRRQEDFYPFLKDNREKIEKILTFRIPYYVGPLARGNSRFAWMTRKSEETITPWNFEEVVDKGASAQSFIERMTNFDKNLPNEKVLPKHSLLYEYFTVYNELTKVKYVTEGMRKPAFLSGEQKKAIVDLLFKTNRKVTVKQLKEDYFKKIECFDSVEISGVEDRFNASLGTYHDLLKIIKDKDFLDNEENEDILEDIVLTLTLFEDREMIEERLKTYAHLFDDKVMKQLKRRRYTGWGRLSRKLINGIRDKQSGKTILDFLKSDGFANRNFMQLIHDDSLTFKEDIQKAQVSGQGDSLHEHIANLAGSPAIKKGILQTVKVVDELVKVMGRHKPENIVIEMARENQTTQKGQKNSRERMKRIEEGIKELGSQILKEHPVENTQLQNEKLYLYYLQNGRDMYVDQELDINRLSDYDVDHIVPQSFLKDDSIDNKVLTRSDKARGKSDNVPSEEVVKKMKNYWRQLLNAKLITQRKFDNLTKAERGGLSELDKAGFIKRQLVETRQITKHVAQILDSRMNTKYDENDKLIREVKVITLKSKLVSDFRKDFQFYKVREINNYHHAHDAYLNAVVGTALIKKYPKLESEFVYGDYKVYDVRKMIAKSEQEIGKATAKYFFYSNIMNFFKTEITLANGEIRKRPLIETNGETGEIVWDKGRDFATVRKVLSMPQVNIVKKTEVQTGGFSKESILPKRNSDKLIARKKDWDPKKYGGFDSPTVAYSVLVVAKVEKGKSKKLKSVKELLGITIMERSSFEKNPIDFLEAKGYKEVKKDLIIKLPKYSLFELENGRKRMLASAGELQKGNELALPSKYVNFLYLASHYEKLKGSPEDNEQKQLFVEQHKHYLDEIIEQISEFSKRVILADANLDKVLSAYNKHRDKPIREQAENIIHLFTLTNLGAPAAFKYFDTTIDRKRYTSTKEVLDATLIHQSITGLYETRIDLSQLGGDGGGGGGSSGGVLNLEEEYRLHEKPVPSSIDPSWLQLFPTVWAERAGMGLANQVPPVVVELRSGASPVAVRQYPMSKEAREGIRPHIQRFLDLGVLVPCQSPWNTPLLPVKKPGTNDYRPVQDLREINKRVQDIHPTVPNPYNLLSSLPPSHTWYSVLDLKDAFFCLKLHPNSQPLFAFEWRDPEKGNTGQLTWTRLPQGFKNSPTLFNEALHRDLAPFRALNPQVVLLQYVDDLLVAAPTYRDCKEGTQKLLQELSKLGYRVSAKKAQLCQKEVTYLGYLLKEGKRWLTPARKATVMKIPPPTTPRQVREFLGTAGFCRLWIPGFASLAAPLYPLTKPSIPFIWTEEHQKAFDRIKEALLSAPALALPDLTKPFTLYVDERAGVARGVLTQTLGPWRRPVAYLSKKLDPVASGWPTCLKAVAAVALLLKDADKLTLGQNVTVIASHSLESIVRQPPDRWMTNARMTHYQSLLLNERVSFAPPAVLNPATLLPVESEATPVHRCSEILAEETGTRRDLKDQPLPGVPAWYTDGSSFIAEGKRRAGAAIVDGKRTVWASSLPEGTSAQKAELVALTQALRLAEGKDINIYTDSRYAFATAHIHGAIYKQRGWLTSAGKDIKNKEEILALLEAIHLPKRVAIIHCPGHQKGNDPVATGNRRADEAAKQAALSTRVLAETTKPAGKRTADGSEFEKRTADGSEFESPKKKAKVE

SEQ ID NO: 6669 - protein, 2089 aa, synthetic construct
MPAAKRVKLDGGDKKYSIGLDIGTNSVGWAVITDEYKVPSKKFKVLGNTDRHSIKKNLIGALLFDSGETAEATRLKRTARRRYTRRKNRICYLQEIFSNEMAKVDDSFFHRLEESFLVEEDKKHERHPIFGNIVDEVAYHEKYPTIYHLRKKLVDSTDKADLRLIYLALAHMIKFRGHFLIEGDLNPDNSDVDKLFIQLVQTYNQLFEENPINASGVDAKAILSARLSKSRRLENLIAQLPGEKKNGLFGNLIALSLGLTPNFKSNFDLAEDAKLQLSKDTYDDDLDNLLAQIGDQYADLFLAAKNLSDAILLSDILRVNTEITKAPLSASMIKRYDEHHQDLTLLKALVRQQLPEKYKEIFFDQSKNGYAGYIDGGASQEEFYKFIKPILEKMDGTEELLVKLNREDLLRKQRTFDNGSIPHQIHLGELHAILRRQEDFYPFLKDNREKIEKILTFRIPYYVGPLARGNSRFAWMTRKSEETITPWNFEEVVDKGASAQSFIERMTNFDKNLPNEKVLPKHSLLYEYFTVYNELTKVKYVTEGMRKPAFLSGEQKKAIVDLLFKTNRKVTVKQLKEDYFKKIECFDSVEISGVEDRFNASLGTYHDLLKIIKDKDFLDNEENEDILEDIVLTLTLFEDREMIEERLKTYAHLFDDKVMKQLKRRRYTGWGRLSRKLINGIRDKQSGKTILDFLKSDGFANRNFMQLIHDDSLTFKEDIQKAQVSGQGDSLHEHIANLAGSPAIKKGILQTVKVVDELVKVMGRHKPENIVIEMARENQTTQKGQKNSRERMKRIEEGIKELGSQILKEHPVENTQLQNEKLYLYYLQNGRDMYVDQELDINRLSDYDVDHIVPQSFLKDDSIDNKVLTRSDKARGKSDNVPSEEVVKKMKNYWRQLLNAKLITQRKFDNLTKAERGGLSELDKAGFIKRQLVETRQITKHVAQILDSRMNTKYDENDKLIREVKVITLKSKLVSDFRKDFQFYKVREINNYHHAHDAYLNAVVGTALIKKYPKLESEFVYGDYKVYDVRKMIAKSEQEIGKATAKYFFYSNIMNFFKTEITLANGEIRKRPLIETNGETGEIVWDKGRDFATVRKVLSMPQVNIVKKTEVQTGGFSKESILPKRNSDKLIARKKDWDPKKYGGFDSPTVAYSVLVVAKVEKGKSKKLKSVKELLGITIMERSSFEKNPIDFLEAKGYKEVKKDLIIKLPKYSLFELENGRKRMLASAGELQKGNELALPSKYVNFLYLASHYEKLKGSPEDNEQKQLFVEQHKHYLDEIIEQISEFSKRVILADANLDKVLSAYNKHRDKPIREQAENIIHLFTLTNLGAPAAFKYFDTTIDRKRYTSTKEVLDATLIHQSITGLYETRIDLSQLGGDGGGGGGSSGGVLNLEEEYRLHEKPVPSSIDPSWLQLFPTVWAERAGMGLANQVPPVVVELRSGASPVAVRQYPMSKEAREGIRPHIQRFLDLGVLVPCQSPWNTPLLPVKKPGTNDYRPVQDLREINKRVQDIHPTVPNPYNLLSSLPPSHTWYSVLDLKDAFFCLKLHPNSQPLFAFEWRDPEKGNTGQLTWTRLPQGFKNSPTLFNEALHRDLAPFRALNPQVVLLQYVDDLLVAAPTYRDCKEGTQKLLQELSKLGYRVSAKKAQLCQKEVTYLGYLLKEGKRWLTPARKATVMKIPPPTTPRQVREFLGKAGFCRLFIPGFASLAAPLYPLTKPSIPFIWTEEHQKAFDRIKEALLSAPALALPDLTKPFTLYVDERAGVARGVLTQTLGPWRRPVAYLSKKLDPVASGWPTCLKAVAAVALLLKDADKLTLGQNVTVIASHSLESIVRQPPDRWMTNARMTHYQSLLLNERVSFAPPAVLNPATLLPVESEATPVHRCSEILAEETGTRRDLKDQPLPGVPAWYTDGSSFIAEGKRRAGAAIVDGKRTVWASSLPEGTSAQKAELVALTQALRLAEGKDINIYTDSRYAFATAHIHGAIYKQRGWLTSAGKDIKNKEEILALLEAIHLPKRVAIIHCPGHQKGNDPVATGNRRADEAAKQAALSTRVLAETTKPAGKRTADGSEFEKRTADGSEFESPKKKAKVE

SEQ ID NO: 6670 - protein, 2091 aa, synthetic construct
MPAAKRVKLDGGDKKYSIGLDIGTNSVGWAVITDEYKVPSKKFKVLGNTDRHSIKKNLIGALLFDSGETAEATRLKRTARRRYTRRKNRICYLQEIFSNEMAKVDDSFFHRLEESFLVEEDKKHERHPIFGNIVDEVAYHEKYPTIYHLRKKLVDSTDKADLRLIYLALAHMIKFRGHFLIEGDLNPDNSDVDKLFIQLVQTYNQLFEENPINASGVDAKAILSARLSKSRRLENLIAQLPGEKKNGLFGNLIALSLGLTPNFKSNFDLAEDAKLQLSKDTYDDDLDNLLAQIGDQYADLFLAAKNLSDAILLSDILRVNTEITKAPLSASMIKRYDEHHQDLTLLKALVRQQLPEKYKEIFFDQSKNGYAGYIDGGASQEEFYKFIKPILEKMDGTEELLVKLNREDLLRKQRTFDNGSIPHQIHLGELHAILRRQEDFYPFLKDNREKIEKILTFRIPYYVGPLARGNSRFAWMTRKSEETITPWNFEEVVDKGASAQSFIERMTNFDKNLPNEKVLPKHSLLYEYFTVYNELTKVKYVTEGMRKPAFLSGEQKKAIVDLLFKTNRKVTVKQLKEDYFKKIECFDSVEISGVEDRFNASLGTYHDLLKIIKDKDFLDNEENEDILEDIVLTLTLFEDREMIEERLKTYAHLFDDKVMKQLKRRRYTGWGRLSRKLINGIRDKQSGKTILDFLKSDGFANRNFMQLIHDDSLTFKEDIQKAQVSGQGDSLHEHIANLAGSPAIKKGILQTVKVVDELVKVMGRHKPENIVIEMARENQTTQKGQKNSRERMKRIEEGIKELGSQILKEHPVENTQLQNEKLYLYYLQNGRDMYVDQELDINRLSDYDVDHIVPQSFLKDDSIDNKVLTRSDKARGKSDNVPSEEVVKKMKNYWRQLLNAKLITQRKFDNLTKAERGGLSELDKAGFIKRQLVETRQITKHVAQILDSRMNTKYDENDKLIREVKVITLKSKLVSDFRKDFQFYKVREINNYHHAHDAYLNAVVGTALIKKYPKLESEFVYGDYKVYDVRKMIAKSEQEIGKATAKYFFYSNIMNFFKTEITLANGEIRKRPLIETNGETGEIVWDKGRDFATVRKVLSMPQVNIVKKTEVQTGGFSKESILPKRNSDKLIARKKDWDPKKYGGFDSPTVAYSVLVVAKVEKGKSKKLKSVKELLGITIMERSSFEKNPIDFLEAKGYKEVKKDLIIKLPKYSLFELENGRKRMLASAGELQKGNELALPSKYVNFLYLASHYEKLKGSPEDNEQKQLFVEQHKHYLDEIIEQISEFSKRVILADANLDKVLSAYNKHRDKPIREQAENIIHLFTLTNLGAPAAFKYFDTTIDRKRYTSTKEVLDATLIHQSITGLYETRIDLSQLGGDGGGGGGSSGGTLNIEDEYRLHETSKEPDVPLGSTWLSDFPQAWAETGGMGLAVRQAPLIIPLKATSTPVSIKQYPMSQEARLGIKPHIQRLLDQGILVPCQSPWNTPLLPVKKPGTNDYRPVQDLREVNKRVEDIHPTVPNPYNLLSGLPPSHQWYTVLDLKDAFFCLRLHPTSQPLFAFEWRDPEMGISGQLTWTRLPQGFKNSPTLFNEALHRDLADFRIQHPDLILLQYVDDLLLAATSEQDCQRGTRALLQTLGNLGYRASAKKAQICQKQVKYLGYLLKEGQRWLTEARKETVMGQPTPKTPRQLREFLGTAGFCRLWIPGFAEMAAPLYPLTKPGTLFNWGPDQQKAYQEIKQALLTAPALGLPDLTKPFELFVDEKQGYAKGVLTQKLGPWRRPVAYLSKKLDPVAAGWPPCLRMVAAIAVLTKDAGKLTMGQPLVILAPHAVEALVKQPPDRWLSNARMTHYQAMLLDTDRVQFGPVVALNPATLLPLPEKEAPHDCLEILAETHGTRPDLTDQPIPDADYTWYTDGSSFLQEGQRRAGAAVTTETEVIWARALPAGTSAQRAELIALTQALKMAEGKKLNVYTDSRYAFATAHVHGEIYRRRGWLTSEGREIKNKNEILALLKALFLPKRLSIIHCPGHQKGNSAEARGNRMADQAAREAAMKAVLETSTLLAGKRTADGSEFEKRTADGSEFESPKKKAKVE

SEQ ID NO: 6671 - protein, 2093 aa, synthetic construct
MPAAKRVKLDGGDKKYSIGLDIGTNSVGWAVITDEYKVPSKKFKVLGNTDRHSIKKNLIGALLFDSGETAEATRLKRTARRRYTRRKNRICYLQEIFSNEMAKVDDSFFHRLEESFLVEEDKKHERHPIFGNIVDEVAYHEKYPTIYHLRKKLVDSTDKADLRLIYLALAHMIKFRGHFLIEGDLNPDNSDVDKLFIQLVQTYNQLFEENPINASGVDAKAILSARLSKSRRLENLIAQLPGEKKNGLFGNLIALSLGLTPNFKSNFDLAEDAKLQLSKDTYDDDLDNLLAQIGDQYADLFLAAKNLSDAILLSDILRVNTEITKAPLSASMIKRYDEHHQDLTLLKALVRQQLPEKYKEIFFDQSKNGYAGYIDGGASQEEFYKFIKPILEKMDGTEELLVKLNREDLLRKQRTFDNGSIPHQIHLGELHAILRRQEDFYPFLKDNREKIEKILTFRIPYYVGPLARGNSRFAWMTRKSEETITPWNFEEVVDKGASAQSFIERMTNFDKNLPNEKVLPKHSLLYEYFTVYNELTKVKYVTEGMRKPAFLSGEQKKAIVDLLFKTNRKVTVKQLKEDYFKKIECFDSVEISGVEDRFNASLGTYHDLLKIIKDKDFLDNEENEDILEDIVLTLTLFEDREMIEERLKTYAHLFDDKVMKQLKRRRYTGWGRLSRKLINGIRDKQSGKTILDFLKSDGFANRNFMQLIHDDSLTFKEDIQKAQVSGQGDSLHEHIANLAGSPAIKKGILQTVKVVDELVKVMGRHKPENIVIEMARENQTTQKGQKNSRERMKRIEEGIKELGSQILKEHPVENTQLQNEKLYLYYLQNGRDMYVDQELDINRLSDYDVDHIVPQSFLKDDSIDNKVLTRSDKARGKSDNVPSEEVVKKMKNYWRQLLNAKLITQRKFDNLTKAERGGLSELDKAGFIKRQLVETRQITKHVAQILDSRMNTKYDENDKLIREVKVITLKSKLVSDFRKDFQFYKVREINNYHHAHDAYLNAVVGTALIKKYPKLESEFVYGDYKVYDVRKMIAKSEQEIGKATAKYFFYSNIMNFFKTEITLANGEIRKRPLIETNGETGEIVWDKGRDFATVRKVLSMPQVNIVKKTEVQTGGFSKESILPKRNSDKLIARKKDWDPKKYGGFDSPTVAYSVLVVAKVEKGKSKKLKSVKELLGITIMERSSFEKNPIDFLEAKGYKEVKKDLIIKLPKYSLFELENGRKRMLASAGELQKGNELALPSKYVNFLYLASHYEKLKGSPEDNEQKQLFVEQHKHYLDEIIEQISEFSKRVILADANLDKVLSAYNKHRDKPIREQAENIIHLFTLTNLGAPAAFKYFDTTIDRKRYTSTKEVLDATLIHQSITGLYETRIDLSQLGGDGGGSSGGGGGTAPLEEEYRLFLEAPIQNVTLLEQWKREIPKVWAEINPPGLASTQAPIHVQLLSTALPVRVRQYPITLEAKRSLRETIRKFRAAGILRPVHSPWNTPLLPVRKSGTSEYRMVQDLREVNKRVETIHPTVPNPYTLLSLLPPDRIWYSVLDLKDAFFCIPLAPESQLIFAFEWADAEEGESGQLTWTRLPQGFKNSPTLFDEALNRDLQGFRLDHPSVSLLQYVDDLLIAADTQAACLSATRDLLMTLAELGYRVSGKKAQLCQEEVTYLGFKIHKGSRSLSNSRTQAILQIPVPKTKRQVREFLGTIGYCRLWIPGFAELAQPLYAATRGGNDPLVWGEKEEEAFQSLKLALTQPPALALPSLDKPFQLFVEETSGAAKGVLTQALGPWKRPVAYLSKRLDPVAAGWPRCLRAIAAAALLTREASKLTFGQDIEITSSHNLESLLRSPPDKWLTNARITQYQVLLLDPPRVRFKQTAALNPATLLPETDDTLPIHHCLDTLDSLTSTRPDLTDQPLAQAEATLFTDGSSYIRDGKRYAGAAVVTLDSVIWAEPLPIGTSAQKAELIALTKALEWSKDKSVNIYTDSRYAFATLHVHGMIYRERGLLTAGGKAIKNAPEILALLTAVWLPKRVAVMHCKGHQKDDAPTSTGNRRADEVAREVAIRPLSTQATISAGKRTADGSEFEKRTADGSEFESPKKKAKVE

SEQ ID NO: 6672 - protein, 2097 aa, synthetic construct
MPAAKRVKLDGGDKKYSIGLDIGTNSVGWAVITDEYKVPSKKFKVLGNTDRHSIKKNLIGALLFDSGETAEATRLKRTARRRYTRRKNRICYLQEIFSNEMAKVDDSFFHRLEESFLVEEDKKHERHPIFGNIVDEVAYHEKYPTIYHLRKKLVDSTDKADLRLIYLALAHMIKFRGHFLIEGDLNPDNSDVDKLFIQLVQTYNQLFEENPINASGVDAKAILSARLSKSRRLENLIAQLPGEKKNGLFGNLIALSLGLTPNFKSNFDLAEDAKLQLSKDTYDDDLDNLLAQIGDQYADLFLAAKNLSDAILLSDILRVNTEITKAPLSASMIKRYDEHHQDLTLLKALVRQQLPEKYKEIFFDQSKNGYAGYIDGGASQEEFYKFIKPILEKMDGTEELLVKLNREDLLRKQRTFDNGSIPHQIHLGELHAILRRQEDFYPFLKDNREKIEKILTFRIPYYVGPLARGNSRFAWMTRKSEETITPWNFEEVVDKGASAQSFIERMTNFDKNLPNEKVLPKHSLLYEYFTVYNELTKVKYVTEGMRKPAFLSGEQKKAIVDLLFKTNRKVTVKQLKEDYFKKIECFDSVEISGVEDRFNASLGTYHDLLKIIKDKDFLDNEENEDILEDIVLTLTLFEDREMIEERLKTYAHLFDDKVMKQLKRRRYTGWGRLSRKLINGIRDKQSGKTILDFLKSDGFANRNFMQLIHDDSLTFKEDIQKAQVSGQGDSLHEHIANLAGSPAIKKGILQTVKVVDELVKVMGRHKPENIVIEMARENQTTQKGQKNSRERMKRIEEGIKELGSQILKEHPVENTQLQNEKLYLYYLQNGRDMYVDQELDINRLSDYDVDHIVPQSFLKDDSIDNKVLTRSDKARGKSDNVPSEEVVKKMKNYWRQLLNAKLITQRKFDNLTKAERGGLSELDKAGFIKRQLVETRQITKHVAQILDSRMNTKYDENDKLIREVKVITLKSKLVSDFRKDFQFYKVREINNYHHAHDAYLNAVVGTALIKKYPKLESEFVYGDYKVYDVRKMIAKSEQEIGKATAKYFFYSNIMNFFKTEITLANGEIRKRPLIETNGETGEIVWDKGRDFATVRKVLSMPQVNIVKKTEVQTGGFSKESILPKRNSDKLIARKKDWDPKKYGGFDSPTVAYSVLVVAKVEKGKSKKLKSVKELLGITIMERSSFEKNPIDFLEAKGYKEVKKDLIIKLPKYSLFELENGRKRMLASAGELQKGNELALPSKYVNFLYLASHYEKLKGSPEDNEQKQLFVEQHKHYLDEIIEQISEFSKRVILADANLDKVLSAYNKHRDKPIREQAENIIHLFTLTNLGAPAAFKYFDTTIDRKRYTSTKEVLDATLIHQSITGLYETRIDLSQLGGDGGGSSGGGGGTVSLQDEHRLFDIPVTTSLPDVWLQDFPQAWAETGGLGRAKCQAPIIIDLKPTAVPVSIKQYPMSLEAHMGIRQHIIKFLELGVLRPCRSPWNTPLLPVKKPGTQDYRPVQDLREINKRTVDIHPTVPNPYNLLSTLKPDYSWYTVLDLKDAFFCLPLAPQSQELFAFEWKDPERGISGQLTWTRLPQGFKNSPTLFNEALHRDLTDFRTQHPEVTLLQYVDDLLLAAPTKKACTQGTRHLLQELGEKGYRASAKKAQICQTKVTYLGYILSEGKRWLTPGRIETVARIPPPRNPREVREFLGKAGFCRLFIPGFAELAAPLYALTKPSTPFTWQTEHQLAFEALKKALLSAPALGLPDTSKPFTLFLDERQGIAKGVLTQKLGPWKRPVAYLSKKLDPVAAGWPPCLRIMAATAMLVKDSAKLTLGQPLTVITPHTLEAIVRQPPDRWITNARLTHYQALLLDTDRVQFGPPVTLNPATLLPVPENQPSPHDCRQVLAETHGTREDLKDQELPDADHTWYTDGSSYLDSGTRRAGAAVVDGHNTIWAQSLPPGTSAQKAELIALTKALELSKGKKANIYTDSRYAFATAHTHGSIYERRGWLTSEGKEIKNKAEIIALLKALFLPQEVAIIHCPGHQKGQDPVAVGNRQADRVARQAAMAEVLTLATEPDNTSHITAGKRTADGSEFEKRTADGSEFESPKKKAKVE

SEQ ID NO: 6673 - protein, 2008 aa, synthetic construct
MPAAKRVKLDGGDKKYSIGLDIGTNSVGWAVITDEYKVPSKKFKVLGNTDRHSIKKNLIGALLFDSGETAEATRLKRTARRRYTRRKNRICYLQEIFSNEMAKVDDSFFHRLEESFLVEEDKKHERHPIFGNIVDEVAYHEKYPTIYHLRKKLVDSTDKADLRLIYLALAHMIKFRGHFLIEGDLNPDNSDVDKLFIQLVQTYNQLFEENPINASGVDAKAILSARLSKSRRLENLIAQLPGEKKNGLFGNLIALSLGLTPNFKSNFDLAEDAKLQLSKDTYDDDLDNLLAQIGDQYADLFLAAKNLSDAILLSDILRVNTEITKAPLSASMIKRYDEHHQDLTLLKALVRQQLPEKYKEIFFDQSKNGYAGYIDGGASQEEFYKFIKPILEKMDGTEELLVKLNREDLLRKQRTFDNGSIPHQIHLGELHAILRRQEDFYPFLKDNREKIEKILTFRIPYYVGPLARGNSRFAWMTRKSEETITPWNFEEVVDKGASAQSFIERMTNFDKNLPNEKVLPKHSLLYEYFTVYNELTKVKYVTEGMRKPAFLSGEQKKAIVDLLFKTNRKVTVKQLKEDYFKKIECFDSVEISGVEDRFNASLGTYHDLLKIIKDKDFLDNEENEDILEDIVLTLTLFEDREMIEERLKTYAHLFDDKVMKQLKRRRYTGWGRLSRKLINGIRDKQSGKTILDFLKSDGFANRNFMQLIHDDSLTFKEDIQKAQVSGQGDSLHEHIANLAGSPAIKKGILQTVKVVDELVKVMGRHKPENIVIEMARENQTTQKGQKNSRERMKRIEEGIKELGSQILKEHPVENTQLQNEKLYLYYLQNGRDMYVDQELDINRLSDYDVDHIVPQSFLKDDSIDNKVLTRSDKARGKSDNVPSEEVVKKMKNYWRQLLNAKLITQRKFDNLTKAERGGLSELDKAGFIKRQLVETRQITKHVAQILDSRMNTKYDENDKLIREVKVITLKSKLVSDFRKDFQFYKVREINNYHHAHDAYLNAVVGTALIKKYPKLESEFVYGDYKVYDVRKMIAKSEQEIGKATAKYFFYSNIMNFFKTEITLANGEIRKRPLIETNGETGEIVWDKGRDFATVRKVLSMPQVNIVKKTEVQTGGFSKESILPKRNSDKLIARKKDWDPKKYGGFDSPTVAYSVLVVAKVEKGKSKKLKSVKELLGITIMERSSFEKNPIDFLEAKGYKEVKKDLIIKLPKYSLFELENGRKRMLASAGELQKGNELALPSKYVNFLYLASHYEKLKGSPEDNEQKQLFVEQHKHYLDEIIEQISEFSKRVILADANLDKVLSAYNKHRDKPIREQAENIIHLFTLTNLGAPAAFKYFDTTIDRKRYTSTKEVLDATLIHQSITGLYETRIDLSQLGGDGGGSSGGGGGAVLGLEHLPRPPQISQFPLNPERLQALQHLVRKALEAGHIEPYTGPGNNPVFPVKKANGTWRFIHDLRATNSLTIDLSSSSPGPPDLSSLPTTLAHLQTIDLRDAFFQIPLPKQFQPYFAFTVPQQCNYGPGTRYAWKVLPQGFKNSPTLFEMQLAHILQPIRQAFPQCTILQYMDDILLASPSHEDLLLLSEATMASLISHGLPVSENKTQQTPGTIKFLGQIISPNHLTYDAVPTVPIRSRWALPELQALLGEIQWVSKGTPTLRQPLHSLYCALQRHTDPRDQIYLNPSQVQSLVQLRQALSQNCRSRLVQTLPLLGAIMLTLTGTTTVVFQSKEQWPLVWLHAPLPHTSQCPWGQLLASAVLLLDKYTLQSYGLLCQTIHHNISTQTFNQFIQTSDHPSVPILLHHSHRFKNLGAQTGELWNTFLKTAAPLAPVKALMPVFTLSPVIINTAPCLFSDGSTSRAAYILWDKQILSQRSFPLPPPHKSAQRAELLGLLHGLSSARSWRCLNIFLDSKYLYHYLRTLALGTFQGRSSQAPFQALLPRLLSRKVVYLHHVRSHTNLPDPISRLNALTDALLITPVLQLAGKRTADGSEFEKRTADGSEFESPKKKAKVE

SEQ ID NO: 6674 - protein, 2122 aa, synthetic construct
MPAAKRVKLDGGDKKYSIGLDIGTNSVGWAVITDEYKVPSKKFKVLGNTDRHSIKKNLIGALLFDSGETAEATRLKRTARRRYTRRKNRICYLQEIFSNEMAKVDDSFFHRLEESFLVEEDKKHERHPIFGNIVDEVAYHEKYPTIYHLRKKLVDSTDKADLRLIYLALAHMIKFRGHFLIEGDLNPDNSDVDKLFIQLVQTYNQLFEENPINASGVDAKAILSARLSKSRRLENLIAQLPGEKKNGLFGNLIALSLGLTPNFKSNFDLAEDAKLQLSKDTYDDDLDNLLAQIGDQYADLFLAAKNLSDAILLSDILRVNTEITKAPLSASMIKRYDEHHQDLTLLKALVRQQLPEKYKEIFFDQSKNGYAGYIDGGASQEEFYKFIKPILEKMDGTEELLVKLNREDLLRKQRTFDNGSIPHQIHLGELHAILRRQEDFYPFLKDNREKIEKILTFRIPYYVGPLARGNSRFAWMTRKSEETITPWNFEEVVDKGASAQSFIERMTNFDKNLPNEKVLPKHSLLYEYFTVYNELTKVKYVTEGMRKPAFLSGEQKKAIVDLLFKTNRKVTVKQLKEDYFKKIECFDSVEISGVEDRFNASLGTYHDLLKIIKDKDFLDNEENEDILEDIVLTLTLFEDREMIEERLKTYAHLFDDKVMKQLKRRRYTGWGRLSRKLINGIRDKQSGKTILDFLKSDGFANRNFMQLIHDDSLTFKEDIQKAQVSGQGDSLHEHIANLAGSPAIKKGILQTVKVVDELVKVMGRHKPENIVIEMARENQTTQKGQKNSRERMKRIEEGIKELGSQILKEHPVENTQLQNEKLYLYYLQNGRDMYVDQELDINRLSDYDVDHIVPQSFLKDDSIDNKVLTRSDKARGKSDNVPSEEVVKKMKNYWRQLLNAKLITQRKFDNLTKAERGGLSELDKAGFIKRQLVETRQITKHVAQILDSRMNTKYDENDKLIREVKVITLKSKLVSDFRKDFQFYKVREINNYHHAHDAYLNAVVGTALIKKYPKLESEFVYGDYKVYDVRKMIAKSEQEIGKATAKYFFYSNIMNFFKTEITLANGEIRKRPLIETNGETGEIVWDKGRDFATVRKVLSMPQVNIVKKTEVQTGGFSKESILPKRNSDKLIARKKDWDPKKYGGFDSPTVAYSVLVVAKVEKGKSKKLKSVKELLGITIMERSSFEKNPIDFLEAKGYKEVKKDLIIKLPKYSLFELENGRKRMLASAGELQKGNELALPSKYVNFLYLASHYEKLKGSPEDNEQKQLFVEQHKHYLDEIIEQISEFSKRVILADANLDKVLSAYNKHRDKPIREQAENIIHLFTLTNLGAPAAFKYFDTTIDRKRYTSTKEVLDATLIHQSITGLYETRIDLSQLGGDGGGSSGGGGGLLGRDLLTKLKAQIQFSTEGPQVTWEDRPAMCLVLNLEEEYRLHEKPVPPSIDPSWLQLFPMVWAEKAGMGLANQVPPVVVELKSDASPVAVRQYPMSKEAREGIRPHIQRFLDLGILVPCQSPWNTPLLPVKKPGTNDYRPVQDLREVNKRVQDIHPTVPNPYNLLSSLPPSHTWYSVLDLKDAFFCLKLHPNSQPLFAFEWRDPEKGNTGQLTWTRLPQGFKNSPTLFNEALHRDLASFRALNPQVVMLQYVDDLLVAAPTYRDCKEGTRRLLQELSKLGYRVSAKKAQLCREEVTYLGYLLKGGKRWLTPARKATVMKIPTPTTPRQVREFLGTAGFCRLWIPGFASLAAPLYPLTRPKVPFTWTEAHQEAFGRIKEALLSAPALALPDLTKPFALYVDEKEGVARGVLTQTLGPWRRPVAYLSKKLDPVASGWPTCLKAIAAVALLLKDADKLTLGQNVLVIAPHNLESIVRQPPDRWMTNARMTHYQSLLLNERVSFAPPAILNPATLLPVESDDTPIHICSEILAEETGTRPDLRDQPLPGVPAWYTDGSSFIMDGRRQAGAAIVDNKRTVWASNLPEGTSAQKAELIALTQALRLAEGKSINIYTDSRYAFATAHVHGAIYKQRGWLTSAGKDIKNKEEILALLEAIHLPKRVAIIHCPGHQRGTDPVATGNRKADEAAKQAAQSTRILTETTKNAGKRTADGSEFEKRTADGSEFESPKKKAKVE

SEQ ID NO: 6675 - protein, 2213 aa, synthetic construct
MPAAKRVKLDGGDKKYSIGLDIGTNSVGWAVITDEYKVPSKKFKVLGNTDRHSIKKNLIGALLFDSGETAEATRLKRTARRRYTRRKNRICYLQEIFSNEMAKVDDSFFHRLEESFLVEEDKKHERHPIFGNIVDEVAYHEKYPTIYHLRKKLVDSTDKADLRLIYLALAHMIKFRGHFLIEGDLNPDNSDVDKLFIQLVQTYNQLFEENPINASGVDAKAILSARLSKSRRLENLIAQLPGEKKNGLFGNLIALSLGLTPNFKSNFDLAEDAKLQLSKDTYDDDLDNLLAQIGDQYADLFLAAKNLSDAILLSDILRVNTEITKAPLSASMIKRYDEHHQDLTLLKALVRQQLPEKYKEIFFDQSKNGYAGYIDGGASQEEFYKFIKPILEKMDGTEELLVKLNREDLLRKQRTFDNGSIPHQIHLGELHAILRRQEDFYPFLKDNREKIEKILTFRIPYYVGPLARGNSRFAWMTRKSEETITPWNFEEVVDKGASAQSFIERMTNFDKNLPNEKVLPKHSLLYEYFTVYNELTKVKYVTEGMRKPAFLSGEQKKAIVDLLFKTNRKVTVKQLKEDYFKKIECFDSVEISGVEDRFNASLGTYHDLLKIIKDKDFLDNEENEDILEDIVLTLTLFEDREMIEERLKTYAHLFDDKVMKQLKRRRYTGWGRLSRKLINGIRDKQSGKTILDFLKSDGFANRNFMQLIHDDSLTFKEDIQKAQVSGQGDSLHEHIANLAGSPAIKKGILQTVKVVDELVKVMGRHKPENIVIEMARENQTTQKGQKNSRERMKRIEEGIKELGSQILKEHPVENTQLQNEKLYLYYLQNGRDMYVDQELDINRLSDYDVDHIVPQSFLKDDSIDNKVLTRSDKARGKSDNVPSEEVVKKMKNYWRQLLNAKLITQRKFDNLTKAERGGLSELDKAGFIKRQLVETRQITKHVAQILDSRMNTKYDENDKLIREVKVITLKSKLVSDFRKDFQFYKVREINNYHHAHDAYLNAVVGTALIKKYPKLESEFVYGDYKVYDVRKMIAKSEQEIGKATAKYFFYSNIMNFFKTEITLANGEIRKRPLIETNGETGEIVWDKGRDFATVRKVLSMPQVNIVKKTEVQTGGFSKESILPKRNSDKLIARKKDWDPKKYGGFDSPTVAYSVLVVAKVEKGKSKKLKSVKELLGITIMERSSFEKNPIDFLEAKGYKEVKKDLIIKLPKYSLFELENGRKRMLASAGELQKGNELALPSKYVNFLYLASHYEKLKGSPEDNEQKQLFVEQHKHYLDEIIEQISEFSKRVILADANLDKVLSAYNKHRDKPIREQAENIIHLFTLTNLGAPAAFKYFDTTIDRKRYTSTKEVLDATLIHQSITGLYETRIDLSQLGGDGGGSSGGGGGTLGDQGSRGSDPLPEPRVTLTVEGIPTEFLVNTGAEHSVLTKPMGKMGSKRTVVAGATGSKVYPWTTKRLLKIGQKQVTHSFLVIPECPAPLLGRDLLTKLKAQIQFSTEGPQVTWEDRPAMCLVLNLEEEYRLHEKPVPPSIDPSWLQLFPMVWAEKAGMGLANQVPPVVVELKSDASPVAVRQYPMSKEAREGIRPHIQRFLDLGILVPCQSPWNTPLLPVKKPGTNDYRPVQDLREVNKRVQDIHPTVPNPYNLLSSLPPSHTWYSVLDLKDAFFCLKLHPNSQPLFAFEWRDPEKGNTGQLTWTRLPQGFKNSPTLFNEALHRDLASFRALNPQVVMLQYVDDLLVAAPTYRDCKEGTRRLLQELSKLGYRVSAKKAQLCREEVTYLGYLLKGGKRWLTPARKATVMKIPTPTTPRQVREFLGTAGFCRLWIPGFASLAAPLYPLTRPKVPFTWTEAHQEAFGRIKEALLSAPALALPDLTKPFALYVDEKEGVARGVLTQTLGPWRRPVAYLSKKLDPVASGWPTCLKAIAAVALLLKDADKLTLGQNVLVIAPHNLESIVRQPPDRWMTNARMTHYQSLLLNERVSFAPPAILNPATLLPVESDDTPIHICSEILAEETGTRPDLRDQPLPGVPAWYTDGSSFIMDGRRQAGAAIVDNKRTVWASNLPEGTSAQKAELIALTQALRLAEGKSINIYTDSRYAFATAHVHGAIYKQRGWLTSAGKDIKNKEEILALLEAIHLPKRVAIIHCPGHQRGTDPVATGNRKADEAAKQAAQSTRILTETTKNAGKRTADGSEFEKRTADGSEFESPKKKAKVE

SEQ ID NO: 6676 - protein, 2213 aa, synthetic construct
MPAAKRVKLDGGDKKYSIGLDIGTNSVGWAVITDEYKVPSKKFKVLGNTDRHSIKKNLIGALLFDSGETAEATRLKRTARRRYTRRKNRICYLQEIFSNEMAKVDDSFFHRLEESFLVEEDKKHERHPIFGNIVDEVAYHEKYPTIYHLRKKLVDSTDKADLRLIYLALAHMIKFRGHFLIEGDLNPDNSDVDKLFIQLVQTYNQLFEENPINASGVDAKAILSARLSKSRRLENLIAQLPGEKKNGLFGNLIALSLGLTPNFKSNFDLAEDAKLQLSKDTYDDDLDNLLAQIGDQYADLFLAAKNLSDAILLSDILRVNTEITKAPLSASMIKRYDEHHQDLTLLKALVRQQLPEKYKEIFFDQSKNGYAGYIDGGASQEEFYKFIKPILEKMDGTEELLVKLNREDLLRKQRTFDNGSIPHQIHLGELHAILRRQEDFYPFLKDNREKIEKILTFRIPYYVGPLARGNSRFAWMTRKSEETITPWNFEEVVDKGASAQSFIERMTNFDKNLPNEKVLPKHSLLYEYFTVYNELTKVKYVTEGMRKPAFLSGEQKKAIVDLLFKTNRKVTVKQLKEDYFKKIECFDSVEISGVEDRFNASLGTYHDLLKIIKDKDFLDNEENEDILEDIVLTLTLFEDREMIEERLKTYAHLFDDKVMKQLKRRRYTGWGRLSRKLINGIRDKQSGKTILDFLKSDGFANRNFMQLIHDDSLTFKEDIQKAQVSGQGDSLHEHIANLAGSPAIKKGILQTVKVVDELVKVMGRHKPENIVIEMARENQTTQKGQKNSRERMKRIEEGIKELGSQILKEHPVENTQLQNEKLYLYYLQNGRDMYVDQELDINRLSDYDVDHIVPQSFLKDDSIDNKVLTRSDKARGKSDNVPSEEVVKKMKNYWRQLLNAKLITQRKFDNLTKAERGGLSELDKAGFIKRQLVETRQITKHVAQILDSRMNTKYDENDKLIREVKVITLKSKLVSDFRKDFQFYKVREINNYHHAHDAYLNAVVGTALIKKYPKLESEFVYGDYKVYDVRKMIAKSEQEIGKATAKYFFYSNIMNFFKTEITLANGEIRKRPLIETNGETGEIVWDKGRDFATVRKVLSMPQVNIVKKTEVQTGGFSKESILPKRNSDKLIARKKDWDPKKYGGFDSPTVAYSVLVVAKVEKGKSKKLKSVKELLGITIMERSSFEKNPIDFLEAKGYKEVKKDLIIKLPKYSLFELENGRKRMLASAGELQKGNELALPSKYVNFLYLASHYEKLKGSPEDNEQKQLFVEQHKHYLDEIIEQISEFSKRVILADANLDKVLSAYNKHRDKPIREQAENIIHLFTLTNLGAPAAFKYFDTTIDRKRYTSTKEVLDATLIHQSITGLYETRIDLSQLGGDGGGSSGGGGGTLGDQGSRGSDPLPEPRVTLTVEGIPTEFLVNTGAEHSVLTKPMGKMGSKRTVVAGATGSKVYPWTTKRLLKIGQKQVTHSFLVIPECPAPLLGRDLLTKLKAQIQFSTEGPQVTWEDRPAMCLVLNLEEEYRLHEKPVPPSIDPSWLQLFPMVWAEKAGMGLANQVPPVVVELKSDASPVAVRQYPMSKEAREGIRPHIQRFLDLGILVPCQSPWNTPLLPVKKPGTNDYRPVQDLREVNKRVQDIHPTVPNPYNLLSSLPPSHTWYSVLDLKDAFFCLKLHPNSQPLFAFEWRDPEKGNTGQLTWTRLPQGFKNSPTLFNEALHRDLASFRALNPQVVMLQYVDDLLVAAPTYRDCKEGTRRLLQELSKLGYRVSAKKAQLCREEVTYLGYLLKGGKRWLTPARKATVMKIPTPTTPRQVREFLGKAGFCRLFIPGFASLAAPLYPLTRPKVPFTWTEAHQEAFGRIKEALLSAPALALPDLTKPFALYVDEKEGVARGVLTQTLGPWRRPVAYLSKKLDPVASGWPTCLKAIAAVALLLKDADKLTLGQNVLVIAPHNLESIVRQPPDRWMTNARMTHYQSLLLNERVSFAPPAILNPATLLPVESDDTPIHICSEILAEETGTRPDLRDQPLPGVPAWYTDGSSFIMDGRRQAGAAIVDNKRTVWASNLPEGTSAQKAELIALTQALRLAEGKSINIYTDSRYAFATAHVHGAIYKQRGWLTSAGKDIKNKEEILALLEAIHLPKRVAIIHCPGHQRGTDPVATGNRKADEAAKQAAQSTRILTETTKNAGKRTADGSEFEKRTADGSEFESPKKKAKVE

SEQ ID NO: 6677 - protein, 2091 aa, synthetic construct
MPAAKRVKLDGGDKKYSIGLDIGTNSVGWAVITDEYKVPSKKFKVLGNTDRHSIKKNLIGALLFDSGETAEATRLKRTARRRYTRRKNRICYLQEIFSNEMAKVDDSFFHRLEESFLVEEDKKHERHPIFGNIVDEVAYHEKYPTIYHLRKKLVDSTDKADLRLIYLALAHMIKFRGHFLIEGDLNPDNSDVDKLFIQLVQTYNQLFEENPINASGVDAKAILSARLSKSRRLENLIAQLPGEKKNGLFGNLIALSLGLTPNFKSNFDLAEDAKLQLSKDTYDDDLDNLLAQIGDQYADLFLAAKNLSDAILLSDILRVNTEITKAPLSASMIKRYDEHHQDLTLLKALVRQQLPEKYKEIFFDQSKNGYAGYIDGGASQEEFYKFIKPILEKMDGTEELLVKLNREDLLRKQRTFDNGSIPHQIHLGELHAILRRQEDFYPFLKDNREKIEKILTFRIPYYVGPLARGNSRFAWMTRKSEETITPWNFEEVVDKGASAQSFIERMTNFDKNLPNEKVLPKHSLLYEYFTVYNELTKVKYVTEGMRKPAFLSGEQKKAIVDLLFKTNRKVTVKQLKEDYFKKIECFDSVEISGVEDRFNASLGTYHDLLKIIKDKDFLDNEENEDILEDIVLTLTLFEDREMIEERLKTYAHLFDDKVMKQLKRRRYTGWGRLSRKLINGIRDKQSGKTILDFLKSDGFANRNFMQLIHDDSLTFKEDIQKAQVSGQGDSLHEHIANLAGSPAIKKGILQTVKVVDELVKVMGRHKPENIVIEMARENQTTQKGQKNSRERMKRIEEGIKELGSQILKEHPVENTQLQNEKLYLYYLQNGRDMYVDQELDINRLSDYDVDHIVPQSFLKDDSIDNKVLTRSDKARGKSDNVPSEEVVKKMKNYWRQLLNAKLITQRKFDNLTKAERGGLSELDKAGFIKRQLVETRQITKHVAQILDSRMNTKYDENDKLIREVKVITLKSKLVSDFRKDFQFYKVREINNYHHAHDAYLNAVVGTALIKKYPKLESEFVYGDYKVYDVRKMIAKSEQEIGKATAKYFFYSNIMNFFKTEITLANGEIRKRPLIETNGETGEIVWDKGRDFATVRKVLSMPQVNIVKKTEVQTGGFSKESILPKRNSDKLIARKKDWDPKKYGGFDSPTVAYSVLVVAKVEKGKSKKLKSVKELLGITIMERSSFEKNPIDFLEAKGYKEVKKDLIIKLPKYSLFELENGRKRMLASAGELQKGNELALPSKYVNFLYLASHYEKLKGSPEDNEQKQLFVEQHKHYLDEIIEQISEFSKRVILADANLDKVLSAYNKHRDKPIREQAENIIHLFTLTNLGAPAAFKYFDTTIDRKRYTSTKEVLDATLIHQSITGLYETRIDLSQLGGDGGGSSGGGGGTLNLEDEYRLYETSAEPEVSPGSTWLSDFPQAWAETGGMGLAVRQAPLIIPLKATSTPVSIKQYPMSQEAKLGIKPHIQRLLDQGILVPCQSPWNTPLLPVKKPGTNDYRPVQDLREVNKRVEDIHPTVPNPYNLLSGLPPSHRWYTVLDLKDAFFCLRLHPTSQPLFAFEWRDPGMGISGQLTWTRLPQGFKNSPTLFNEALHRDLADFRIQHPDLILLQYVDDILLAATSELDCQQGTRALLLTLGNLGYRASAKKAQLCQKQVKYLGYLLKEGQRWLTEARKETVMGQPTPKTPRQLREFLGTAGFCRLWIPGFAEMAAPLYPLTKPGTLFNWGPDQQKAYQEIKQALLTAPALGLPDLTKPFELFVDEKQGYAKGVLTQKLGPWRRPVAYLSKKLDPVAAGWPPCLRMVAAIAVLRKDAGKLTMGQPLVILAPHAVEALVKQPPDRWLSNARMTHYQAMLLDTDRVQFGPVVALNPATLLPLPEEGAPHDCLEILAETHGTRPDLTDQPIPDADHTWYTDGSSFLQEGQRKAGAAVTTETEVIWARALPAGTSAQRAELIALTQALKMAEGKRLNVYTDSRYAFATAHIHGEIYRRRGWLTSEGREIKNKSEILALLKALFLPKRLSIIHCLGHQKGDSAEARGNRLADQAAREAAIKTPPDTSTLLAGKRTADGSEFEKRTADGSEFESPKKKAKVE

SEQ ID NO: 6678 - protein, 2091 aa, synthetic construct
MPAAKRVKLDGGDKKYSIGLDIGTNSVGWAVITDEYKVPSKKFKVLGNTDRHSIKKNLIGALLFDSGETAEATRLKRTARRRYTRRKNRICYLQEIFSNEMAKVDDSFFHRLEESFLVEEDKKHERHPIFGNIVDEVAYHEKYPTIYHLRKKLVDSTDKADLRLIYLALAHMIKFRGHFLIEGDLNPDNSDVDKLFIQLVQTYNQLFEENPINASGVDAKAILSARLSKSRRLENLIAQLPGEKKNGLFGNLIALSLGLTPNFKSNFDLAEDAKLQLSKDTYDDDLDNLLAQIGDQYADLFLAAKNLSDAILLSDILRVNTEITKAPLSASMIKRYDEHHQDLTLLKALVRQQLPEKYKEIFFDQSKNGYAGYIDGGASQEEFYKFIKPILEKMDGTEELLVKLNREDLLRKQRTFDNGSIPHQIHLGELHAILRRQEDFYPFLKDNREKIEKILTFRIPYYVGPLARGNSRFAWMTRKSEETITPWNFEEVVDKGASAQSFIERMTNFDKNLPNEKVLPKHSLLYEYFTVYNELTKVKYVTEGMRKPAFLSGEQKKAIVDLLFKTNRKVTVKQLKEDYFKKIECFDSVEISGVEDRFNASLGTYHDLLKIIKDKDFLDNEENEDILEDIVLTLTLFEDREMIEERLKTYAHLFDDKVMKQLKRRRYTGWGRLSRKLINGIRDKQSGKTILDFLKSDGFANRNFMQLIHDDSLTFKEDIQKAQVSGQGDSLHEHIANLAGSPAIKKGILQTVKVVDELVKVMGRHKPENIVIEMARENQTTQKGQKNSRERMKRIEEGIKELGSQILKEHPVENTQLQNEKLYLYYLQNGRDMYVDQELDINRLSDYDVDHIVPQSFLKDDSIDNKVLTRSDKARGKSDNVPSEEVVKKMKNYWRQLLNAKLITQRKFDNLTKAERGGLSELDKAGFIKRQLVETRQITKHVAQILDSRMNTKYDENDKLIREVKVITLKSKLVSDFRKDFQFYKVREINNYHHAHDAYLNAVVGTALIKKYPKLESEFVYGDYKVYDVRKMIAKSEQEIGKATAKYFFYSNIMNFFKTEITLANGEIRKRPLIETNGETGEIVWDKGRDFATVRKVLSMPQVNIVKKTEVQTGGFSKESILPKRNSDKLIARKKDWDPKKYGGFDSPTVAYSVLVVAKVEKGKSKKLKSVKELLGITIMERSSFEKNPIDFLEAKGYKEVKKDLIIKLPKYSLFELENGRKRMLASAGELQKGNELALPSKYVNFLYLASHYEKLKGSPEDNEQKQLFVEQHKHYLDEIIEQISEFSKRVILADANLDKVLSAYNKHRDKPIREQAENIIHLFTLTNLGAPAAFKYFDTTIDRKRYTSTKEVLDATLIHQSITGLYETRIDLSQLGGDGGGSSGGGGGTLGIEDEYRLHETSTEPDVSLGSTWLSDFPQAWAETGGMGLAVRQAPLIIPLKATSTPVSIQQYPMSHEARLGIKPHIQRLLDQGILVPCQSPWNTPLLPVKKPGTNDYRPVQDLREVNKRVEDIHPTVPNPYNLLSGLPPSHQWYTVLDLKDAFFCLRLHPTSQPLFAFEWRDPGMGISGQLTWTRLPQGFKNSPTLFDEALHRDLADFRIQHPDLILLQYVDDILLAATSELDCQQGTRALLQTLGDLGYRASAKKAQICQKQVKYLGYLLREGQRWLTEARKETVMGQPVPKTPRQLREFLGTAGFCRLWIPGFAEMAAPLYPLTKTGTLFSWGPDQQKAYQEIKQALLTAPALGLPDLTKPFELFVDEKQGYAKGVLTQKLGPWRRPVAYLSKKLDPVAAGWPPCLRMVAAIAVLTKDAGKLTMGQPLVILAPHAVEALVKQPPDRWLSNARMTHYQAMLLDTDRVQFGPVVALNPATLLPLPEEGAPHDCLEILAETHGTRPDLTDQPIPDADHTWYTDGSSFLQEGQRKAGAAVTTETEVIWAGALPAGTSAQRAELIALTQALKMAEGKRLNVYTDSRYAFATAHIHGEIYRRRGLLTSEGREIKNKSEILALLKALFLPKRLSIIHCLGHQKGDSAEARGNRLADQAAREAAIKTPPDTSTLLAGKRTADGSEFEKRTADGSEFESPKKKAKVE

SEQ ID NO: 6679 - protein, 2091 aa, synthetic construct
MPAAKRVKLDGGDKKYSIGLDIGTNSVGWAVITDEYKVPSKKFKVLGNTDRHSIKKNLIGALLFDSGETAEATRLKRTARRRYTRRKNRICYLQEIFSNEMAKVDDSFFHRLEESFLVEEDKKHERHPIFGNIVDEVAYHEKYPTIYHLRKKLVDSTDKADLRLIYLALAHMIKFRGHFLIEGDLNPDNSDVDKLFIQLVQTYNQLFEENPINASGVDAKAILSARLSKSRRLENLIAQLPGEKKNGLFGNLIALSLGLTPNFKSNFDLAEDAKLQLSKDTYDDDLDNLLAQIGDQYADLFLAAKNLSDAILLSDILRVNTEITKAPLSASMIKRYDEHHQDLTLLKALVRQQLPEKYKEIFFDQSKNGYAGYIDGGASQEEFYKFIKPILEKMDGTEELLVKLNREDLLRKQRTFDNGSIPHQIHLGELHAILRRQEDFYPFLKDNREKIEKILTFRIPYYVGPLARGNSRFAWMTRKSEETITPWNFEEVVDKGASAQSFIERMTNFDKNLPNEKVLPKHSLLYEYFTVYNELTKVKYVTEGMRKPAFLSGEQKKAIVDLLFKTNRKVTVKQLKEDYFKKIECFDSVEISGVEDRFNASLGTYHDLLKIIKDKDFLDNEENEDILEDIVLTLTLFEDREMIEERLKTYAHLFDDKVMKQLKRRRYTGWGRLSRKLINGIRDKQSGKTILDFLKSDGFANRNFMQLIHDDSLTFKEDIQKAQVSGQGDSLHEHIANLAGSPAIKKGILQTVKVVDELVKVMGRHKPENIVIEMARENQTTQKGQKNSRERMKRIEEGIKELGSQILKEHPVENTQLQNEKLYLYYLQNGRDMYVDQELDINRLSDYDVDHIVPQSFLKDDSIDNKVLTRSDKARGKSDNVPSEEVVKKMKNYWRQLLNAKLITQRKFDNLTKAERGGLSELDKAGFIKRQLVETRQITKHVAQILDSRMNTKYDENDKLIREVKVITLKSKLVSDFRKDFQFYKVREINNYHHAHDAYLNAVVGTALIKKYPKLESEFVYGDYKVYDVRKMIAKSEQEIGKATAKYFFYSNIMNFFKTEITLANGEIRKRPLIETNGETGEIVWDKGRDFATVRKVLSMPQVNIVKKTEVQTGGFSKESILPKRNSDKLIARKKDWDPKKYGGFDSPTVAYSVLVVAKVEKGKSKKLKSVKELLGITIMERSSFEKNPIDFLEAKGYKEVKKDLIIKLPKYSLFELENGRKRMLASAGELQKGNELALPSKYVNFLYLASHYEKLKGSPEDNEQKQLFVEQHKHYLDEIIEQISEFSKRVILADANLDKVLSAYNKHRDKPIREQAENIIHLFTLTNLGAPAAFKYFDTTIDRKRYTSTKEVLDATLIHQSITGLYETRIDLSQLGGDGGGSSGGGGGTLNIEDEYRLHETSKGPDVPLGSTWLSDFPQAWAETGGMGLAVRQAPLIIPLKATSTPVSIKQYPMSQEARLGIKPHIQRLLDQGILVPCQSPWNTPLLPVKKPGTNDYRPVQDLREVNKRVEDIHPTVPNPYNLLSGLPPSHQWYTVLDLKDAFFCLRLHPTSQSLFAFEWRDPEMGISGQLTWTRLPQGFKNSPTLFNEALHRDLADFRIQHPDLILLQYVDDLLLAATSELDCQQGTRALLQTLGDLGYRASAKKAQICQKQVKYLGYLLKEGQRWLTEARKETVMGQPTPKTPRQLREFLGTAGFCRLWIPGFAEMAAPLYPLTKPGTLFEWGPDQQKAYQEIKQALLTAPALGLPDLTKPFELFVDEKQGYAKGVLTQKLGPWRRPVAYLSKKLDPVAAGWPPCLRMVAAIAVLTKDAGKLTMGQPLVILAPHAVEALVKQPPDRWLSNARMTHYQALLLDTDRVQFGPIVALNPATLLPLPEEGLQHDCLDILAEAHGTRPDLTDQPLPDADHTWYTDGSSFLQEGQRKAGAAVTTETEVVWAKALPAGTSAQRAELIALTQALKMAEGKKLNVYTDSRYAFATAHIHGEIYRRRGWLTSEGKEIKNKDEILALLKALFLPKRLSIIHCPGHQKGNRAEARGNRMADQAAREVATRETPETSTLLAGKRTADGSEFEKRTADGSEFESPKKKAKVE

SEQ ID NO: 6680 - protein, 2085 aa, synthetic construct
MPAAKRVKLDGGDKKYSIGLDIGTNSVGWAVITDEYKVPSKKFKVLGNTDRHSIKKNLIGALLFDSGETAEATRLKRTARRRYTRRKNRICYLQEIFSNEMAKVDDSFFHRLEESFLVEEDKKHERHPIFGNIVDEVAYHEKYPTIYHLRKKLVDSTDKADLRLIYLALAHMIKFRGHFLIEGDLNPDNSDVDKLFIQLVQTYNQLFEENPINASGVDAKAILSARLSKSRRLENLIAQLPGEKKNGLFGNLIALSLGLTPNFKSNFDLAEDAKLQLSKDTYDDDLDNLLAQIGDQYADLFLAAKNLSDAILLSDILRVNTEITKAPLSASMIKRYDEHHQDLTLLKALVRQQLPEKYKEIFFDQSKNGYAGYIDGGASQEEFYKFIKPILEKMDGTEELLVKLNREDLLRKQRTFDNGSIPHQIHLGELHAILRRQEDFYPFLKDNREKIEKILTFRIPYYVGPLARGNSRFAWMTRKSEETITPWNFEEVVDKGASAQSFIERMTNFDKNLPNEKVLPKHSLLYEYFTVYNELTKVKYVTEGMRKPAFLSGEQKKAIVDLLFKTNRKVTVKQLKEDYFKKIECFDSVEISGVEDRFNASLGTYHDLLKIIKDKDFLDNEENEDILEDIVLTLTLFEDREMIEERLKTYAHLFDDKVMKQLKRRRYTGWGRLSRKLINGIRDKQSGKTILDFLKSDGFANRNFMQLIHDDSLTFKEDIQKAQVSGQGDSLHEHIANLAGSPAIKKGILQTVKVVDELVKVMGRHKPENIVIEMARENQTTQKGQKNSRERMKRIEEGIKELGSQILKEHPVENTQLQNEKLYLYYLQNGRDMYVDQELDINRLSDYDVDHIVPQSFLKDDSIDNKVLTRSDKARGKSDNVPSEEVVKKMKNYWRQLLNAKLITQRKFDNLTKAERGGLSELDKAGFIKRQLVETRQITKHVAQILDSRMNTKYDENDKLIREVKVITLKSKLVSDFRKDFQFYKVREINNYHHAHDAYLNAVVGTALIKKYPKLESEFVYGDYKVYDVRKMIAKSEQEIGKATAKYFFYSNIMNFFKTEITLANGEIRKRPLIETNGETGEIVWDKGRDFATVRKVLSMPQVNIVKKTEVQTGGFSKESILPKRNSDKLIARKKDWDPKKYGGFDSPTVAYSVLVVAKVEKGKSKKLKSVKELLGITIMERSSFEKNPIDFLEAKGYKEVKKDLIIKLPKYSLFELENGRKRMLASAGELQKGNELALPSKYVNFLYLASHYEKLKGSPEDNEQKQLFVEQHKHYLDEIIEQISEFSKRVILADANLDKVLSAYNKHRDKPIREQAENIIHLFTLTNLGAPAAFKYFDTTIDRKRYTSTKEVLDATLIHQSITGLYETRIDLSQLGGDGGGSSGGGGGTLQLDDEYRLYSPLVKPDQNIQFWLEQFPQAWAETAGMGLAKQVPPQVIQLKASATPVSVRQYPLSKEAQEGIRPHVQRLIQQGILVPVQSPWNTPLLPVRKPGTNDYRPVQDLREVNKRVQDIHPTVPNPYNLLCALPPQRSWYTVLDLKDAFFCLRLHPTSQPLFAFEWRDPGTGRTGQLTWTRLPQGFKNSPTIFDEALHRDLANFRIQHPQVTLLQYVDDLLLAGATKQDCLEGTKALLLELSDLGYRASAKKAQICRREVTYLGYSLRDGQRWLTEARKKTVVQIPAPTTAKQVREFLGTAGFCRLWIPGFATLAAPLYPLTKEKGEFSWAPEHQKAFDAIKKALLSAPALALPDVTKPFTLYVDERKGVARGVLTQTLGPWRRPVAYLSKKLDPVASGWPVCLKAIAAVAILVKDADKLTLGQNITVIAPHALENIVRQPPDRWMTNARMTHYQSLLLTERVTFAPPAALNPATLLPEETDEPVTHDCHQLLIEETGVRKDLTDIPLTGEVLTWFTDGSSYVVEGKRMAGAAVVDGTRTIWASSLPEGTSAQKAELMALTQALRLAEGKSINIYTDSRYAFATAHVHGAIYKQRGLLTSAGREIKNKEEILSLLEALHLPKRLAIIHCPGHQKAKDPISRGNQMADRVAKQAAQGVNLLAGKRTADGSEFEKRTADGSEFESPKKKAKVE

SEQ ID NO: 6681 - protein, 2171 aa, synthetic construct
MPAAKRVKLDGGDKKYSIGLDIGTNSVGWAVITDEYKVPSKKFKVLGNTDRHSIKKNLIGALLFDSGETAEATRLKRTARRRYTRRKNRICYLQEIFSNEMAKVDDSFFHRLEESFLVEEDKKHERHPIFGNIVDEVAYHEKYPTIYHLRKKLVDSTDKADLRLIYLALAHMIKFRGHFLIEGDLNPDNSDVDKLFIQLVQTYNQLFEENPINASGVDAKAILSARLSKSRRLENLIAQLPGEKKNGLFGNLIALSLGLTPNFKSNFDLAEDAKLQLSKDTYDDDLDNLLAQIGDQYADLFLAAKNLSDAILLSDILRVNTEITKAPLSASMIKRYDEHHQDLTLLKALVRQQLPEKYKEIFFDQSKNGYAGYIDGGASQEEFYKFIKPILEKMDGTEELLVKLNREDLLRKQRTFDNGSIPHQIHLGELHAILRRQEDFYPFLKDNREKIEKILTFRIPYYVGPLARGNSRFAWMTRKSEETITPWNFEEVVDKGASAQSFIERMTNFDKNLPNEKVLPKHSLLYEYFTVYNELTKVKYVTEGMRKPAFLSGEQKKAIVDLLFKTNRKVTVKQLKEDYFKKIECFDSVEISGVEDRFNASLGTYHDLLKIIKDKDFLDNEENEDILEDIVLTLTLFEDREMIEERLKTYAHLFDDKVMKQLKRRRYTGWGRLSRKLINGIRDKQSGKTILDFLKSDGFANRNFMQLIHDDSLTFKEDIQKAQVSGQGDSLHEHIANLAGSPAIKKGILQTVKVVDELVKVMGRHKPENIVIEMARENQTTQKGQKNSRERMKRIEEGIKELGSQILKEHPVENTQLQNEKLYLYYLQNGRDMYVDQELDINRLSDYDVDHIVPQSFLKDDSIDNKVLTRSDKARGKSDNVPSEEVVKKMKNYWRQLLNAKLITQRKFDNLTKAERGGLSELDKAGFIKRQLVETRQITKHVAQILDSRMNTKYDENDKLIREVKVITLKSKLVSDFRKDFQFYKVREINNYHHAHDAYLNAVVGTALIKKYPKLESEFVYGDYKVYDVRKMIAKSEQEIGKATAKYFFYSNIMNFFKTEITLANGEIRKRPLIETNGETGEIVWDKGRDFATVRKVLSMPQVNIVKKTEVQTGGFSKESILPKRNSDKLIARKKDWDPKKYGGFDSPTVAYSVLVVAKVEKGKSKKLKSVKELLGITIMERSSFEKNPIDFLEAKGYKEVKKDLIIKLPKYSLFELENGRKRMLASAGELQKGNELALPSKYVNFLYLASHYEKLKGSPEDNEQKQLFVEQHKHYLDEIIEQISEFSKRVILADANLDKVLSAYNKHRDKPIREQAENIIHLFTLTNLGAPAAFKYFDTTIDRKRYTSTKEVLDATLIHQSITGLYETRIDLSQLGGDGGGSSGGGGGMDPLQLLQPLEAEIKGTKLKAHWNSGATITCVPQAFLEEEVPIKNIWIKTIHGEKEQPVYYLTFKIQGRKVEAEVISSPYDYILVSPSDIPWLMKKPLQLTTLVPLQEYEERLLKQTMLTGSYKEKLQSLFLKYDALWQHWENQVGHRRIKPHHIATGTVNPRPQKQYPINPKAKASIQTVINDLLKQGVLIQQNSIMNTPVYPVPKPDGKWRMVLDYREVNKTIPLIAAQNQHSAGILSSIFRGKYKTTLDLSNGFWAHSITPESYWLTAFTWLGQQYCWTRLPQGFLNSPALFNADVVDLLKEVPNVQVYVDDIYISHDDPREHLEQLEKVFSLLLNAGYVVSLKKSEIAQHEVEFLGFNITKEGRGLTETFKQKLLNITPPRDLKQLQSILGKLNFARNFIPNFSELVKPLYNIIATAPGKYITWTTDNSQQLQNIISMLNSAENLEERNPEVRLIMKVNTSPSAGYIRFYNEFAKRPIMYLNYVYTKAEVKFTNTEKLLTTIHKGLIKALDLGMGQEILVYSPIVSMTKIQKTPLPERKALPIRWITWMSYLEDPRIQFHYDKTLPELQQVPTVTDDIIAKIKHPSEFSMVFYTDGSAIKHPNVNKSHNAGMGIAQVQFKPEFTVINTWSIPLGDHTAQLAEVAAVEFACKKALKIDGPVLIVTDSFYVAESVNKELPYWQSNGFFNNKKKPLKHVSKWKSIADCIQLKPDIIIIHEKGHQPTASTFHTEGNNLADKLATQGSYVVNAGKRTADGSEFEKRTADGSEFESPKKKAKVE

SEQ ID NO: 6682 - protein, 2089 aa, synthetic construct
MPAAKRVKLDGGDKKYSIGLDIGTNSVGWAVITDEYKVPSKKFKVLGNTDRHSIKKNLIGALLFDSGETAEATRLKRTARRRYTRRKNRICYLQEIFSNEMAKVDDSFFHRLEESFLVEEDKKHERHPIFGNIVDEVAYHEKYPTIYHLRKKLVDSTDKADLRLIYLALAHMIKFRGHFLIEGDLNPDNSDVDKLFIQLVQTYNQLFEENPINASGVDAKAILSARLSKSRRLENLIAQLPGEKKNGLFGNLIALSLGLTPNFKSNFDLAEDAKLQLSKDTYDDDLDNLLAQIGDQYADLFLAAKNLSDAILLSDILRVNTEITKAPLSASMIKRYDEHHQDLTLLKALVRQQLPEKYKEIFFDQSKNGYAGYIDGGASQEEFYKFIKPILEKMDGTEELLVKLNREDLLRKQRTFDNGSIPHQIHLGELHAILRRQEDFYPFLKDNREKIEKILTFRIPYYVGPLARGNSRFAWMTRKSEETITPWNFEEVVDKGASAQSFIERMTNFDKNLPNEKVLPKHSLLYEYFTVYNELTKVKYVTEGMRKPAFLSGEQKKAIVDLLFKTNRKVTVKQLKEDYFKKIECFDSVEISGVEDRFNASLGTYHDLLKIIKDKDFLDNEENEDILEDIVLTLTLFEDREMIEERLKTYAHLFDDKVMKQLKRRRYTGWGRLSRKLINGIRDKQSGKTILDFLKSDGFANRNFMQLIHDDSLTFKEDIQKAQVSGQGDSLHEHIANLAGSPAIKKGILQTVKVVDELVKVMGRHKPENIVIEMARENQTTQKGQKNSRERMKRIEEGIKELGSQILKEHPVENTQLQNEKLYLYYLQNGRDMYVDQELDINRLSDYDVDHIVPQSFLKDDSIDNKVLTRSDKARGKSDNVPSEEVVKKMKNYWRQLLNAKLITQRKFDNLTKAERGGLSELDKAGFIKRQLVETRQITKHVAQILDSRMNTKYDENDKLIREVKVITLKSKLVSDFRKDFQFYKVREINNYHHAHDAYLNAVVGTALIKKYPKLESEFVYGDYKVYDVRKMIAKSEQEIGKATAKYFFYSNIMNFFKTEITLANGEIRKRPLIETNGETGEIVWDKGRDFATVRKVLSMPQVNIVKKTEVQTGGFSKESILPKRNSDKLIARKKDWDPKKYGGFDSPTVAYSVLVVAKVEKGKSKKLKSVKELLGITIMERSSFEKNPIDFLEAKGYKEVKKDLIIKLPKYSLFELENGRKRMLASAGELQKGNELALPSKYVNFLYLASHYEKLKGSPEDNEQKQLFVEQHKHYLDEIIEQISEFSKRVILADANLDKVLSAYNKHRDKPIREQAENIIHLFTLTNLGAPAAFKYFDTTIDRKRYTSTKEVLDATLIHQSITGLYETRIDLSQLGGDGGGSSGGGGGVLNLEEEYRLHEKPVPSSIDPSWLQLFPTVWAERAGMGLANQVPPVVVELRSGASPVAVRQYPMSKEAREGIRPHIQRFLDLGVLVPCQSPWNTPLLPVKKPGTNDYRPVQDLREINKRVQDIHPTVPNPYNLLSSLPPSHTWYSVLDLKDAFFCLKLHPNSQPLFAFEWRDPEKGNTGQLTWTRLPQGFKNSPTLFDEALHRDLAPFRALNPQVVLLQYVDDLLVAAPTYRDCKEGTQKLLQELSKLGYRVSAKKAQLCQKEVTYLGYLLKEGKRWLTPARKATVMKIPPPTTPRQVREFLGTAGFCRLWIPGFASLAAPLYPLTKESIPFIWTEEHQKAFDRIKEALLSAPALALPDLTKPFTLYVDERAGVARGVLTQTLGPWRRPVAYLSKKLDPVASGWPTCLKAVAAVALLLKDADKLTLGQNVTVIASHSLESIVRQPPDRWMTNARMTHYQSLLLNERVSFAPPAVLNPATLLPVESEATPVHRCSEILAEETGTRRDLKDQPLPGVPAWYTDGSSFIAEGKRRAGAAIVDGKRTVWASSLPEGTSAQKAELVALTQALRLAEGKDINIYTDSRYAFATAHIHGAIYKQRGLLTSAGKDIKNKEEILALLEAIHLPKRVAIIHCPGHQKGNDPVATGNRRADEAAKQAALSTRVLAETTKPAGKRTADGSEFEKRTADGSEFESPKKKAKVE

SEQ ID NO: 6683 - protein, 2095 aa, synthetic construct
MPAAKRVKLDGGDKKYSIGLDIGTNSVGWAVITDEYKVPSKKFKVLGNTDRHSIKKNLIGALLFDSGETAEATRLKRTARRRYTRRKNRICYLQEIFSNEMAKVDDSFFHRLEESFLVEEDKKHERHPIFGNIVDEVAYHEKYPTIYHLRKKLVDSTDKADLRLIYLALAHMIKFRGHFLIEGDLNPDNSDVDKLFIQLVQTYNQLFEENPINASGVDAKAILSARLSKSRRLENLIAQLPGEKKNGLFGNLIALSLGLTPNFKSNFDLAEDAKLQLSKDTYDDDLDNLLAQIGDQYADLFLAAKNLSDAILLSDILRVNTEITKAPLSASMIKRYDEHHQDLTLLKALVRQQLPEKYKEIFFDQSKNGYAGYIDGGASQEEFYKFIKPILEKMDGTEELLVKLNREDLLRKQRTFDNGSIPHQIHLGELHAILRRQEDFYPFLKDNREKIEKILTFRIPYYVGPLARGNSRFAWMTRKSEETITPWNFEEVVDKGASAQSFIERMTNFDKNLPNEKVLPKHSLLYEYFTVYNELTKVKYVTEGMRKPAFLSGEQKKAIVDLLFKTNRKVTVKQLKEDYFKKIECFDSVEISGVEDRFNASLGTYHDLLKIIKDKDFLDNEENEDILEDIVLTLTLFEDREMIEERLKTYAHLFDDKVMKQLKRRRYTGWGRLSRKLINGIRDKQSGKTILDFLKSDGFANRNFMQLIHDDSLTFKEDIQKAQVSGQGDSLHEHIANLAGSPAIKKGILQTVKVVDELVKVMGRHKPENIVIEMARENQTTQKGQKNSRERMKRIEEGIKELGSQILKEHPVENTQLQNEKLYLYYLQNGRDMYVDQELDINRLSDYDVDHIVPQSFLKDDSIDNKVLTRSDKARGKSDNVPSEEVVKKMKNYWRQLLNAKLITQRKFDNLTKAERGGLSELDKAGFIKRQLVETRQITKHVAQILDSRMNTKYDENDKLIREVKVITLKSKLVSDFRKDFQFYKVREINNYHHAHDAYLNAVVGTALIKKYPKLESEFVYGDYKVYDVRKMIAKSEQEIGKATAKYFFYSNIMNFFKTEITLANGEIRKRPLIETNGETGEIVWDKGRDFATVRKVLSMPQVNIVKKTEVQTGGFSKESILPKRNSDKLIARKKDWDPKKYGGFDSPTVAYSVLVVAKVEKGKSKKLKSVKELLGITIMERSSFEKNPIDFLEAKGYKEVKKDLIIKLPKYSLFELENGRKRMLASAGELQKGNELALPSKYVNFLYLASHYEKLKGSPEDNEQKQLFVEQHKHYLDEIIEQISEFSKRVILADANLDKVLSAYNKHRDKPIREQAENIIHLFTLTNLGAPAAFKYFDTTIDRKRYTSTKEVLDATLIHQSITGLYETRIDLSQLGGDGGGGGEAAAKGGTAPLEEEYRLFLEAPIQNVTLLEQWKREIPKVWAEINPPGLASTQAPIHVQLLSTALPVRVRQYPITLEAKRSLRETIRKFRAAGILRPVHSPWNTPLLPVRKSGTSEYRMVQDLREVNKRVETIHPTVPNPYTLLSLLPPDRIWYSVLDLKDAFFCIPLAPESQLIFAFEWADAEEGESGQLTWTRLPQGFKNSPTLFNEALNRDLQGFRLDHPSVSLLQYVDDLLIAADTQAACLSATRDLLMTLAELGYRVSGKKAQLCQEEVTYLGFKIHKGSRSLSNSRTQAILQIPVPKTKRQVREFLGTIGYCRLWIPGFAELAQPLYAATRPGNDPLVWGEKEEEAFQSLKLALTQPPALALPSLDKPFQLFVEETSGAAKGVLTQALGPWKRPVAYLSKRLDPVAAGWPRCLRAIAAAALLTREASKLTFGQDIEITSSHNLESLLRSPPDKWLTNARITQYQVLLLDPPRVRFKQTAALNPATLLPETDDTLPIHHCLDTLDSLTSTRPDLTDQPLAQAEATLFTDGSSYIRDGKRYAGAAVVTLDSVIWAEPLPIGTSAQKAELIALTKALEWSKDKSVNIYTDSRYAFATLHVHGMIYRERGWLTAGGKAIKNAPEILALLTAVWLPKRVAVMHCKGHQKDDAPTSTGNRRADEVAREVAIRPLSTQATISAGKRTADGSEFEKRTADGSEFESPKKKAKVE

SEQ ID NO: 6684 - protein, 2099 aa, synthetic construct
MPAAKRVKLDGGDKKYSIGLDIGTNSVGWAVITDEYKVPSKKFKVLGNTDRHSIKKNLIGALLFDSGETAEATRLKRTARRRYTRRKNRICYLQEIFSNEMAKVDDSFFHRLEESFLVEEDKKHERHPIFGNIVDEVAYHEKYPTIYHLRKKLVDSTDKADLRLIYLALAHMIKFRGHFLIEGDLNPDNSDVDKLFIQLVQTYNQLFEENPINASGVDAKAILSARLSKSRRLENLIAQLPGEKKNGLFGNLIALSLGLTPNFKSNFDLAEDAKLQLSKDTYDDDLDNLLAQIGDQYADLFLAAKNLSDAILLSDILRVNTEITKAPLSASMIKRYDEHHQDLTLLKALVRQQLPEKYKEIFFDQSKNGYAGYIDGGASQEEFYKFIKPILEKMDGTEELLVKLNREDLLRKQRTFDNGSIPHQIHLGELHAILRRQEDFYPFLKDNREKIEKILTFRIPYYVGPLARGNSRFAWMTRKSEETITPWNFEEVVDKGASAQSFIERMTNFDKNLPNEKVLPKHSLLYEYFTVYNELTKVKYVTEGMRKPAFLSGEQKKAIVDLLFKTNRKVTVKQLKEDYFKKIECFDSVEISGVEDRFNASLGTYHDLLKIIKDKDFLDNEENEDILEDIVLTLTLFEDREMIEERLKTYAHLFDDKVMKQLKRRRYTGWGRLSRKLINGIRDKQSGKTILDFLKSDGFANRNFMQLIHDDSLTFKEDIQKAQVSGQGDSLHEHIANLAGSPAIKKGILQTVKVVDELVKVMGRHKPENIVIEMARENQTTQKGQKNSRERMKRIEEGIKELGSQILKEHPVENTQLQNEKLYLYYLQNGRDMYVDQELDINRLSDYDVDHIVPQSFLKDDSIDNKVLTRSDKARGKSDNVPSEEVVKKMKNYWRQLLNAKLITQRKFDNLTKAERGGLSELDKAGFIKRQLVETRQITKHVAQILDSRMNTKYDENDKLIREVKVITLKSKLVSDFRKDFQFYKVREINNYHHAHDAYLNAVVGTALIKKYPKLESEFVYGDYKVYDVRKMIAKSEQEIGKATAKYFFYSNIMNFFKTEITLANGEIRKRPLIETNGETGEIVWDKGRDFATVRKVLSMPQVNIVKKTEVQTGGFSKESILPKRNSDKLIARKKDWDPKKYGGFDSPTVAYSVLVVAKVEKGKSKKLKSVKELLGITIMERSSFEKNPIDFLEAKGYKEVKKDLIIKLPKYSLFELENGRKRMLASAGELQKGNELALPSKYVNFLYLASHYEKLKGSPEDNEQKQLFVEQHKHYLDEIIEQISEFSKRVILADANLDKVLSAYNKHRDKPIREQAENIIHLFTLTNLGAPAAFKYFDTTIDRKRYTSTKEVLDATLIHQSITGLYETRIDLSQLGGDGGGGGEAAAKGGTVSLQDEHRLFDIPVTTSLPDVWLQDFPQAWAETGGLGRAKCQAPIIIDLKPTAVPVSIKQYPMSLEAHMGIRQHIIKFLELGVLRPCRSPWNTPLLPVKKPGTQDYRPVQDLREINKRTVDIHPTVPNPYNLLSTLKPDYSWYTVLDLKDAFFCLPLAPQSQELFAFEWKDPERGISGQLTWTRLPQGFKNSPTLFDEALHRDLTDFRTQHPEVTLLQYVDDLLLAAPTKKACTQGTRHLLQELGEKGYRASAKKAQICQTKVTYLGYILSEGKRWLTPGRIETVARIPPPRNPREVREFLGTAGFCRLWIPGFAELAAPLYALTKESTPFTWQTEHQLAFEALKKALLSAPALGLPDTSKPFTLFLDERQGIAKGVLTQKLGPWKRPVAYLSKKLDPVAAGWPPCLRIMAATAMLVKDSAKLTLGQPLTVITPHTLEAIVRQPPDRWITNARLTHYQALLLDTDRVQFGPPVTLNPATLLPVPENQPSPHDCRQVLAETHGTREDLKDQELPDADHTWYTDGSSYLDSGTRRAGAAVVDGHNTIWAQSLPPGTSAQKAELIALTKALELSKGKKANIYTDSRYAFATAHTHGSIYERRGLLTSEGKEIKNKAEIIALLKALFLPQEVAIIHCPGHQKGQDPVAVGNRQADRVARQAAMAEVLTLATEPDNTSHITAGKRTADGSEFEKRTADGSEFESPKKKAKVE

SEQ ID NO: 6685 - protein, 2092 aa, synthetic construct
MPAAKRVKLDGGDKKYSIGLDIGTNSVGWAVITDEYKVPSKKFKVLGNTDRHSIKKNLIGALLFDSGETAEATRLKRTARRRYTRRKNRICYLQEIFSNEMAKVDDSFFHRLEESFLVEEDKKHERHPIFGNIVDEVAYHEKYPTIYHLRKKLVDSTDKADLRLIYLALAHMIKFRGHFLIEGDLNPDNSDVDKLFIQLVQTYNQLFEENPINASGVDAKAILSARLSKSRRLENLIAQLPGEKKNGLFGNLIALSLGLTPNFKSNFDLAEDAKLQLSKDTYDDDLDNLLAQIGDQYADLFLAAKNLSDAILLSDILRVNTEITKAPLSASMIKRYDEHHQDLTLLKALVRQQLPEKYKEIFFDQSKNGYAGYIDGGASQEEFYKFIKPILEKMDGTEELLVKLNREDLLRKQRTFDNGSIPHQIHLGELHAILRRQEDFYPFLKDNREKIEKILTFRIPYYVGPLARGNSRFAWMTRKSEETITPWNFEEVVDKGASAQSFIERMTNFDKNLPNEKVLPKHSLLYEYFTVYNELTKVKYVTEGMRKPAFLSGEQKKAIVDLLFKTNRKVTVKQLKEDYFKKIECFDSVEISGVEDRFNASLGTYHDLLKIIKDKDFLDNEENEDILEDIVLTLTLFEDREMIEERLKTYAHLFDDKVMKQLKRRRYTGWGRLSRKLINGIRDKQSGKTILDFLKSDGFANRNFMQLIHDDSLTFKEDIQKAQVSGQGDSLHEHIANLAGSPAIKKGILQTVKVVDELVKVMGRHKPENIVIEMARENQTTQKGQKNSRERMKRIEEGIKELGSQILKEHPVENTQLQNEKLYLYYLQNGRDMYVDQELDINRLSDYDVDHIVPQSFLKDDSIDNKVLTRSDKARGKSDNVPSEEVVKKMKNYWRQLLNAKLITQRKFDNLTKAERGGLSELDKAGFIKRQLVETRQITKHVAQILDSRMNTKYDENDKLIREVKVITLKSKLVSDFRKDFQFYKVREINNYHHAHDAYLNAVVGTALIKKYPKLESEFVYGDYKVYDVRKMIAKSEQEIGKATAKYFFYSNIMNFFKTEITLANGEIRKRPLIETNGETGEIVWDKGRDFATVRKVLSMPQVNIVKKTEVQTGGFSKESILPKRNSDKLIARKKDWDPKKYGGFDSPTVAYSVLVVAKVEKGKSKKLKSVKELLGITIMERSSFEKNPIDFLEAKGYKEVKKDLIIKLPKYSLFELENGRKRMLASAGELQKGNELALPSKYVNFLYLASHYEKLKGSPEDNEQKQLFVEQHKHYLDEIIEQISEFSKRVILADANLDKVLSAYNKHRDKPIREQAENIIHLFTLTNLGAPAAFKYFDTTIDRKRYTSTKEVLDATLIHQSITGLYETRIDLSQLGGDGGGGGEAAAKGGTLQLEEEYRLFEPESTQKQEMDIWLKNFPQAWAETGGMGTAHCQAPVLIQLKATATPISIRQYPMPHEAYQGIKPHIRRMLDQGILKPCQSPWNTPLLPVKKPGTEDYRPVQDLREVNKRVEDIHPTVPNPYNLLSTLPPSHPWYTVLDLKDAFFCLRLHSESQLLFAFEWRDPEIGLSGQLTWTRLPQGFKNSPTLFNEALHSDLADFRVRYPALVLLQYVDDLLLAAATRTECLEGTKALLETLGNKGYRASAKKAQICLQEVTYLGYSLKDGQRWLTKARKEAILSIPVPKNSRQVREFLGTAGYCRLWIPGFAELAAPLYPLTRPGTLFQWGTEQQLAFEDIKKALLSSPALGLPDITKPFELFIDENSGFAKGVLVQKLGPWKRPVAYLSKKLDTVASGWPPCLRMVAAIAILVKDAGKLTLGQPLTILTSHPVEALVRQPPNKWLSNARMTHYQAMLLDAERVHFGPTVSLNPATLLPLPSGGNHHDCLQILAETHGTRPDLTDQPLPDADLTWYTDGSSFIRNGEREAGAAVTTESEVIWAAPLPPGTSAQRAELIALTQALKMAEGKKLTVYTDSRYAFATTHVHGEIYRRRGWLTSEGKEIKNKNEILALLEALFLPKRLSIIHCPGHQKGDSPQAKGNRLADDTAKKAATETHSSLTVLPAGKRTADGSEFEKRTADGSEFESPKKKAKVE

SEQ ID NO: 6686 - protein, 2124 aa, synthetic construct
MPAAKRVKLDGGDKKYSIGLDIGTNSVGWAVITDEYKVPSKKFKVLGNTDRHSIKKNLIGALLFDSGETAEATRLKRTARRRYTRRKNRICYLQEIFSNEMAKVDDSFFHRLEESFLVEEDKKHERHPIFGNIVDEVAYHEKYPTIYHLRKKLVDSTDKADLRLIYLALAHMIKFRGHFLIEGDLNPDNSDVDKLFIQLVQTYNQLFEENPINASGVDAKAILSARLSKSRRLENLIAQLPGEKKNGLFGNLIALSLGLTPNFKSNFDLAEDAKLQLSKDTYDDDLDNLLAQIGDQYADLFLAAKNLSDAILLSDILRVNTEITKAPLSASMIKRYDEHHQDLTLLKALVRQQLPEKYKEIFFDQSKNGYAGYIDGGASQEEFYKFIKPILEKMDGTEELLVKLNREDLLRKQRTFDNGSIPHQIHLGELHAILRRQEDFYPFLKDNREKIEKILTFRIPYYVGPLARGNSRFAWMTRKSEETITPWNFEEVVDKGASAQSFIERMTNFDKNLPNEKVLPKHSLLYEYFTVYNELTKVKYVTEGMRKPAFLSGEQKKAIVDLLFKTNRKVTVKQLKEDYFKKIECFDSVEISGVEDRFNASLGTYHDLLKIIKDKDFLDNEENEDILEDIVLTLTLFEDREMIEERLKTYAHLFDDKVMKQLKRRRYTGWGRLSRKLINGIRDKQSGKTILDFLKSDGFANRNFMQLIHDDSLTFKEDIQKAQVSGQGDSLHEHIANLAGSPAIKKGILQTVKVVDELVKVMGRHKPENIVIEMARENQTTQKGQKNSRERMKRIEEGIKELGSQILKEHPVENTQLQNEKLYLYYLQNGRDMYVDQELDINRLSDYDVDHIVPQSFLKDDSIDNKVLTRSDKARGKSDNVPSEEVVKKMKNYWRQLLNAKLITQRKFDNLTKAERGGLSELDKAGFIKRQLVETRQITKHVAQILDSRMNTKYDENDKLIREVKVITLKSKLVSDFRKDFQFYKVREINNYHHAHDAYLNAVVGTALIKKYPKLESEFVYGDYKVYDVRKMIAKSEQEIGKATAKYFFYSNIMNFFKTEITLANGEIRKRPLIETNGETGEIVWDKGRDFATVRKVLSMPQVNIVKKTEVQTGGFSKESILPKRNSDKLIARKKDWDPKKYGGFDSPTVAYSVLVVAKVEKGKSKKLKSVKELLGITIMERSSFEKNPIDFLEAKGYKEVKKDLIIKLPKYSLFELENGRKRMLASAGELQKGNELALPSKYVNFLYLASHYEKLKGSPEDNEQKQLFVEQHKHYLDEIIEQISEFSKRVILADANLDKVLSAYNKHRDKPIREQAENIIHLFTLTNLGAPAAFKYFDTTIDRKRYTSTKEVLDATLIHQSITGLYETRIDLSQLGGDGGGGGEAAAKGGLLGRDLLTKLKAQIQFSTEGPQVTWEDRPAMCLVLNLEEEYRLHEKPVPPSIDPSWLQLFPMVWAEKAGMGLANQVPPVVVELKSDASPVAVRQYPMSKEAREGIRPHIQRFLDLGILVPCQSPWNTPLLPVKKPGTNDYRPVQDLREVNKRVQDIHPTVPNPYNLLSSLPPSHTWYSVLDLKDAFFCLKLHPNSQPLFAFEWRDPEKGNTGQLTWTRLPQGFKNSPTLFNEALHRDLASFRALNPQVVMLQYVDDLLVAAPTYRDCKEGTRRLLQELSKLGYRVSAKKAQLCREEVTYLGYLLKGGKRWLTPARKATVMKIPTPTTPRQVREFLGKAGFCRLFIPGFASLAAPLYPLTRPKVPFTWTEAHQEAFGRIKEALLSAPALALPDLTKPFALYVDEKEGVARGVLTQTLGPWRRPVAYLSKKLDPVASGWPTCLKAIAAVALLLKDADKLTLGQNVLVIAPHNLESIVRQPPDRWMTNARMTHYQSLLLNERVSFAPPAILNPATLLPVESDDTPIHICSEILAEETGTRPDLRDQPLPGVPAWYTDGSSFIMDGRRQAGAAIVDNKRTVWASNLPEGTSAQKAELIALTQALRLAEGKSINIYTDSRYAFATAHVHGAIYKQRGWLTSAGKDIKNKEEILALLEAIHLPKRVAIIHCPGHQRGTDPVATGNRKADEAAKQAAQSTRILTETTKNAGKRTADGSEFEKRTADGSEFESPKKKAKVE

SEQ ID NO: 6687 - protein, 2215 aa, synthetic construct
MPAAKRVKLDGGDKKYSIGLDIGTNSVGWAVITDEYKVPSKKFKVLGNTDRHSIKKNLIGALLFDSGETAEATRLKRTARRRYTRRKNRICYLQEIFSNEMAKVDDSFFHRLEESFLVEEDKKHERHPIFGNIVDEVAYHEKYPTIYHLRKKLVDSTDKADLRLIYLALAHMIKFRGHFLIEGDLNPDNSDVDKLFIQLVQTYNQLFEENPINASGVDAKAILSARLSKSRRLENLIAQLPGEKKNGLFGNLIALSLGLTPNFKSNFDLAEDAKLQLSKDTYDDDLDNLLAQIGDQYADLFLAAKNLSDAILLSDILRVNTEITKAPLSASMIKRYDEHHQDLTLLKALVRQQLPEKYKEIFFDQSKNGYAGYIDGGASQEEFYKFIKPILEKMDGTEELLVKLNREDLLRKQRTFDNGSIPHQIHLGELHAILRRQEDFYPFLKDNREKIEKILTFRIPYYVGPLARGNSRFAWMTRKSEETITPWNFEEVVDKGASAQSFIERMTNFDKNLPNEKVLPKHSLLYEYFTVYNELTKVKYVTEGMRKPAFLSGEQKKAIVDLLFKTNRKVTVKQLKEDYFKKIECFDSVEISGVEDRFNASLGTYHDLLKIIKDKDFLDNEENEDILEDIVLTLTLFEDREMIEERLKTYAHLFDDKVMKQLKRRRYTGWGRLSRKLINGIRDKQSGKTILDFLKSDGFANRNFMQLIHDDSLTFKEDIQKAQVSGQGDSLHEHIANLAGSPAIKKGILQTVKVVDELVKVMGRHKPENIVIEMARENQTTQKGQKNSRERMKRIEEGIKELGSQILKEHPVENTQLQNEKLYLYYLQNGRDMYVDQELDINRLSDYDVDHIVPQSFLKDDSIDNKVLTRSDKARGKSDNVPSEEVVKKMKNYWRQLLNAKLITQRKFDNLTKAERGGLSELDKAGFIKRQLVETRQITKHVAQILDSRMNTKYDENDKLIREVKVITLKSKLVSDFRKDFQFYKVREINNYHHAHDAYLNAVVGTALIKKYPKLESEFVYGDYKVYDVRKMIAKSEQEIGKATAKYFFYSNIMNFFKTEITLANGEIRKRPLIETNGETGEIVWDKGRDFATVRKVLSMPQVNIVKKTEVQTGGFSKESILPKRNSDKLIARKKDWDPKKYGGFDSPTVAYSVLVVAKVEKGKSKKLKSVKELLGITIMERSSFEKNPIDFLEAKGYKEVKKDLIIKLPKYSLFELENGRKRMLASAGELQKGNELALPSKYVNFLYLASHYEKLKGSPEDNEQKQLFVEQHKHYLDEIIEQISEFSKRVILADANLDKVLSAYNKHRDKPIREQAENIIHLFTLTNLGAPAAFKYFDTTIDRKRYTSTKEVLDATLIHQSITGLYETRIDLSQLGGDGGGGGEAAAKGGTLGDQGSRGSDPLPEPRVTLTVEGIPTEFLVNTGAEHSVLTKPMGKMGSKRTVVAGATGSKVYPWTTKRLLKIGQKQVTHSFLVIPECPAPLLGRDLLTKLKAQIQFSTEGPQVTWEDRPAMCLVLNLEEEYRLHEKPVPPSIDPSWLQLFPMVWAEKAGMGLANQVPPVVVELKSDASPVAVRQYPMSKEAREGIRPHIQRFLDLGILVPCQSPWNTPLLPVKKPGTNDYRPVQDLREVNKRVQDIHPTVPNPYNLLSSLPPSHTWYSVLDLKDAFFCLKLHPNSQPLFAFEWRDPEKGNTGQLTWTRLPQGFKNSPTLFNEALHRDLASFRALNPQVVMLQYVDDLLVAAPTYRDCKEGTRRLLQELSKLGYRVSAKKAQLCREEVTYLGYLLKGGKRWLTPARKATVMKIPTPTTPRQVREFLGTAGFCRLWIPGFASLAAPLYPLTRPKVPFTWTEAHQEAFGRIKEALLSAPALALPDLTKPFALYVDEKEGVARGVLTQTLGPWRRPVAYLSKKLDPVASGWPTCLKAIAAVALLLKDADKLTLGQNVLVIAPHNLESIVRQPPDRWMTNARMTHYQSLLLNERVSFAPPAILNPATLLPVESDDTPIHICSEILAEETGTRPDLRDQPLPGVPAWYTDGSSFIMDGRRQAGAAIVDNKRTVWASNLPEGTSAQKAELIALTQALRLAEGKSINIYTDSRYAFATAHVHGAIYKQRGWLTSAGKDIKNKEEILALLEAIHLPKRVAIIHCPGHQRGTDPVATGNRKADEAAKQAAQSTRILTETTKNAGKRTADGSEFEKRTADGSEFESPKKKAKVE

SEQ ID NO: 6688 - protein, 2215 aa, synthetic construct
MPAAKRVKLDGGDKKYSIGLDIGTNSVGWAVITDEYKVPSKKFKVLGNTDRHSIKKNLIGALLFDSGETAEATRLKRTARRRYTRRKNRICYLQEIFSNEMAKVDDSFFHRLEESFLVEEDKKHERHPIFGNIVDEVAYHEKYPTIYHLRKKLVDSTDKADLRLIYLALAHMIKFRGHFLIEGDLNPDNSDVDKLFIQLVQTYNQLFEENPINASGVDAKAILSARLSKSRRLENLIAQLPGEKKNGLFGNLIALSLGLTPNFKSNFDLAEDAKLQLSKDTYDDDLDNLLAQIGDQYADLFLAAKNLSDAILLSDILRVNTEITKAPLSASMIKRYDEHHQDLTLLKALVRQQLPEKYKEIFFDQSKNGYAGYIDGGASQEEFYKFIKPILEKMDGTEELLVKLNREDLLRKQRTFDNGSIPHQIHLGELHAILRRQEDFYPFLKDNREKIEKILTFRIPYYVGPLARGNSRFAWMTRKSEETITPWNFEEVVDKGASAQSFIERMTNFDKNLPNEKVLPKHSLLYEYFTVYNELTKVKYVTEGMRKPAFLSGEQKKAIVDLLFKTNRKVTVKQLKEDYFKKIECFDSVEISGVEDRFNASLGTYHDLLKIIKDKDFLDNEENEDILEDIVLTLTLFEDREMIEERLKTYAHLFDDKVMKQLKRRRYTGWGRLSRKLINGIRDKQSGKTILDFLKSDGFANRNFMQLIHDDSLTFKEDIQKAQVSGQGDSLHEHIANLAGSPAIKKGILQTVKVVDELVKVMGRHKPENIVIEMARENQTTQKGQKNSRERMKRIEEGIKELGSQILKEHPVENTQLQNEKLYLYYLQNGRDMYVDQELDINRLSDYDVDHIVPQSFLKDDSIDNKVLTRSDKARGKSDNVPSEEVVKKMKNYWRQLLNAKLITQRKFDNLTKAERGGLSELDKAGFIKRQLVETRQITKHVAQILDSRMNTKYDENDKLIREVKVITLKSKLVSDFRKDFQFYKVREINNYHHAHDAYLNAVVGTALIKKYPKLESEFVYGDYKVYDVRKMIAKSEQEIGKATAKYFFYSNIMNFFKTEITLANGEIRKRPLIETNGETGEIVWDKGRDFATVRKVLSMPQVNIVKKTEVQTGGFSKESILPKRNSDKLIARKKDWDPKKYGGFDSPTVAYSVLVVAKVEKGKSKKLKSVKELLGITIMERSSFEKNPIDFLEAKGYKEVKKDLIIKLPKYSLFELENGRKRMLASAGELQKGNELALPSKYVNFLYLASHYEKLKGSPEDNEQKQLFVEQHKHYLDEIIEQISEFSKRVILADANLDKVLSAYNKHRDKPIREQAENIIHLFTLTNLGAPAAFKYFDTTIDRKRYTSTKEVLDATLIHQSITGLYETRIDLSQLGGDGGGGGEAAAKGGTLGDQGSRGSDPLPEPRVTLTVEGIPTEFLVNTGAEHSVLTKPMGKMGSKRTVVAGATGSKVYPWTTKRLLKIGQKQVTHSFLVIPECPAPLLGRDLLTKLKAQIQFSTEGPQVTWEDRPAMCLVLNLEEEYRLHEKPVPPSIDPSWLQLFPMVWAEKAGMGLANQVPPVVVELKSDASPVAVRQYPMSKEAREGIRPHIQRFLDLGILVPCQSPWNTPLLPVKKPGTNDYRPVQDLREVNKRVQDIHPTVPNPYNLLSSLPPSHTWYSVLDLKDAFFCLKLHPNSQPLFAFEWRDPEKGNTGQLTWTRLPQGFKNSPTLFNEALHRDLASFRALNPQVVMLQYVDDLLVAAPTYRDCKEGTRRLLQELSKLGYRVSAKKAQLCREEVTYLGYLLKGGKRWLTPARKATVMKIPTPTTPRQVREFLGKAGFCRLFIPGFASLAAPLYPLTRPKVPFTWTEAHQEAFGRIKEALLSAPALALPDLTKPFALYVDEKEGVARGVLTQTLGPWRRPVAYLSKKLDPVASGWPTCLKAIAAVALLLKDADKLTLGQNVLVIAPHNLESIVRQPPDRWMTNARMTHYQSLLLNERVSFAPPAILNPATLLPVESDDTPIHICSEILAEETGTRPDLRDQPLPGVPAWYTDGSSFIMDGRRQAGAAIVDNKRTVWASNLPEGTSAQKAELIALTQALRLAEGKSINIYTDSRYAFATAHVHGAIYKQRGWLTSAGKDIKNKEEILALLEAIHLPKRVAIIHCPGHQRGTDPVATGNRKADEAAKQAAQSTRILTETTKNAGKRTADGSEFEKRTADGSEFESPKKKAKVE

SEQ ID NO: 6689 - protein, 2093 aa, synthetic construct
MPAAKRVKLDGGDKKYSIGLDIGTNSVGWAVITDEYKVPSKKFKVLGNTDRHSIKKNLIGALLFDSGETAEATRLKRTARRRYTRRKNRICYLQEIFSNEMAKVDDSFFHRLEESFLVEEDKKHERHPIFGNIVDEVAYHEKYPTIYHLRKKLVDSTDKADLRLIYLALAHMIKFRGHFLIEGDLNPDNSDVDKLFIQLVQTYNQLFEENPINASGVDAKAILSARLSKSRRLENLIAQLPGEKKNGLFGNLIALSLGLTPNFKSNFDLAEDAKLQLSKDTYDDDLDNLLAQIGDQYADLFLAAKNLSDAILLSDILRVNTEITKAPLSASMIKRYDEHHQDLTLLKALVRQQLPEKYKEIFFDQSKNGYAGYIDGGASQEEFYKFIKPILEKMDGTEELLVKLNREDLLRKQRTFDNGSIPHQIHLGELHAILRRQEDFYPFLKDNREKIEKILTFRIPYYVGPLARGNSRFAWMTRKSEETITPWNFEEVVDKGASAQSFIERMTNFDKNLPNEKVLPKHSLLYEYFTVYNELTKVKYVTEGMRKPAFLSGEQKKAIVDLLFKTNRKVTVKQLKEDYFKKIECFDSVEISGVEDRFNASLGTYHDLLKIIKDKDFLDNEENEDILEDIVLTLTLFEDREMIEERLKTYAHLFDDKVMKQLKRRRYTGWGRLSRKLINGIRDKQSGKTILDFLKSDGFANRNFMQLIHDDSLTFKEDIQKAQVSGQGDSLHEHIANLAGSPAIKKGILQTVKVVDELVKVMGRHKPENIVIEMARENQTTQKGQKNSRERMKRIEEGIKELGSQILKEHPVENTQLQNEKLYLYYLQNGRDMYVDQELDINRLSDYDVDHIVPQSFLKDDSIDNKVLTRSDKARGKSDNVPSEEVVKKMKNYWRQLLNAKLITQRKFDNLTKAERGGLSELDKAGFIKRQLVETRQITKHVAQILDSRMNTKYDENDKLIREVKVITLKSKLVSDFRKDFQFYKVREINNYHHAHDAYLNAVVGTALIKKYPKLESEFVYGDYKVYDVRKMIAKSEQEIGKATAKYFFYSNIMNFFKTEITLANGEIRKRPLIETNGETGEIVWDKGRDFATVRKVLSMPQVNIVKKTEVQTGGFSKESILPKRNSDKLIARKKDWDPKKYGGFDSPTVAYSVLVVAKVEKGKSKKLKSVKELLGITIMERSSFEKNPIDFLEAKGYKEVKKDLIIKLPKYSLFELENGRKRMLASAGELQKGNELALPSKYVNFLYLASHYEKLKGSPEDNEQKQLFVEQHKHYLDEIIEQISEFSKRVILADANLDKVLSAYNKHRDKPIREQAENIIHLFTLTNLGAPAAFKYFDTTIDRKRYTSTKEVLDATLIHQSITGLYETRIDLSQLGGDGGGGGEAAAKGGTLNLEDEYRLYETSAEPEVSPGSTWLSDFPQAWAETGGMGLAVRQAPLIIPLKATSTPVSIKQYPMSQEAKLGIKPHIQRLLDQGILVPCQSPWNTPLLPVKKPGTNDYRPVQDLREVNKRVEDIHPTVPNPYNLLSGLPPSHRWYTVLDLKDAFFCLRLHPTSQPLFAFEWRDPGMGISGQLTWTRLPQGFKNSPTLFNEALHRDLADFRIQHPDLILLQYVDDILLAATSELDCQQGTRALLLTLGNLGYRASAKKAQLCQKQVKYLGYLLKEGQRWLTEARKETVMGQPTPKTPRQLREFLGTAGFCRLWIPGFAEMAAPLYPLTKPGTLFNWGPDQQKAYQEIKQALLTAPALGLPDLTKPFELFVDEKQGYAKGVLTQKLGPWRRPVAYLSKKLDPVAAGWPPCLRMVAAIAVLRKDAGKLTMGQPLVILAPHAVEALVKQPPDRWLSNARMTHYQAMLLDTDRVQFGPVVALNPATLLPLPEEGAPHDCLEILAETHGTRPDLTDQPIPDADHTWYTDGSSFLQEGQRKAGAAVTTETEVIWARALPAGTSAQRAELIALTQALKMAEGKRLNVYTDSRYAFATAHIHGEIYRRRGWLTSEGREIKNKSEILALLKALFLPKRLSIIHCLGHQKGDSAEARGNRLADQAAREAAIKTPPDTSTLLAGKRTADGSEFEKRTADGSEFESPKKKAKVE

SEQ ID NO: 6690 - protein, 2093 aa, synthetic construct
MPAAKRVKLDGGDKKYSIGLDIGTNSVGWAVITDEYKVPSKKFKVLGNTDRHSIKKNLIGALLFDSGETAEATRLKRTARRRYTRRKNRICYLQEIFSNEMAKVDDSFFHRLEESFLVEEDKKHERHPIFGNIVDEVAYHEKYPTIYHLRKKLVDSTDKADLRLIYLALAHMIKFRGHFLIEGDLNPDNSDVDKLFIQLVQTYNQLFEENPINASGVDAKAILSARLSKSRRLENLIAQLPGEKKNGLFGNLIALSLGLTPNFKSNFDLAEDAKLQLSKDTYDDDLDNLLAQIGDQYADLFLAAKNLSDAILLSDILRVNTEITKAPLSASMIKRYDEHHQDLTLLKALVRQQLPEKYKEIFFDQSKNGYAGYIDGGASQEEFYKFIKPILEKMDGTEELLVKLNREDLLRKQRTFDNGSIPHQIHLGELHAILRRQEDFYPFLKDNREKIEKILTFRIPYYVGPLARGNSRFAWMTRKSEETITPWNFEEVVDKGASAQSFIERMTNFDKNLPNEKVLPKHSLLYEYFTVYNELTKVKYVTEGMRKPAFLSGEQKKAIVDLLFKTNRKVTVKQLKEDYFKKIECFDSVEISGVEDRFNASLGTYHDLLKIIKDKDFLDNEENEDILEDIVLTLTLFEDREMIEERLKTYAHLFDDKVMKQLKRRRYTGWGRLSRKLINGIRDKQSGKTILDFLKSDGFANRNFMQLIHDDSLTFKEDIQKAQVSGQGDSLHEHIANLAGSPAIKKGILQTVKVVDELVKVMGRHKPENIVIEMARENQTTQKGQKNSRERMKRIEEGIKELGSQILKEHPVENTQLQNEKLYLYYLQNGRDMYVDQELDINRLSDYDVDHIVPQSFLKDDSIDNKVLTRSDKARGKSDNVPSEEVVKKMKNYWRQLLNAKLITQRKFDNLTKAERGGLSELDKAGFIKRQLVETRQITKHVAQILDSRMNTKYDENDKLIREVKVITLKSKLVSDFRKDFQFYKVREINNYHHAHDAYLNAVVGTALIKKYPKLESEFVYGDYKVYDVRKMIAKSEQEIGKATAKYFFYSNIMNFFKTEITLANGEIRKRPLIETNGETGEIVWDKGRDFATVRKVLSMPQVNIVKKTEVQTGGFSKESILPKRNSDKLIARKKDWDPKKYGGFDSPTVAYSVLVVAKVEKGKSKKLKSVKELLGITIMERSSFEKNPIDFLEAKGYKEVKKDLIIKLPKYSLFELENGRKRMLASAGELQKGNELALPSKYVNFLYLASHYEKLKGSPEDNEQKQLFVEQHKHYLDEIIEQISEFSKRVILADANLDKVLSAYNKHRDKPIREQAENIIHLFTLTNLGAPAAFKYFDTTIDRKRYTSTKEVLDATLIHQSITGLYETRIDLSQLGGDGGGGGEAAAKGGTLNLEDEYRLYETSAEPEVSPGSTWLSDFPQAWAETGGMGLAVRQAPLIIPLKATSTPVSIKQYPMSQEAKLGIKPHIQRLLDQGILVPCQSPWNTPLLPVKKPGTNDYRPVQDLREVNKRVEDIHPTVPNPYNLLSGLPPSHRWYTVLDLKDAFFCLRLHPTSQPLFAFEWRDPGMGISGQLTWTRLPQGFKNSPTLFNEALHRDLADFRIQHPDLILLQYVDDILLAATSELDCQQGTRALLLTLGNLGYRASAKKAQLCQKQVKYLGYLLKEGQRWLTEARKETVMGQPTPKTPRQLREFLGKAGFCRLFIPGFAEMAAPLYPLTKPGTLFNWGPDQQKAYQEIKQALLTAPALGLPDLTKPFELFVDEKQGYAKGVLTQKLGPWRRPVAYLSKKLDPVAAGWPPCLRMVAAIAVLRKDAGKLTMGQPLVILAPHAVEALVKQPPDRWLSNARMTHYQAMLLDTDRVQFGPVVALNPATLLPLPEEGAPHDCLEILAETHGTRPDLTDQPIPDADHTWYTDGSSFLQEGQRKAGAAVTTETEVIWARALPAGTSAQRAELIALTQALKMAEGKRLNVYTDSRYAFATAHIHGEIYRRRGWLTSEGREIKNKSEILALLKALFLPKRLSIIHCLGHQKGDSAEARGNRLADQAAREAAIKTPPDTSTLLAGKRTADGSEFEKRTADGSEFESPKKKAKVE

SEQ ID NO: 6691 - protein, 2093 aa, synthetic construct
MPAAKRVKLDGGDKKYSIGLDIGTNSVGWAVITDEYKVPSKKFKVLGNTDRHSIKKNLIGALLFDSGETAEATRLKRTARRRYTRRKNRICYLQEIFSNEMAKVDDSFFHRLEESFLVEEDKKHERHPIFGNIVDEVAYHEKYPTIYHLRKKLVDSTDKADLRLIYLALAHMIKFRGHFLIEGDLNPDNSDVDKLFIQLVQTYNQLFEENPINASGVDAKAILSARLSKSRRLENLIAQLPGEKKNGLFGNLIALSLGLTPNFKSNFDLAEDAKLQLSKDTYDDDLDNLLAQIGDQYADLFLAAKNLSDAILLSDILRVNTEITKAPLSASMIKRYDEHHQDLTLLKALVRQQLPEKYKEIFFDQSKNGYAGYIDGGASQEEFYKFIKPILEKMDGTEELLVKLNREDLLRKQRTFDNGSIPHQIHLGELHAILRRQEDFYPFLKDNREKIEKILTFRIPYYVGPLARGNSRFAWMTRKSEETITPWNFEEVVDKGASAQSFIERMTNFDKNLPNEKVLPKHSLLYEYFTVYNELTKVKYVTEGMRKPAFLSGEQKKAIVDLLFKTNRKVTVKQLKEDYFKKIECFDSVEISGVEDRFNASLGTYHDLLKIIKDKDFLDNEENEDILEDIVLTLTLFEDREMIEERLKTYAHLFDDKVMKQLKRRRYTGWGRLSRKLINGIRDKQSGKTILDFLKSDGFANRNFMQLIHDDSLTFKEDIQKAQVSGQGDSLHEHIANLAGSPAIKKGILQTVKVVDELVKVMGRHKPENIVIEMARENQTTQKGQKNSRERMKRIEEGIKELGSQILKEHPVENTQLQNEKLYLYYLQNGRDMYVDQELDINRLSDYDVDHIVPQSFLKDDSIDNKVLTRSDKARGKSDNVPSEEVVKKMKNYWRQLLNAKLITQRKFDNLTKAERGGLSELDKAGFIKRQLVETRQITKHVAQILDSRMNTKYDENDKLIREVKVITLKSKLVSDFRKDFQFYKVREINNYHHAHDAYLNAVVGTALIKKYPKLESEFVYGDYKVYDVRKMIAKSEQEIGKATAKYFFYSNIMNFFKTEITLANGEIRKRPLIETNGETGEIVWDKGRDFATVRKVLSMPQVNIVKKTEVQTGGFSKESILPKRNSDKLIARKKDWDPKKYGGFDSPTVAYSVLVVAKVEKGKSKKLKSVKELLGITIMERSSFEKNPIDFLEAKGYKEVKKDLIIKLPKYSLFELENGRKRMLASAGELQKGNELALPSKYVNFLYLASHYEKLKGSPEDNEQKQLFVEQHKHYLDEIIEQISEFSKRVILADANLDKVLSAYNKHRDKPIREQAENIIHLFTLTNLGAPAAFKYFDTTIDRKRYTSTKEVLDATLIHQSITGLYETRIDLSQLGGDGGGGGEAAAKGGLGIEDEYRLHETSTEPDVSLGSTWLSDFPQAWAETGGMGLAVRQAPLIIPLKATSTPVSIQQYPMSHEARLGIKPHIQRLLDQGILVPCQSPWNTPLLPVKKPGTNDYRPVQDLREVNKRVEDIHPTVPNPYNLLSGLPPSHQWYTVLDLKDAFFCLRLHPTSQPLFAFEWRDPGMGISGQLTWTRLPQGFKNSPTLFNEALHRDLADFRIQHPDLILLQYVDDILLAATSELDCQQGTRALLQTLGDLGYRASAKKAQICQKQVKYLGYLLREGQRWLTEARKETVMGQPVPKTPRQLREFLGKAGFCRLFIPGFAEMAAPLYPLTKPGTLFSWGPDQQKAYQEIKQALLTAPALGLPDLTKPFELFVDEKQGYAKGVLTQKLGPWRRPVAYLSKKLDPVAAGWPPCLRMVAAIAVLTKDAGKLTMGQPLVILAPHAVEALVKQPPDRWLSNARMTHYQAMLLDTDRVQFGPVVALNPATLLPLPEEGAPHDCLEILAETHGTRPDLTDQPIPDADHTWYTDGSSFLQEGQRKAGAAVTTETEVIWAGALPAGTSAQRAELIALTQALKMAEGKRLNVYTDSRYAFATAHIHGEIYRRRGWLTSEGREIKNKSEILALLKALFLPKRLSIIHCLGHQKGDSAEARGNRLADQAAREAAIKTPPDTSTLLIAGKRTADGSEFEKRTADGSEFESPKKKAKVE

SEQ ID NO: 6692 - protein, 2093 aa, synthetic construct
MPAAKRVKLDGGDKKYSIGLDIGTNSVGWAVITDEYKVPSKKFKVLGNTDRHSIKKNLIGALLFDSGETAEATRLKRTARRRYTRRKNRICYLQEIFSNEMAKVDDSFFHRLEESFLVEEDKKHERHPIFGNIVDEVAYHEKYPTIYHLRKKLVDSTDKADLRLIYLALAHMIKFRGHFLIEGDLNPDNSDVDKLFIQLVQTYNQLFEENPINASGVDAKAILSARLSKSRRLENLIAQLPGEKKNGLFGNLIALSLGLTPNFKSNFDLAEDAKLQLSKDTYDDDLDNLLAQIGDQYADLFLAAKNLSDAILLSDILRVNTEITKAPLSASMIKRYDEHHQDLTLLKALVRQQLPEKYKEIFFDQSKNGYAGYIDGGASQEEFYKFIKPILEKMDGTEELLVKLNREDLLRKQRTFDNGSIPHQIHLGELHAILRRQEDFYPFLKDNREKIEKILTFRIPYYVGPLARGNSRFAWMTRKSEETITPWNFEEVVDKGASAQSFIERMTNFDKNLPNEKVLPKHSLLYEYFTVYNELTKVKYVTEGMRKPAFLSGEQKKAIVDLLFKTNRKVTVKQLKEDYFKKIECFDSVEISGVEDRFNASLGTYHDLLKIIKDKDFLDNEENEDILEDIVLTLTLFEDREMIEERLKTYAHLFDDKVMKQLKRRRYTGWGRLSRKLINGIRDKQSGKTILDFLKSDGFANRNFMQLIHDDSLTFKEDIQKAQVSGQGDSLHEHIANLAGSPAIKKGILQTVKVVDELVKVMGRHKPENIVIEMARENQTTQKGQKNSRERMKRIEEGIKELGSQILKEHPVENTQLQNEKLYLYYLQNGRDMYVDQELDINRLSDYDVDHIVPQSFLKDDSIDNKVLTRSDKARGKSDNVPSEEVVKKMKNYWRQLLNAKLITQRKFDNLTKAERGGLSELDKAGFIKRQLVETRQITKHVAQILDSRMNTKYDENDKLIREVKVITLKSKLVSDFRKDFQFYKVREINNYHHAHDAYLNAVVGTALIKKYPKLESEFVYGDYKVYDVRKMIAKSEQEIGKATAKYFFYSNIMNFFKTEITLANGEIRKRPLIETNGETGEIVWDKGRDFATVRKVLSMPQVNIVKKTEVQTGGFSKESILPKRNSDKLIARKKDWDPKKYGGFDSPTVAYSVLVVAKVEKGKSKKLKSVKELLGITIMERSSFEKNPIDFLEAKGYKEVKKDLIIKLPKYSLFELENGRKRMLASAGELQKGNELALPSKYVNFLYLASHYEKLKGSPEDNEQKQLFVEQHKHYLDEIIEQISEFSKRVILADANLDKVLSAYNKHRDKPIREQAENIIHLFTLTNLGAPAAFKYFDTTIDRKRYTSTKEVLDATLIHQSITGLYETRIDLSQLGGDGGGGGEAAAKGGTLNIEDEYRLHETSKGPDVPLGSTWLSDFPQAWAETGGMGLAVRQAPLIIPLKATSTPVSIKQYPMSQEARLGIKPHIQRLLDQGILVPCQSPWNTPLLPVKKPGTNDYRPVQDLREVNKRVEDIHPTVPNPYNLLSGLPPSHQWYTVLDLKDAFFCLRLHPTSQSLFAFEWRDPEMGISGQLTWTRLPQGFKNSPTLFNEALHRDLADFRIQHPDLILLQYVDDLLLAATSELDCQQGTRALLQTLGDLGYRASAKKAQICQKQVKYLGYLLKEGQRWLTEARKETVMGQPTPKTPRQLREFLGTAGFCRLWIPGFAEMAAPLYPLTKPGTLFEWGPDQQKAYQEIKQALLTAPALGLPDLTKPFELFVDEKQGYAKGVLTQKLGPWRRPVAYLSKKLDPVAAGWPPCLRMVAAIAVLTKDAGKLTMGQPLVILAPHAVEALVKQPPDRWLSNARMTHYQALLLDTDRVQFGPIVALNPATLLPLPEEGLQHDCLDILAEAHGTRPDLTDQPLPDADHTWYTDGSSFLQEGQRKAGAAVTTETEVVWAKALPAGTSAQRAELIALTQALKMAEGKKLNVYTDSRYAFATAHIHGEIYRRRGWLTSEGKEIKNKDEILALLKALFLPKRLSIIHCPGHQKGNRAEARGNRMADQAAREVATRETPETSTLLAGKRTADGSEFEKRTADGSEFESPKKKAKVE

SEQ ID NO: 6693 - protein, 2087 aa, synthetic construct
MPAAKRVKLDGGDKKYSIGLDIGTNSVGWAVITDEYKVPSKKFKVLGNTDRHSIKKNLIGALLFDSGETAEATRLKRTARRRYTRRKNRICYLQEIFSNEMAKVDDSFFHRLEESFLVEEDKKHERHPIFGNIVDEVAYHEKYPTIYHLRKKLVDSTDKADLRLIYLALAHMIKFRGHFLIEGDLNPDNSDVDKLFIQLVQTYNQLFEENPINASGVDAKAILSARLSKSRRLENLIAQLPGEKKNGLFGNLIALSLGLTPNFKSNFDLAEDAKLQLSKDTYDDDLDNLLAQIGDQYADLFLAAKNLSDAILLSDILRVNTEITKAPLSASMIKRYDEHHQDLTLLKALVRQQLPEKYKEIFFDQSKNGYAGYIDGGASQEEFYKFIKPILEKMDGTEELLVKLNREDLLRKQRTFDNGSIPHQIHLGELHAILRRQEDFYPFLKDNREKIEKILTFRIPYYVGPLARGNSRFAWMTRKSEETITPWNFEEVVDKGASAQSFIERMTNFDKNLPNEKVLPKHSLLYEYFTVYNELTKVKYVTEGMRKPAFLSGEQKKAIVDLLFKTNRKVTVKQLKEDYFKKIECFDSVEISGVEDRFNASLGTYHDLLKIIKDKDFLDNEENEDILEDIVLTLTLFEDREMIEERLKTYAHLFDDKVMKQLKRRRYTGWGRLSRKLINGIRDKQSGKTILDFLKSDGFANRNFMQLIHDDSLTFKEDIQKAQVSGQGDSLHEHIANLAGSPAIKKGILQTVKVVDELVKVMGRHKPENIVIEMARENQTTQKGQKNSRERMKRIEEGIKELGSQILKEHPVENTQLQNEKLYLYYLQNGRDMYVDQELDINRLSDYDVDHIVPQSFLKDDSIDNKVLTRSDKARGKSDNVPSEEVVKKMKNYWRQLLNAKLITQRKFDNLTKAERGGLSELDKAGFIKRQLVETRQITKHVAQILDSRMNTKYDENDKLIREVKVITLKSKLVSDFRKDFQFYKVREINNYHHAHDAYLNAVVGTALIKKYPKLESEFVYGDYKVYDVRKMIAKSEQEIGKATAKYFFYSNIMNFFKTEITLANGEIRKRPLIETNGETGEIVWDKGRDFATVRKVLSMPQVNIVKKTEVQTGGFSKESILPKRNSDKLIARKKDWDPKKYGGFDSPTVAYSVLVVAKVEKGKSKKLKSVKELLGITIMERSSFEKNPIDFLEAKGYKEVKKDLIIKLPKYSLFELENGRKRMLASAGELQKGNELALPSKYVNFLYLASHYEKLKGSPEDNEQKQLFVEQHKHYLDEIIEQISEFSKRVILADANLDKVLSAYNKHRDKPIREQAENIIHLFTLTNLGAPAAFKYFDTTIDRKRYTSTKEVLDATLIHQSITGLYETRIDLSQLGGDGGGGGEAAAKGGTLQLDDEYRLYSPLVKPDQNIQFWLEQFPQAWAETAGMGLAKQVPPQVIQLKASATPVSVRQYPLSKEAQEGIRPHVQRLIQQGILVPVQSPWNTPLLPVRKPGTNDYRPVQDLREVNKRVQDIHPTVPNPYNLLCALPPQRSWYTVLDLKDAFFCLRLHPTSQPLFAFEWRDPGTGRTGQLTWTRLPQGFKNSPTIFDEALHRDLANFRIQHPQVTLLQYVDDLLLAGATKQDCLEGTKALLLELSDLGYRASAKKAQICRREVTYLGYSLRDGQRWLTEARKKTVVQIPAPTTAKQVREFLGTAGFCRLWIPGFATLAAPLYPLTKEKGEFSWAPEHQKAFDAIKKALLSAPALALPDVTKPFTLYVDERKGVARGVLTQTLGPWRRPVAYLSKKLDPVASGWPVCLKAIAAVAILVKDADKLTLGQNITVIAPHALENIVRQPPDRWMTNARMTHYQSLLLTERVTFAPPAALNPATLLPEETDEPVTHDCHQLLIEETGVRKDLTDIPLTGEVLTWFTDGSSYVVEGKRMAGAAVVDGTRTIWASSLPEGTSAQKAELMALTQALRLAEGKSINIYTDSRYAFATAHVHGAIYKQRGLLTSAGREIKNKEEILSLLEALHLPKRLAIIHCPGHQKAKDPISRGNQMADRVAKQAAQGVNLLAGKRTADGSEFEKRTADGSEFESPKKKAKVE

SEQ ID NO: 6694 - protein, 2173 aa, synthetic construct
MPAAKRVKLDGGDKKYSIGLDIGTNSVGWAVITDEYKVPSKKFKVLGNTDRHSIKKNLIGALLFDSGETAEATRLKRTARRRYTRRKNRICYLQEIFSNEMAKVDDSFFHRLEESFLVEEDKKHERHPIFGNIVDEVAYHEKYPTIYHLRKKLVDSTDKADLRLIYLALAHMIKFRGHFLIEGDLNPDNSDVDKLFIQLVQTYNQLFEENPINASGVDAKAILSARLSKSRRLENLIAQLPGEKKNGLFGNLIALSLGLTPNFKSNFDLAEDAKLQLSKDTYDDDLDNLLAQIGDQYADLFLAAKNLSDAILLSDILRVNTEITKAPLSASMIKRYDEHHQDLTLLKALVRQQLPEKYKEIFFDQSKNGYAGYIDGGASQEEFYKFIKPILEKMDGTEELLVKLNREDLLRKQRTFDNGSIPHQIHLGELHAILRRQEDFYPFLKDNREKIEKILTFRIPYYVGPLARGNSRFAWMTRKSEETITPWNFEEVVDKGASAQSFIERMTNFDKNLPNEKVLPKHSLLYEYFTVYNELTKVKYVTEGMRKPAFLSGEQKKAIVDLLFKTNRKVTVKQLKEDYFKKIECFDSVEISGVEDRFNASLGTYHDLLKIIKDKDFLDNEENEDILEDIVLTLTLFEDREMIEERLKTYAHLFDDKVMKQLKRRRYTGWGRLSRKLINGIRDKQSGKTILDFLKSDGFANRNFMQLIHDDSLTFKEDIQKAQVSGQGDSLHEHIANLAGSPAIKKGILQTVKVVDELVKVMGRHKPENIVIEMARENQTTQKGQKNSRERMKRIEEGIKELGSQILKEHPVENTQLQNEKLYLYYLQNGRDMYVDQELDINRLSDYDVDHIVPQSFLKDDSIDNKVLTRSDKARGKSDNVPSEEVVKKMKNYWRQLLNAKLITQRKFDNLTKAERGGLSELDKAGFIKRQLVETRQITKHVAQILDSRMNTKYDENDKLIREVKVITLKSKLVSDFRKDFQFYKVREINNYHHAHDAYLNAVVGTALIKKYPKLESEFVYGDYKVYDVRKMIAKSEQEIGKATAKYFFYSNIMNFFKTEITLANGEIRKRPLIETNGETGEIVWDKGRDFATVRKVLSMPQVNIVKKTEVQTGGFSKESILPKRNSDKLIARKKDWDPKKYGGFDSPTVAYSVLVVAKVEKGKSKKLKSVKELLGITIMERSSFEKNPIDFLEAKGYKEVKKDLIIKLPKYSLFELENGRKRMLASAGELQKGNELALPSKYVNFLYLASHYEKLKGSPEDNEQKQLFVEQHKHYLDEIIEQISEFSKRVILADANLDKVLSAYNKHRDKPIREQAENIIHLFTLTNLGAPAAFKYFDTTIDRKRYTSTKEVLDATLIHQSITGLYETRIDLSQLGGDGGGGGEAAAKGGMDPLQLLQPLEAEIKGTKLKAHWNSGATITCVPQAFLEEEVPIKNIWIKTIHGEKEQPVYYLTFKIQGRKVEAEVISSPYDYILVSPSDIPWLMKKPLQLTTLVPLQEYEERLLKQTMLTGSYKEKLQSLFLKYDALWQHWENQVGHRRIKPHHIATGTVNPRPQKQYPINPKAKASIQTVINDLLKQGVLIQQNSIMNTPVYPVPKPDGKWRMVLDYREVNKTIPLIAAQNQHSAGILSSIFRGKYKTTLDLSNGFWAHSITPESYWLTAFTWLGQQYCWTRLPQGFLNSPALFNADVVDLLKEVPNVQVYVDDIYISHDDPREHLEQLEKVFSLLLNAGYVVSLKKSEIAQHEVEFLGFNITKEGRGLTETFKQKLLNITPPRDLKQLQSILGKLNFARNFIPNFSELVKPLYNIIATAPGKYITWTTDNSQQLQNIISMLNSAENLEERNPEVRLIMKVNTSPSAGYIRFYNEFAKRPIMYLNYVYTKAEVKFTNTEKLLTTIHKGLIKALDLGMGQEILVYSPIVSMTKIQKTPLPERKALPIRWITWMSYLEDPRIQFHYDKTLPELQQVPTVTDDIIAKIKHPSEFSMVFYTDGSAIKHPNVNKSHNAGMGIAQVQFKPEFTVINTWSIPLGDHTAQLAEVAAVEFACKKALKIDGPVLIVTDSFYVAESVNKELPYWQSNGFFNNKKKPLKHVSKWKSIADCIQLKPDIIIIHEKGHQPTASTFHTEGNNLADKLATQGSYVVNAGKRTADGSEFEKRTADGSEFESPKKKAKVE

SEQ ID NO: 6695 - protein, 2093 aa, synthetic construct
MPAAKRVKLDGGDKKYSIGLDIGTNSVGWAVITDEYKVPSKKFKVLGNTDRHSIKKNLIGALLFDSGETAEATRLKRTARRRYTRRKNRICYLQEIFSNEMAKVDDSFFHRLEESFLVEEDKKHERHPIFGNIVDEVAYHEKYPTIYHLRKKLVDSTDKADLRLIYLALAHMIKFRGHFLIEGDLNPDNSDVDKLFIQLVQTYNQLFEENPINASGVDAKAILSARLSKSRRLENLIAQLPGEKKNGLFGNLIALSLGLTPNFKSNFDLAEDAKLQLSKDTYDDDLDNLLAQIGDQYADLFLAAKNLSDAILLSDILRVNTEITKAPLSASMIKRYDEHHQDLTLLKALVRQQLPEKYKEIFFDQSKNGYAGYIDGGASQEEFYKFIKPILEKMDGTEELLVKLNREDLLRKQRTFDNGSIPHQIHLGELHAILRRQEDFYPFLKDNREKIEKILTFRIPYYVGPLARGNSRFAWMTRKSEETITPWNFEEVVDKGASAQSFIERMTNFDKNLPNEKVLPKHSLLYEYFTVYNELTKVKYVTEGMRKPAFLSGEQKKAIVDLLFKTNRKVTVKQLKEDYFKKIECFDSVEISGVEDRFNASLGTYHDLLKIIKDKDFLDNEENEDILEDIVLTLTLFEDREMIEERLKTYAHLFDDKVMKQLKRRRYTGWGRLSRKLINGIRDKQSGKTILDFLKSDGFANRNFMQLIHDDSLTFKEDIQKAQVSGQGDSLHEHIANLAGSPAIKKGILQTVKVVDELVKVMGRHKPENIVIEMARENQTTQKGQKNSRERMKRIEEGIKELGSQILKEHPVENTQLQNEKLYLYYLQNGRDMYVDQELDINRLSDYDVDHIVPQSFLKDDSIDNKVLTRSDKARGKSDNVPSEEVVKKMKNYWRQLLNAKLITQRKFDNLTKAERGGLSELDKAGFIKRQLVETRQITKHVAQILDSRMNTKYDENDKLIREVKVITLKSKLVSDFRKDFQFYKVREINNYHHAHDAYLNAVVGTALIKKYPKLESEFVYGDYKVYDVRKMIAKSEQEIGKATAKYFFYSNIMNFFKTEITLANGEIRKRPLIETNGETGEIVWDKGRDFATVRKVLSMPQVNIVKKTEVQTGGFSKESILPKRNSDKLIARKKDWDPKKYGGFDSPTVAYSVLVVAKVEKGKSKKLKSVKELLGITIMERSSFEKNPIDFLEAKGYKEVKKDLIIKLPKYSLFELENGRKRMLASAGELQKGNELALPSKYVNFLYLASHYEKLKGSPEDNEQKQLFVEQHKHYLDEIIEQISEFSKRVILADANLDKVLSAYNKHRDKPIREQAENIIHLFTLTNLGAPAAFKYFDTTIDRKRYTSTKEVLDATLIHQSITGLYETRIDLSQLGGDGGGGGEAAAKGGTLNIEDEYRLHETSKEPDVPLGSTWLSDFPQAWAETGGMGLAVRQAPLIIPLKATSTPVSIKQYPMSQEARLGIKPHIQRLLDQGILVPCQSPWNTPLLPVKKPGTNDYRPVQDLREVNKRVEDIHPTVPNPYNLLSGLPPSHQWYTVLDLKDAFFCLRLHPTSQPLFAFEWRDPEMGISGQLTWTRLPQGFKNSPTLFNEALHRDLADFRIQHPDLILLQYVDDLLLAATSEQDCQRGTRALLQTLGNLGYRASAKKAQICQKQVKYLGYLLKEGQRWLTEARKETVMGQPTPKTPRQLREFLGTAGFCRLWIPGFAEMAAPLYPLTKPGTLFNWGPDQQKAYQEIKQALLTAPALGLPDLTKPFELFVDEKQGYAKGVLTQKLGPWRRPVAYLSKKLDPVAAGWPPCLRMVAAIAVLTKDAGKLTMGQPLVILAPHAVEALVKQPPDRWLSNARMTHYQAMLLDTDRVQFGPVVALNPATLLPLPEKEAPHDCLEILAETHGTRPDLTDQPIPDADYTWYTDGSSFLQEGQRRAGAAVTTETEVIWARALPAGTSAQRAELIALTQALKMAEGKKLNVYTDSRYAFATAHVHGEIYRRRGWLTSEGREIKNKNEILALLKALFLPKRLSIIHCPGHQKGNSAEARGNRMADQAAREAAMKAVLETSTLLAGKRTADGSEFEKRTADGSEFESPKKKAKVE

SEQ ID NO: 6696 - protein, 2091 aa, synthetic construct
MPAAKRVKLDGGDKKYSIGLDIGTNSVGWAVITDEYKVPSKKFKVLGNTDRHSIKKNLIGALLFDSGETAEATRLKRTARRRYTRRKNRICYLQEIFSNEMAKVDDSFFHRLEESFLVEEDKKHERHPIFGNIVDEVAYHEKYPTIYHLRKKLVDSTDKADLRLIYLALAHMIKFRGHFLIEGDLNPDNSDVDKLFIQLVQTYNQLFEENPINASGVDAKAILSARLSKSRRLENLIAQLPGEKKNGLFGNLIALSLGLTPNFKSNFDLAEDAKLQLSKDTYDDDLDNLLAQIGDQYADLFLAAKNLSDAILLSDILRVNTEITKAPLSASMIKRYDEHHQDLTLLKALVRQQLPEKYKEIFFDQSKNGYAGYIDGGASQEEFYKFIKPILEKMDGTEELLVKLNREDLLRKQRTFDNGSIPHQIHLGELHAILRRQEDFYPFLKDNREKIEKILTFRIPYYVGPLARGNSRFAWMTRKSEETITPWNFEEVVDKGASAQSFIERMTNFDKNLPNEKVLPKHSLLYEYFTVYNELTKVKYVTEGMRKPAFLSGEQKKAIVDLLFKTNRKVTVKQLKEDYFKKIECFDSVEISGVEDRFNASLGTYHDLLKIIKDKDFLDNEENEDILEDIVLTLTLFEDREMIEERLKTYAHLFDDKVMKQLKRRRYTGWGRLSRKLINGIRDKQSGKTILDFLKSDGFANRNFMQLIHDDSLTFKEDIQKAQVSGQGDSLHEHIANLAGSPAIKKGILQTVKVVDELVKVMGRHKPENIVIEMARENQTTQKGQKNSRERMKRIEEGIKELGSQILKEHPVENTQLQNEKLYLYYLQNGRDMYVDQELDINRLSDYDVDHIVPQSFLKDDSIDNKVLTRSDKARGKSDNVPSEEVVKKMKNYWRQLLNAKLITQRKFDNLTKAERGGLSELDKAGFIKRQLVETRQITKHVAQILDSRMNTKYDENDKLIREVKVITLKSKLVSDFRKDFQFYKVREINNYHHAHDAYLNAVVGTALIKKYPKLESEFVYGDYKVYDVRKMIAKSEQEIGKATAKYFFYSNIMNFFKTEITLANGEIRKRPLIETNGETGEIVWDKGRDFATVRKVLSMPQVNIVKKTEVQTGGFSKESILPKRNSDKLIARKKDWDPKKYGGFDSPTVAYSVLVVAKVEKGKSKKLKSVKELLGITIMERSSFEKNPIDFLEAKGYKEVKKDLIIKLPKYSLFELENGRKRMLASAGELQKGNELALPSKYVNFLYLASHYEKLKGSPEDNEQKQLFVEQHKHYLDEIIEQISEFSKRVILADANLDKVLSAYNKHRDKPIREQAENIIHLFTLTNLGAPAAFKYFDTTIDRKRYTSTKEVLDATLIHQSITGLYETRIDLSQLGGDGGEAAAKGGGGGVLNLEEEYRLHEKPVPSSIDPSWLQLFPTVWAERAGMGLANQVPPVVVELRSGASPVAVRQYPMSKEAREGIRPHIQKFLDLGVLVPCRSPWNTPLLPVKKPGTNDYRPVQDLREINKRVQDIHPTVPNPYNLLSSLPPSYTWYSVLDLKDAFFCLRLHPNSQPLFAFEWKDPEKGNTGQLTWTRLPQGFKNSPTLFNEALHRDLAPFRALNPQVVLLQYVDDLLVAAPTYEDCKKGTQKLLQELSKLGYRVSAKKAQLCQREVTYLGYLLKEGKRWLTPARKATVMKIPVPTTPRQVREFLGTAGFCRLWIPGFASLAAPLYPLTKPSIPFIWTEEHQQAFDHIKKALLSAPALALPDLTKPFTLYIDERAGVARGVLTQTLGPWRRPVAYLSKKLDPVASGWPTCLKAVAAVALLLKDADKLTLGQNVTVIASHSLESIVRQPPDRWMTNARMTHYQSLLLNERVSFAPPAVLNPATLLPVESEATPVHRCSEILAEETGTRRDLEDQPLPGVPTWYTDGSSFITEGKRRAGAPIVDGKRTVWASSLPEGTSAQKAELVALTQALRLAEGKNINIYTDSRYAFATAHIHGAIYKQRGWLTSAGKDIKNKEEILALLEAIHLPRRVAIIHCPGHQRGSNPVATGNRRADEAAKQAALSTRVLAGTTKPAGKRTADGSEFEKRTADGSEFESPKKKAKVE

SEQ ID NO: 6697 - protein, 2091 aa, synthetic construct
MPAAKRVKLDGGDKKYSIGLDIGTNSVGWAVITDEYKVPSKKFKVLGNTDRHSIKKNLIGALLFDSGETAEATRLKRTARRRYTRRKNRICYLQEIFSNEMAKVDDSFFHRLEESFLVEEDKKHERHPIFGNIVDEVAYHEKYPTIYHLRKKLVDSTDKADLRLIYLALAHMIKFRGHFLIEGDLNPDNSDVDKLFIQLVQTYNQLFEENPINASGVDAKAILSARLSKSRRLENLIAQLPGEKKNGLFGNLIALSLGLTPNFKSNFDLAEDAKLQLSKDTYDDDLDNLLAQIGDQYADLFLAAKNLSDAILLSDILRVNTEITKAPLSASMIKRYDEHHQDLTLLKALVRQQLPEKYKEIFFDQSKNGYAGYIDGGASQEEFYKFIKPILEKMDGTEELLVKLNREDLLRKQRTFDNGSIPHQIHLGELHAILRRQEDFYPFLKDNREKIEKILTFRIPYYVGPLARGNSRFAWMTRKSEETITPWNFEEVVDKGASAQSFIERMTNFDKNLPNEKVLPKHSLLYEYFTVYNELTKVKYVTEGMRKPAFLSGEQKKAIVDLLFKTNRKVTVKQLKEDYFKKIECFDSVEISGVEDRFNASLGTYHDLLKIIKDKDFLDNEENEDILEDIVLTLTLFEDREMIEERLKTYAHLFDDKVMKQLKRRRYTGWGRLSRKLINGIRDKQSGKTILDFLKSDGFANRNFMQLIHDDSLTFKEDIQKAQVSGQGDSLHEHIANLAGSPAIKKGILQTVKVVDELVKVMGRHKPENIVIEMARENQTTQKGQKNSRERMKRIEEGIKELGSQILKEHPVENTQLQNEKLYLYYLQNGRDMYVDQELDINRLSDYDVDHIVPQSFLKDDSIDNKVLTRSDKARGKSDNVPSEEVVKKMKNYWRQLLNAKLITQRKFDNLTKAERGGLSELDKAGFIKRQLVETRQITKHVAQILDSRMNTKYDENDKLIREVKVITLKSKLVSDFRKDFQFYKVREINNYHHAHDAYLNAVVGTALIKKYPKLESEFVYGDYKVYDVRKMIAKSEQEIGKATAKYFFYSNIMNFFKTEITLANGEIRKRPLIETNGETGEIVWDKGRDFATVRKVLSMPQVNIVKKTEVQTGGFSKESILPKRNSDKLIARKKDWDPKKYGGFDSPTVAYSVLVVAKVEKGKSKKLKSVKELLGITIMERSSFEKNPIDFLEAKGYKEVKKDLIIKLPKYSLFELENGRKRMLASAGELQKGNELALPSKYVNFLYLASHYEKLKGSPEDNEQKQLFVEQHKHYLDEIIEQISEFSKRVILADANLDKVLSAYNKHRDKPIREQAENIIHLFTLTNLGAPAAFKYFDTTIDRKRYTSTKEVLDATLIHQSITGLYETRIDLSQLGGDGGEAAAKGGGGGVLNLEEEYRLHEKPVPSSIDPSWLQLFPTVWAERAGMGLANQVPPVVVELRSGASPVAVRQYPMSKEAREGIRPHIQKFLDLGVLVPCRSPWNTPLLPVKKPGTNDYRPVQDLREINKRVQDIHPTVPNPYNLLSSLPPSYTWYSVLDLKDAFFCLRLHPNSQPLFAFEWKDPEKGNTGQLTWTRLPQGFKNSPTLFNEALHRDLAPFRALNPQVVLLQYVDDLLVAAPTYEDCKKGTQKLLQELSKLGYRVSAKKAQLCQREVTYLGYLLKEGKRWLTPARKATVMKIPVPTTPRQVREFLGKAGFCRLFIPGFASLAAPLYPLTKPSIPFIWTEEHQQAFDHIKKALLSAPALALPDLTKPFTLYIDERAGVARGVLTQTLGPWRRPVAYLSKKLDPVASGWPTCLKAVAAVALLLKDADKLTLGQNVTVIASHSLESIVRQPPDRWMTNARMTHYQSLLLNERVSFAPPAVLNPATLLPVESEATPVHRCSEILAEETGTRRDLEDQPLPGVPTWYTDGSSFITEGKRRAGAPIVDGKRTVWASSLPEGTSAQKAELVALTQALRLAEGKNINIYTDSRYAFATAHIHGAIYKQRGWLTSAGKDIKNKEEILALLEAIHLPRRVAIIHCPGHQRGSNPVATGNRRADEAAKQAALSTRVLAGTTKPAGKRTADGSEFEKRTADGSEFESPKKKAKVE

SEQ ID NO: 6698 - protein, 2124 aa, synthetic construct
MPAAKRVKLDGGDKKYSIGLDIGTNSVGWAVITDEYKVPSKKFKVLGNTDRHSIKKNLIGALLFDSGETAEATRLKRTARRRYTRRKNRICYLQEIFSNEMAKVDDSFFHRLEESFLVEEDKKHERHPIFGNIVDEVAYHEKYPTIYHLRKKLVDSTDKADLRLIYLALAHMIKFRGHFLIEGDLNPDNSDVDKLFIQLVQTYNQLFEENPINASGVDAKAILSARLSKSRRLENLIAQLPGEKKNGLFGNLIALSLGLTPNFKSNFDLAEDAKLQLSKDTYDDDLDNLLAQIGDQYADLFLAAKNLSDAILLSDILRVNTEITKAPLSASMIKRYDEHHQDLTLLKALVRQQLPEKYKEIFFDQSKNGYAGYIDGGASQEEFYKFIKPILEKMDGTEELLVKLNREDLLRKQRTFDNGSIPHQIHLGELHAILRRQEDFYPFLKDNREKIEKILTFRIPYYVGPLARGNSRFAWMTRKSEETITPWNFEEVVDKGASAQSFIERMTNFDKNLPNEKVLPKHSLLYEYFTVYNELTKVKYVTEGMRKPAFLSGEQKKAIVDLLFKTNRKVTVKQLKEDYFKKIECFDSVEISGVEDRFNASLGTYHDLLKIIKDKDFLDNEENEDILEDIVLTLTLFEDREMIEERLKTYAHLFDDKVMKQLKRRRYTGWGRLSRKLINGIRDKQSGKTILDFLKSDGFANRNFMQLIHDDSLTFKEDIQKAQVSGQGDSLHEHIANLAGSPAIKKGILQTVKVVDELVKVMGRHKPENIVIEMARENQTTQKGQKNSRERMKRIEEGIKELGSQILKEHPVENTQLQNEKLYLYYLQNGRDMYVDQELDINRLSDYDVDHIVPQSFLKDDSIDNKVLTRSDKARGKSDNVPSEEVVKKMKNYWRQLLNAKLITQRKFDNLTKAERGGLSELDKAGFIKRQLVETRQITKHVAQILDSRMNTKYDENDKLIREVKVITLKSKLVSDFRKDFQFYKVREINNYHHAHDAYLNAVVGTALIKKYPKLESEFVYGDYKVYDVRKMIAKSEQEIGKATAKYFFYSNIMNFFKTEITLANGEIRKRPLIETNGETGEIVWDKGRDFATVRKVLSMPQVNIVKKTEVQTGGFSKESILPKRNSDKLIARKKDWDPKKYGGFDSPTVAYSVLVVAKVEKGKSKKLKSVKELLGITIMERSSFEKNPIDFLEAKGYKEVKKDLIIKLPKYSLFELENGRKRMLASAGELQKGNELALPSKYVNFLYLASHYEKLKGSPEDNEQKQLFVEQHKHYLDEIIEQISEFSKRVILADANLDKVLSAYNKHRDKPIREQAENIIHLFTLTNLGAPAAFKYFDTTIDRKRYTSTKEVLDATLIHQSITGLYETRIDLSQLGGDGGEAAAKGGGGGLLGRDLLTKLKAQIQFSTEGPQVTWEDRPAMCLVLNLEEEYRLHEKPVPPSIDPSWLQLFPMVWAEKAGMGLANQVPPVVVELKSDASPVAVRQYPMSKEAREGIRPHIQRFLDLGILVPCQSPWNTPLLPVKKPGTNDYRPVQDLREVNKRVQDIHPTVPNPYNLLSSLPPSHTWYSVLDLKDAFFCLKLHPNSQPLFAFEWRDPEKGNTGQLTWTRLPQGFKNSPTLFNEALHRDLASFRALNPQVVMLQYVDDLLVAAPTYRDCKEGTRRLLQELSKLGYRVSAKKAQLCREEVTYLGYLLKGGKRWLTPARKATVMKIPTPTTPRQVREFLGTAGFCRLWIPGFASLAAPLYPLTRPKVPFTWTEAHQEAFGRIKEALLSAPALALPDLTKPFALYVDEKEGVARGVLTQTLGPWRRPVAYLSKKLDPVASGWPTCLKAIAAVALLLKDADKLTLGQNVLVIAPHNLESIVRQPPDRWMTNARMTHYQSLLLNERVSFAPPAILNPATLLPVESDDTPIHICSEILAEETGTRPDLRDQPLPGVPAWYTDGSSFIMDGRRQAGAAIVDNKRTVWASNLPEGTSAQKAELIALTQALRLAEGKSINIYTDSRYAFATAHVHGAIYKQRGWLTSAGKDIKNKEEILALLEAIHLPKRVAIIHCPGHQRGTDPVATGNRKADEAAKQAAQSTRILTETTKNAGKRTADGSEFEKRTADGSEFESPKKKAKVE

SEQ ID NO: 6699 - protein, 2093 aa, synthetic construct
MPAAKRVKLDGGDKKYSIGLDIGTNSVGWAVITDEYKVPSKKFKVLGNTDRHSIKKNLIGALLFDSGETAEATRLKRTARRRYTRRKNRICYLQEIFSNEMAKVDDSFFHRLEESFLVEEDKKHERHPIFGNIVDEVAYHEKYPTIYHLRKKLVDSTDKADLRLIYLALAHMIKFRGHFLIEGDLNPDNSDVDKLFIQLVQTYNQLFEENPINASGVDAKAILSARLSKSRRLENLIAQLPGEKKNGLFGNLIALSLGLTPNFKSNFDLAEDAKLQLSKDTYDDDLDNLLAQIGDQYADLFLAAKNLSDAILLSDILRVNTEITKAPLSASMIKRYDEHHQDLTLLKALVRQQLPEKYKEIFFDQSKNGYAGYIDGGASQEEFYKFIKPILEKMDGTEELLVKLNREDLLRKQRTFDNGSIPHQIHLGELHAILRRQEDFYPFLKDNREKIEKILTFRIPYYVGPLARGNSRFAWMTRKSEETITPWNFEEVVDKGASAQSFIERMTNFDKNLPNEKVLPKHSLLYEYFTVYNELTKVKYVTEGMRKPAFLSGEQKKAIVDLLFKTNRKVTVKQLKEDYFKKIECFDSVEISGVEDRFNASLGTYHDLLKIIKDKDFLDNEENEDILEDIVLTLTLFEDREMIEERLKTYAHLFDDKVMKQLKRRRYTGWGRLSRKLINGIRDKQSGKTILDFLKSDGFANRNFMQLIHDDSLTFKEDIQKAQVSGQGDSLHEHIANLAGSPAIKKGILQTVKVVDELVKVMGRHKPENIVIEMARENQTTQKGQKNSRERMKRIEEGIKELGSQILKEHPVENTQLQNEKLYLYYLQNGRDMYVDQELDINRLSDYDVDHIVPQSFLKDDSIDNKVLTRSDKARGKSDNVPSEEVVKKMKNYWRQLLNAKLITQRKFDNLTKAERGGLSELDKAGFIKRQLVETRQITKHVAQILDSRMNTKYDENDKLIREVKVITLKSKLVSDFRKDFQFYKVREINNYHHAHDAYLNAVVGTALIKKYPKLESEFVYGDYKVYDVRKMIAKSEQEIGKATAKYFFYSNIMNFFKTEITLANGEIRKRPLIETNGETGEIVWDKGRDFATVRKVLSMPQVNIVKKTEVQTGGFSKESILPKRNSDKLIARKKDWDPKKYGGFDSPTVAYSVLVVAKVEKGKSKKLKSVKELLGITIMERSSFEKNPIDFLEAKGYKEVKKDLIIKLPKYSLFELENGRKRMLASAGELQKGNELALPSKYVNFLYLASHYEKLKGSPEDNEQKQLFVEQHKHYLDEIIEQISEFSKRVILADANLDKVLSAYNKHRDKPIREQAENIIHLFTLTNLGAPAAFKYFDTTIDRKRYTSTKEVLDATLIHQSITGLYETRIDLSQLGGDGGEAAAKGGGGGTLNIEDEHRLHETSKEPDVSLGSTWLSDFPQAWAETGGMGLAVRQAPLIIPLKATSTPVSIKQYPMSQEARLGIKPHIQRLLDQGILVPCQSPWNTPLLPVKKPGTNDYRPVQDLREVNKRVEDIHPTVPNPYNLLSGLPPSHQWYTVLDLKDAFFCLRLHPTSQPLFAFEWRDPEMGISGQLTWTRLPQGFKNSPTLFDEALHRDLADFRIQHPDLILLQYVDDLLLAATSELDCQQGTRALLQTLGNLGYRASAKKAQICQKQVKYLGYLLKEGQRWLTEARKETVMGQPTPKTPRQLREFLGTAGFCRLWIPGFAEMAAPLYPLTKTGTLFNWGPDQQKAYQEIKQALLTAPALGLPDLTKPFELFVDEKQGYAKGVLTQKLGPWRRPVAYLSKKLDPVAAGWPPCLRMVAAIAVLTKDAGKLTMGQPLVILAPHAVEALVKQPPDRWLSNARMTHYQALLLDTDRVQFGPVVALNPATLLPLPEEGLQHNCLDILAEAHGTRPDLTDQPLPDADHTWYTDGSSLLQEGQRKAGAAVTTETEVIWAKALPAGTSAQRAELIALTQALKMAEGKKLNVYTDSRYAFATAHIHGEIYRRRGLLTSEGKEIKNKDEILALLKALFLPKRLSIIHCPGHQKGHSAEARGNRMADQAARKAAITETPDTSTLLAGKRTADGSEFEKRTADGSEFESPKKKAKVE

SEQ ID NO: 6700 - protein, 2084 aa, synthetic construct
MPAAKRVKLDGGDKKYSIGLDIGTNSVGWAVITDEYKVPSKKFKVLGNTDRHSIKKNLIGALLFDSGETAEATRLKRTARRRYTRRKNRICYLQEIFSNEMAKVDDSFFHRLEESFLVEEDKKHERHPIFGNIVDEVAYHEKYPTIYHLRKKLVDSTDKADLRLIYLALAHMIKFRGHFLIEGDLNPDNSDVDKLFIQLVQTYNQLFEENPINASGVDAKAILSARLSKSRRLENLIAQLPGEKKNGLFGNLIALSLGLTPNFKSNFDLAEDAKLQLSKDTYDDDLDNLLAQIGDQYADLFLAAKNLSDAILLSDILRVNTEITKAPLSASMIKRYDEHHQDLTLLKALVRQQLPEKYKEIFFDQSKNGYAGYIDGGASQEEFYKFIKPILEKMDGTEELLVKLNREDLLRKQRTFDNGSIPHQIHLGELHAILRRQEDFYPFLKDNREKIEKILTFRIPYYVGPLARGNSRFAWMTRKSEETITPWNFEEVVDKGASAQSFIERMTNFDKNLPNEKVLPKHSLLYEYFTVYNELTKVKYVTEGMRKPAFLSGEQKKAIVDLLFKTNRKVTVKQLKEDYFKKIECFDSVEISGVEDRFNASLGTYHDLLKIIKDKDFLDNEENEDILEDIVLTLTLFEDREMIEERLKTYAHLFDDKVMKQLKRRRYTGWGRLSRKLINGIRDKQSGKTILDFLKSDGFANRNFMQLIHDDSLTFKEDIQKAQVSGQGDSLHEHIANLAGSPAIKKGILQTVKVVDELVKVMGRHKPENIVIEMARENQTTQKGQKNSRERMKRIEEGIKELGSQILKEHPVENTQLQNEKLYLYYLQNGRDMYVDQELDINRLSDYDVDHIVPQSFLKDDSIDNKVLTRSDKARGKSDNVPSEEVVKKMKNYWRQLLNAKLITQRKFDNLTKAERGGLSELDKAGFIKRQLVETRQITKHVAQILDSRMNTKYDENDKLIREVKVITLKSKLVSDFRKDFQFYKVREINNYHHAHDAYLNAVVGTALIKKYPKLESEFVYGDYKVYDVRKMIAKSEQEIGKATAKYFFYSNIMNFFKTEITLANGEIRKRPLIETNGETGEIVWDKGRDFATVRKVLSMPQVNIVKKTEVQTGGFSKESILPKRNSDKLIARKKDWDPKKYGGFDSPTVAYSVLVVAKVEKGKSKKLKSVKELLGITIMERSSFEKNPIDFLEAKGYKEVKKDLIIKLPKYSLFELENGRKRMLASAGELQKGNELALPSKYVNFLYLASHYEKLKGSPEDNEQKQLFVEQHKHYLDEIIEQISEFSKRVILADANLDKVLSAYNKHRDKPIREQAENIIHLFTLTNLGAPAAFKYFDTTIDRKRYTSTKEVLDATLIHQSITGLYETRIDLSQLGGDGGEAAAKGGGGGVPWLMKKPLQLTVLVPLHEYQERLLQQTALPKEQKELLQKLFLKYDALWQHWENQVGHRRIKPHNIATGTLAPRPQKQYPINPKAKPSIQIVIDDLLKQGVLIQQNSTMNTPVYPVPKPDGKWRMVLDYREVNKTIPLIAAQNQHSAGILSSIYRGKYKTTLDLTNGFWAHPITPESYWLTAFTWQGKQYCWTRLPQGFLNSPALFTADVVDLLKEIPNVQAYVDDIYISHDDPQEHLEQLEKIFSILLNAGYVVSLKKSEIAQREVEFLGFNITKEGRGLTDTFKQKLLNITPPKDLKQLQSILGLLNFARNFIPNYSELVKPLYTIVANANGKFISWTEDNSNQLQHIISVLNQADNLEERNPETRLIIKVNSSPSAGYIRYYNEGSKRPIMYVNYIFSKAEAKFTQTEKLLTTMHKGLIKAMDLAMGQEILVYSPIVSMTKIQRTPLPERKALPVRWITWMTYLEDPRIQFHYDKSLPELQQIPNVTEDVIAKTKHPSEFAMVFYTDGSAIKHPDVNKSHSAGMGIAQVQFIPEYKIVHQWSIPLGDHTAQLAEIAAVEFACKKALKISGPVLIVTDSFYVAESANKELPYWKSNGFLNNKKKPLRHVSKWKSIAECLQLKPDIIIMHEKGHQQPMTTLHTEGNNLADKLATQGSYVVHAGKRTADGSEFEKRTADGSEFESPKKKAKVE

SEQ ID NO: 6701 - protein, 2173 aa, synthetic construct
MPAAKRVKLDGGDKKYSIGLDIGTNSVGWAVITDEYKVPSKKFKVLGNTDRHSIKKNLIGALLFDSGETAEATRLKRTARRRYTRRKNRICYLQEIFSNEMAKVDDSFFHRLEESFLVEEDKKHERHPIFGNIVDEVAYHEKYPTIYHLRKKLVDSTDKADLRLIYLALAHMIKFRGHFLIEGDLNPDNSDVDKLFIQLVQTYNQLFEENPINASGVDAKAILSARLSKSRRLENLIAQLPGEKKNGLFGNLIALSLGLTPNFKSNFDLAEDAKLQLSKDTYDDDLDNLLAQIGDQYADLFLAAKNLSDAILLSDILRVNTEITKAPLSASMIKRYDEHHQDLTLLKALVRQQLPEKYKEIFFDQSKNGYAGYIDGGASQEEFYKFIKPILEKMDGTEELLVKLNREDLLRKQRTFDNGSIPHQIHLGELHAILRRQEDFYPFLKDNREKIEKILTFRIPYYVGPLARGNSRFAWMTRKSEETITPWNFEEVVDKGASAQSFIERMTNFDKNLPNEKVLPKHSLLYEYFTVYNELTKVKYVTEGMRKPAFLSGEQKKAIVDLLFKTNRKVTVKQLKEDYFKKIECFDSVEISGVEDRFNASLGTYHDLLKIIKDKDFLDNEENEDILEDIVLTLTLFEDREMIEERLKTYAHLFDDKVMKQLKRRRYTGWGRLSRKLINGIRDKQSGKTILDFLKSDGFANRNFMQLIHDDSLTFKEDIQKAQVSGQGDSLHEHIANLAGSPAIKKGILQTVKVVDELVKVMGRHKPENIVIEMARENQTTQKGQKNSRERMKRIEEGIKELGSQILKEHPVENTQLQNEKLYLYYLQNGRDMYVDQELDINRLSDYDVDHIVPQSFLKDDSIDNKVLTRSDKARGKSDNVPSEEVVKKMKNYWRQLLNAKLITQRKFDNLTKAERGGLSELDKAGFIKRQLVETRQITKHVAQILDSRMNTKYDENDKLIREVKVITLKSKLVSDFRKDFQFYKVREINNYHHAHDAYLNAVVGTALIKKYPKLESEFVYGDYKVYDVRKMIAKSEQEIGKATAKYFFYSNIMNFFKTEITLANGEIRKRPLIETNGETGEIVWDKGRDFATVRKVLSMPQVNIVKKTEVQTGGFSKESILPKRNSDKLIARKKDWDPKKYGGFDSPTVAYSVLVVAKVEKGKSKKLKSVKELLGITIMERSSFEKNPIDFLEAKGYKEVKKDLIIKLPKYSLFELENGRKRMLASAGELQKGNELALPSKYVNFLYLASHYEKLKGSPEDNEQKQLFVEQHKHYLDEIIEQISEFSKRVILADANLDKVLSAYNKHRDKPIREQAENIIHLFTLTNLGAPAAFKYFDTTIDRKRYTSTKEVLDATLIHQSITGLYETRIDLSQLGGDGGEAAAKGGGGGMDPLQLLQPLEAEIKGTKLKAHWNSGATITCVPQAFLEEEVPIKNIWIKTIHGEKEQPVYYLTFKIQGRKVEAEVISSPYDYILVSPSDIPWLMKKPLQLTTLVPLQEYEERLLKQTMLTGSYKEKLQSLFLKYDALWQHWENQVGHRRIKPHHIATGTVNPRPQKQYPINPKAKASIQTVINDLLKQGVLIQQNSIMNTPVYPVPKPDGKWRMVLDYREVNKTIPLIAAQNQHSAGILSSIFRGKYKTTLDLSNGFWAHSITPESYWLTAFTWLGQQYCWTRLPQGFLNSPALFNADVVDLLKEVPNVQVYVDDIYISHDDPREHLEQLEKVFSLLLNAGYVVSLKKSEIAQHEVEFLGFNITKEGRGLTETFKQKLLNITPPRDLKQLQSILGKLNFARNFIPNFSELVKPLYNIIATAPGKYITWTTDNSQQLQNIISMLNSAENLEERNPEVRLIMKVNTSPSAGYIRFYNEFAKRPIMYLNYVYTKAEVKFTNTEKLLTTIHKGLIKALDLGMGQEILVYSPIVSMTKIQKTPLPERKALPIRWITWMSYLEDPRIQFHYDKTLPELQQVPTVTDDIIAKIKHPSEFSMVFYTDGSAIKHPNVNKSHNAGMGIAQVQFKPEFTVINTWSIPLGDHTAQLAEVAAVEFACKKALKIDGPVLIVTDSFYVAESVNKELPYWQSNGFFNNKKKPLKHVSKWKSIADCIQLKPDIIIIHEKGHQPTASTFHTEGNNLADKLATQGSYVVNAGKRTADGSEFEKRTADGSEFESPKKKAKVE

SEQ ID NO: 6702 - protein, 2091 aa, synthetic construct
MPAAKRVKLDGGDKKYSIGLDIGTNSVGWAVITDEYKVPSKKFKVLGNTDRHSIKKNLIGALLFDSGETAEATRLKRTARRRYTRRKNRICYLQEIFSNEMAKVDDSFFHRLEESFLVEEDKKHERHPIFGNIVDEVAYHEKYPTIYHLRKKLVDSTDKADLRLIYLALAHMIKFRGHFLIEGDLNPDNSDVDKLFIQLVQTYNQLFEENPINASGVDAKAILSARLSKSRRLENLIAQLPGEKKNGLFGNLIALSLGLTPNFKSNFDLAEDAKLQLSKDTYDDDLDNLLAQIGDQYADLFLAAKNLSDAILLSDILRVNTEITKAPLSASMIKRYDEHHQDLTLLKALVRQQLPEKYKEIFFDQSKNGYAGYIDGGASQEEFYKFIKPILEKMDGTEELLVKLNREDLLRKQRTFDNGSIPHQIHLGELHAILRRQEDFYPFLKDNREKIEKILTFRIPYYVGPLARGNSRFAWMTRKSEETITPWNFEEVVDKGASAQSFIERMTNFDKNLPNEKVLPKHSLLYEYFTVYNELTKVKYVTEGMRKPAFLSGEQKKAIVDLLFKTNRKVTVKQLKEDYFKKIECFDSVEISGVEDRFNASLGTYHDLLKIIKDKDFLDNEENEDILEDIVLTLTLFEDREMIEERLKTYAHLFDDKVMKQLKRRRYTGWGRLSRKLINGIRDKQSGKTILDFLKSDGFANRNFMQLIHDDSLTFKEDIQKAQVSGQGDSLHEHIANLAGSPAIKKGILQTVKVVDELVKVMGRHKPENIVIEMARENQTTQKGQKNSRERMKRIEEGIKELGSQILKEHPVENTQLQNEKLYLYYLQNGRDMYVDQELDINRLSDYDVDHIVPQSFLKDDSIDNKVLTRSDKARGKSDNVPSEEVVKKMKNYWRQLLNAKLITQRKFDNLTKAERGGLSELDKAGFIKRQLVETRQITKHVAQILDSRMNTKYDENDKLIREVKVITLKSKLVSDFRKDFQFYKVREINNYHHAHDAYLNAVVGTALIKKYPKLESEFVYGDYKVYDVRKMIAKSEQEIGKATAKYFFYSNIMNFFKTEITLANGEIRKRPLIETNGETGEIVWDKGRDFATVRKVLSMPQVNIVKKTEVQTGGFSKESILPKRNSDKLIARKKDWDPKKYGGFDSPTVAYSVLVVAKVEKGKSKKLKSVKELLGITIMERSSFEKNPIDFLEAKGYKEVKKDLIIKLPKYSLFELENGRKRMLASAGELQKGNELALPSKYVNFLYLASHYEKLKGSPEDNEQKQLFVEQHKHYLDEIIEQISEFSKRVILADANLDKVLSAYNKHRDKPIREQAENIIHLFTLTNLGAPAAFKYFDTTIDRKRYTSTKEVLDATLIHQSITGLYETRIDLSQLGGDGGEAAAKGGGGGVLNLEEEYRLHEKPVPSSIDPSWLQLFPTVWAERAGMGLANQVPPVVVELRSGASPVAVRQYPMSKEAREGIRPHIQRFLDLGVLVPCQSPWNTPLLPVKKPGTNDYRPVQDLREINKRVQDIHPTVPNPYNLLSSLPPSHTWYSVLDLKDAFFCLKLHPNSQPLFAFEWRDPEKGNTGQLTWTRLPQGFKNSPTLFDEALHRDLAPFRALNPQVVLLQYVDDLLVAAPTYRDCKEGTQKLLQELSKLGYRVSAKKAQLCQKEVTYLGYLLKEGKRWLTPARKATVMKIPPPTTPRQVREFLGTAGFCRLWIPGFASLAAPLYPLTKESIPFIWTEEHQKAFDRIKEALLSAPALALPDLTKPFTLYVDERAGVARGVLTQTLGPWRRPVAYLSKKLDPVASGWPTCLKAVAAVALLLKDADKLTLGQNVTVIASHSLESIVRQPPDRWMTNARMTHYQSLLLNERVSFAPPAVLNPATLLPVESEATPVHRCSEILAEETGTRRDLKDQPLPGVPAWYTDGSSFIAEGKRRAGAAIVDGKRTVWASSLPEGTSAQKAELVALTQALRLAEGKDINIYTDSRYAFATAHIHGAIYKQRGLLTSAGKDIKNKEEILALLEAIHLPKRVAIIHCPGHQKGNDPVATGNRRADEAAKQAALSTRVLAETTKPAGKRTADGSEFEKRTADGSEFESPKKKAKVE

SEQ ID NO: 6703 - protein, 2093 aa, synthetic construct
MPAAKRVKLDGGDKKYSIGLDIGTNSVGWAVITDEYKVPSKKFKVLGNTDRHSIKKNLIGALLFDSGETAEATRLKRTARRRYTRRKNRICYLQEIFSNEMAKVDDSFFHRLEESFLVEEDKKHERHPIFGNIVDEVAYHEKYPTIYHLRKKLVDSTDKADLRLIYLALAHMIKFRGHFLIEGDLNPDNSDVDKLFIQLVQTYNQLFEENPINASGVDAKAILSARLSKSRRLENLIAQLPGEKKNGLFGNLIALSLGLTPNFKSNFDLAEDAKLQLSKDTYDDDLDNLLAQIGDQYADLFLAAKNLSDAILLSDILRVNTEITKAPLSASMIKRYDEHHQDLTLLKALVRQQLPEKYKEIFFDQSKNGYAGYIDGGASQEEFYKFIKPILEKMDGTEELLVKLNREDLLRKQRTFDNGSIPHQIHLGELHAILRRQEDFYPFLKDNREKIEKILTFRIPYYVGPLARGNSRFAWMTRKSEETITPWNFEEVVDKGASAQSFIERMTNFDKNLPNEKVLPKHSLLYEYFTVYNELTKVKYVTEGMRKPAFLSGEQKKAIVDLLFKTNRKVTVKQLKEDYFKKIECFDSVEISGVEDRFNASLGTYHDLLKIIKDKDFLDNEENEDILEDIVLTLTLFEDREMIEERLKTYAHLFDDKVMKQLKRRRYTGWGRLSRKLINGIRDKQSGKTILDFLKSDGFANRNFMQLIHDDSLTFKEDIQKAQVSGQGDSLHEHIANLAGSPAIKKGILQTVKVVDELVKVMGRHKPENIVIEMARENQTTQKGQKNSRERMKRIEEGIKELGSQILKEHPVENTQLQNEKLYLYYLQNGRDMYVDQELDINRLSDYDVDHIVPQSFLKDDSIDNKVLTRSDKARGKSDNVPSEEVVKKMKNYWRQLLNAKLITQRKFDNLTKAERGGLSELDKAGFIKRQLVETRQITKHVAQILDSRMNTKYDENDKLIREVKVITLKSKLVSDFRKDFQFYKVREINNYHHAHDAYLNAVVGTALIKKYPKLESEFVYGDYKVYDVRKMIAKSEQEIGKATAKYFFYSNIMNFFKTEITLANGEIRKRPLIETNGETGEIVWDKGRDFATVRKVLSMPQVNIVKKTEVQTGGFSKESILPKRNSDKLIARKKDWDPKKYGGFDSPTVAYSVLVVAKVEKGKSKKLKSVKELLGITIMERSSFEKNPIDFLEAKGYKEVKKDLIIKLPKYSLFELENGRKRMLASAGELQKGNELALPSKYVNFLYLASHYEKLKGSPEDNEQKQLFVEQHKHYLDEIIEQISEFSKRVILADANLDKVLSAYNKHRDKPIREQAENIIHLFTLTNLGAPAAFKYFDTTIDRKRYTSTKEVLDATLIHQSITGLYETRIDLSQLGGDGGGGGPAPGGTAPLEEEYRLFLEAPIQNVTLLEQWKREIPKVWAEINPPGLASTQAPIHVQLLSTALPVRVRQYPITLEAKRSLRETIRKFRAAGILRPVHSPWNTPLLPVRKSGTSEYRMVQDLREVNKRVETIHPTVPNPYTLLSLLPPDRIWYSVLDLKDAFFCIPLAPESQLIFAFEWADAEEGESGQLTWTRLPQGFKNSPTLFNEALNRDLQGFRLDHPSVSLLQYVDDLLIAADTQAACLSATRDLLMTLAELGYRVSGKKAQLCQEEVTYLGFKIHKGSRSLSNSRTQAILQIPVPKTKRQVREFLGTIGYCRLWIPGFAELAQPLYAATRPGNDPLVWGEKEEEAFQSLKLALTQPPALALPSLDKPFQLFVEETSGAAKGVLTQALGPWKRPVAYLSKRLDPVAAGWPRCLRAIAAAALLTREASKLTFGQDIEITSSHNLESLLRSPPDKWLTNARITQYQVLLLDPPRVRFKQTAALNPATLLPETDDTLPIHHCLDTLDSLTSTRPDLTDQPLAQAEATLFTDGSSYIRDGKRYAGAAVVTLDSVIWAEPLPIGTSAQKAELIALTKALEWSKDKSVNIYTDSRYAFATLHVHGMIYRERGWLTAGGKAIKNAPEILALLTAVWLPKRVAVMHCKGHQKDDAPTSTGNRRADEVAREVAIRPLSTQATISAGKRTADGSEFEKRTADGSEFESPKKKAKVE

SEQ ID NO: 6704 - protein, 2082 aa, synthetic construct
MPAAKRVKLDGGDKKYSIGLDIGTNSVGWAVITDEYKVPSKKFKVLGNTDRHSIKKNLIGALLFDSGETAEATRLKRTARRRYTRRKNRICYLQEIFSNEMAKVDDSFFHRLEESFLVEEDKKHERHPIFGNIVDEVAYHEKYPTIYHLRKKLVDSTDKADLRLIYLALAHMIKFRGHFLIEGDLNPDNSDVDKLFIQLVQTYNQLFEENPINASGVDAKAILSARLSKSRRLENLIAQLPGEKKNGLFGNLIALSLGLTPNFKSNFDLAEDAKLQLSKDTYDDDLDNLLAQIGDQYADLFLAAKNLSDAILLSDILRVNTEITKAPLSASMIKRYDEHHQDLTLLKALVRQQLPEKYKEIFFDQSKNGYAGYIDGGASQEEFYKFIKPILEKMDGTEELLVKLNREDLLRKQRTFDNGSIPHQIHLGELHAILRRQEDFYPFLKDNREKIEKILTFRIPYYVGPLARGNSRFAWMTRKSEETITPWNFEEVVDKGASAQSFIERMTNFDKNLPNEKVLPKHSLLYEYFTVYNELTKVKYVTEGMRKPAFLSGEQKKAIVDLLFKTNRKVTVKQLKEDYFKKIECFDSVEISGVEDRFNASLGTYHDLLKIIKDKDFLDNEENEDILEDIVLTLTLFEDREMIEERLKTYAHLFDDKVMKQLKRRRYTGWGRLSRKLINGIRDKQSGKTILDFLKSDGFANRNFMQLIHDDSLTFKEDIQKAQVSGQGDSLHEHIANLAGSPAIKKGILQTVKVVDELVKVMGRHKPENIVIEMARENQTTQKGQKNSRERMKRIEEGIKELGSQILKEHPVENTQLQNEKLYLYYLQNGRDMYVDQELDINRLSDYDVDHIVPQSFLKDDSIDNKVLTRSDKARGKSDNVPSEEVVKKMKNYWRQLLNAKLITQRKFDNLTKAERGGLSELDKAGFIKRQLVETRQITKHVAQILDSRMNTKYDENDKLIREVKVITLKSKLVSDFRKDFQFYKVREINNYHHAHDAYLNAVVGTALIKKYPKLESEFVYGDYKVYDVRKMIAKSEQEIGKATAKYFFYSNIMNFFKTEITLANGEIRKRPLIETNGETGEIVWDKGRDFATVRKVLSMPQVNIVKKTEVQTGGFSKESILPKRNSDKLIARKKDWDPKKYGGFDSPTVAYSVLVVAKVEKGKSKKLKSVKELLGITIMERSSFEKNPIDFLEAKGYKEVKKDLIIKLPKYSLFELENGRKRMLASAGELQKGNELALPSKYVNFLYLASHYEKLKGSPEDNEQKQLFVEQHKHYLDEIIEQISEFSKRVILADANLDKVLSAYNKHRDKPIREQAENIIHLFTLTNLGAPAAFKYFDTTIDRKRYTSTKEVLDATLIHQSITGLYETRIDLSQLGGDGGGGGPAPGGVPWILKKPLELTIKLDLEEQQGTLLNNSILSKKGKEELKQLFEKYSALWQSWENQVGHRRIRPHKIATGTVKPTPQKQYHINPKAKPDIQIVINDLLKQGVLIQKESTMNTPVYPVPKPNGRWRMVLDYRAVNKVTPLIAVQNQHSYGILGSLFKGRYKTTIDLSNGFWAHPIVPEDYWITAFTWQGKQYCWTVLPQGFLNSPGLFTGDVVDLLQGIPNVEVYVDDVYISHDSEKEHLEYLDILFNRLKEAGYIISLKKSNIANSIVDFLGFQITNEGRGLTDTFKEKLENITAPTTLKQLQSILGLLNFARNFIPDFTELIAPLYALIPKSTKNYVPWQIEHSTTLETLITKLNGAEYLQGRKGDKTLIMKVNASYTTGYIRYYNEGEKKPISYVSIVFSKTELKFTELEKLLTTVHKGLLKALDLSMGQNIHVYSPIVSMQNIQKTPQTAKKALASRWLSWLSYLEDPRIRFFYDPQMPALKDLPAVDTGKDNKKHPSNFQHIFYTDGSAITSPTKEGHLNAGMGIVYFINKDGNLQKQQEWSISLGNHTAQFAEIAAFEFALKKCLPLGGNILVVTDSNYVAKAYNEELDVWASNGFVNNRKKPLKHISKWKSVADLKRLRPDVVVTHEPGHQKLDSSPHAYGNNLADQLATQASFKVHAGKRTADGSEFEKRTADGSEFESPKKKAKVE

SEQ ID NO: 6705 - protein, 2213 aa, synthetic construct
MPAAKRVKLDGGDKKYSIGLDIGTNSVGWAVITDEYKVPSKKFKVLGNTDRHSIKKNLIGALLFDSGETAEATRLKRTARRRYTRRKNRICYLQEIFSNEMAKVDDSFFHRLEESFLVEEDKKHERHPIFGNIVDEVAYHEKYPTIYHLRKKLVDSTDKADLRLIYLALAHMIKFRGHFLIEGDLNPDNSDVDKLFIQLVQTYNQLFEENPINASGVDAKAILSARLSKSRRLENLIAQLPGEKKNGLFGNLIALSLGLTPNFKSNFDLAEDAKLQLSKDTYDDDLDNLLAQIGDQYADLFLAAKNLSDAILLSDILRVNTEITKAPLSASMIKRYDEHHQDLTLLKALVRQQLPEKYKEIFFDQSKNGYAGYIDGGASQEEFYKFIKPILEKMDGTEELLVKLNREDLLRKQRTFDNGSIPHQIHLGELHAILRRQEDFYPFLKDNREKIEKILTFRIPYYVGPLARGNSRFAWMTRKSEETITPWNFEEVVDKGASAQSFIERMTNFDKNLPNEKVLPKHSLLYEYFTVYNELTKVKYVTEGMRKPAFLSGEQKKAIVDLLFKTNRKVTVKQLKEDYFKKIECFDSVEISGVEDRFNASLGTYHDLLKIIKDKDFLDNEENEDILEDIVLTLTLFEDREMIEERLKTYAHLFDDKVMKQLKRRRYTGWGRLSRKLINGIRDKQSGKTILDFLKSDGFANRNFMQLIHDDSLTFKEDIQKAQVSGQGDSLHEHIANLAGSPAIKKGILQTVKVVDELVKVMGRHKPENIVIEMARENQTTQKGQKNSRERMKRIEEGIKELGSQILKEHPVENTQLQNEKLYLYYLQNGRDMYVDQELDINRLSDYDVDHIVPQSFLKDDSIDNKVLTRSDKARGKSDNVPSEEVVKKMKNYWRQLLNAKLITQRKFDNLTKAERGGLSELDKAGFIKRQLVETRQITKHVAQILDSRMNTKYDENDKLIREVKVITLKSKLVSDFRKDFQFYKVREINNYHHAHDAYLNAVVGTALIKKYPKLESEFVYGDYKVYDVRKMIAKSEQEIGKATAKYFFYSNIMNFFKTEITLANGEIRKRPLIETNGETGEIVWDKGRDFATVRKVLSMPQVNIVKKTEVQTGGFSKESILPKRNSDKLIARKKDWDPKKYGGFDSPTVAYSVLVVAKVEKGKSKKLKSVKELLGITIMERSSFEKNPIDFLEAKGYKEVKKDLIIKLPKYSLFELENGRKRMLASAGELQKGNELALPSKYVNFLYLASHYEKLKGSPEDNEQKQLFVEQHKHYLDEIIEQISEFSKRVILADANLDKVLSAYNKHRDKPIREQAENIIHLFTLTNLGAPAAFKYFDTTIDRKRYTSTKEVLDATLIHQSITGLYETRIDLSQLGGDGGGGGPAPGGTLGDQGSRGSDPLPEPRVTLTVEGIPTEFLVNTGAEHSVLTKPMGKMGSKRTVVAGATGSKVYPWTTKRLLKIGQKQVTHSFLVIPECPAPLLGRDLLTKLKAQIQFSTEGPQVTWEDRPAMCLVLNLEEEYRLHEKPVPPSIDPSWLQLFPMVWAEKAGMGLANQVPPVVVELKSDASPVAVRQYPMSKEAREGIRPHIQRFLDLGILVPCQSPWNTPLLPVKKPGTNDYRPVQDLREVNKRVQDIHPTVPNPYNLLSSLPPSHTWYSVLDLKDAFFCLKLHPNSQPLFAFEWRDPEKGNTGQLTWTRLPQGFKNSPTLFNEALHRDLASFRALNPQVVMLQYVDDLLVAAPTYRDCKEGTRRLLQELSKLGYRVSAKKAQLCREEVTYLGYLLKGGKRWLTPARKATVMKIPTPTTPRQVREFLGTAGFCRLWIPGFASLAAPLYPLTRPKVPFTWTEAHQEAFGRIKEALLSAPALALPDLTKPFALYVDEKEGVARGVLTQTLGPWRRPVAYLSKKLDPVASGWPTCLKAIAAVALLLKDADKLTLGQNVLVIAPHNLESIVRQPPDRWMTNARMTHYQSLLLNERVSFAPPAILNPATLLPVESDDTPIHICSEILAEETGTRPDLRDQPLPGVPAWYTDGSSFIMDGRRQAGAAIVDNKRTVWASNLPEGTSAQKAELIALTQALRLAEGKSINIYTDSRYAFATAHVHGAIYKQRGWLTSAGKDIKNKEEILALLEAIHLPKRVAIIHCPGHQRGTDPVATGNRKADEAAKQAAQSTRILTETTKNAGKRTADGSEFEKRTADGSEFESPKKKAKVE

SEQ ID NO: 6706 - protein, 2091 aa, synthetic construct
MPAAKRVKLDGGDKKYSIGLDIGTNSVGWAVITDEYKVPSKKFKVLGNTDRHSIKKNLIGALLFDSGETAEATRLKRTARRRYTRRKNRICYLQEIFSNEMAKVDDSFFHRLEESFLVEEDKKHERHPIFGNIVDEVAYHEKYPTIYHLRKKLVDSTDKADLRLIYLALAHMIKFRGHFLIEGDLNPDNSDVDKLFIQLVQTYNQLFEENPINASGVDAKAILSARLSKSRRLENLIAQLPGEKKNGLFGNLIALSLGLTPNFKSNFDLAEDAKLQLSKDTYDDDLDNLLAQIGDQYADLFLAAKNLSDAILLSDILRVNTEITKAPLSASMIKRYDEHHQDLTLLKALVRQQLPEKYKEIFFDQSKNGYAGYIDGGASQEEFYKFIKPILEKMDGTEELLVKLNREDLLRKQRTFDNGSIPHQIHLGELHAILRRQEDFYPFLKDNREKIEKILTFRIPYYVGPLARGNSRFAWMTRKSEETITPWNFEEVVDKGASAQSFIERMTNFDKNLPNEKVLPKHSLLYEYFTVYNELTKVKYVTEGMRKPAFLSGEQKKAIVDLLFKTNRKVTVKQLKEDYFKKIECFDSVEISGVEDRFNASLGTYHDLLKIIKDKDFLDNEENEDILEDIVLTLTLFEDREMIEERLKTYAHLFDDKVMKQLKRRRYTGWGRLSRKLINGIRDKQSGKTILDFLKSDGFANRNFMQLIHDDSLTFKEDIQKAQVSGQGDSLHEHIANLAGSPAIKKGILQTVKVVDELVKVMGRHKPENIVIEMARENQTTQKGQKNSRERMKRIEEGIKELGSQILKEHPVENTQLQNEKLYLYYLQNGRDMYVDQELDINRLSDYDVDHIVPQSFLKDDSIDNKVLTRSDKARGKSDNVPSEEVVKKMKNYWRQLLNAKLITQRKFDNLTKAERGGLSELDKAGFIKRQLVETRQITKHVAQILDSRMNTKYDENDKLIREVKVITLKSKLVSDFRKDFQFYKVREINNYHHAHDAYLNAVVGTALIKKYPKLESEFVYGDYKVYDVRKMIAKSEQEIGKATAKYFFYSNIMNFFKTEITLANGEIRKRPLIETNGETGEIVWDKGRDFATVRKVLSMPQVNIVKKTEVQTGGFSKESILPKRNSDKLIARKKDWDPKKYGGFDSPTVAYSVLVVAKVEKGKSKKLKSVKELLGITIMERSSFEKNPIDFLEAKGYKEVKKDLIIKLPKYSLFELENGRKRMLASAGELQKGNELALPSKYVNFLYLASHYEKLKGSPEDNEQKQLFVEQHKHYLDEIIEQISEFSKRVILADANLDKVLSAYNKHRDKPIREQAENIIHLFTLTNLGAPAAFKYFDTTIDRKRYTSTKEVLDATLIHQSITGLYETRIDLSQLGGDGGGGGPAPGGTLNLEDEYRLYETSAEPEVSPGSTWLSDFPQAWAETGGMGLAVRQAPLIIPLKATSTPVSIKQYPMSQEAKLGIKPHIQRLLDQGILVPCQSPWNTPLLPVKKPGTNDYRPVQDLREVNKRVEDIHPTVPNPYNLLSGLPPSHRWYTVLDLKDAFFCLRLHPTSQPLFAFEWRDPGMGISGQLTWTRLPQGFKNSPTLFNEALHRDLADFRIQHPDLILLQYVDDILLAATSELDCQQGTRALLLTLGNLGYRASAKKAQLCQKQVKYLGYLLKEGQRWLTEARKETVMGQPTPKTPRQLREFLGKAGFCRLFIPGFAEMAAPLYPLTKPGTLFNWGPDQQKAYQEIKQALLTAPALGLPDLTKPFELFVDEKQGYAKGVLTQKLGPWRRPVAYLSKKLDPVAAGWPPCLRMVAAIAVLRKDAGKLTMGQPLVILAPHAVEALVKQPPDRWLSNARMTHYQAMLLDTDRVQFGPVVALNPATLLPLPEEGAPHDCLEILAETHGTRPDLTDQPIPDADHTWYTDGSSFLQEGQRKAGAAVTTETEVIWARALPAGTSAQRAELIALTQALKMAEGKRLNVYTDSRYAFATAHIHGEIYRRRGWLTSEGREIKNKSEILALLKALFLPKRLSIIHCLGHQKGDSAEARGNRLADQAAREAAIKTPPDTSTLLAGKRTADGSEFEKRTADGSEFESPKKKAKVE

SEQ ID NO: 6707 - protein, 2091 aa, synthetic construct
MPAAKRVKLDGGDKKYSIGLDIGTNSVGWAVITDEYKVPSKKFKVLGNTDRHSIKKNLIGALLFDSGETAEATRLKRTARRRYTRRKNRICYLQEIFSNEMAKVDDSFFHRLEESFLVEEDKKHERHPIFGNIVDEVAYHEKYPTIYHLRKKLVDSTDKADLRLIYLALAHMIKFRGHFLIEGDLNPDNSDVDKLFIQLVQTYNQLFEENPINASGVDAKAILSARLSKSRRLENLIAQLPGEKKNGLFGNLIALSLGLTPNFKSNFDLAEDAKLQLSKDTYDDDLDNLLAQIGDQYADLFLAAKNLSDAILLSDILRVNTEITKAPLSASMIKRYDEHHQDLTLLKALVRQQLPEKYKEIFFDQSKNGYAGYIDGGASQEEFYKFIKPILEKMDGTEELLVKLNREDLLRKQRTFDNGSIPHQIHLGELHAILRRQEDFYPFLKDNREKIEKILTFRIPYYVGPLARGNSRFAWMTRKSEETITPWNFEEVVDKGASAQSFIERMTNFDKNLPNEKVLPKHSLLYEYFTVYNELTKVKYVTEGMRKPAFLSGEQKKAIVDLLFKTNRKVTVKQLKEDYFKKIECFDSVEISGVEDRFNASLGTYHDLLKIIKDKDFLDNEENEDILEDIVLTLTLFEDREMIEERLKTYAHLFDDKVMKQLKRRRYTGWGRLSRKLINGIRDKQSGKTILDFLKSDGFANRNFMQLIHDDSLTFKEDIQKAQVSGQGDSLHEHIANLAGSPAIKKGILQTVKVVDELVKVMGRHKPENIVIEMARENQTTQKGQKNSRERMKRIEEGIKELGSQILKEHPVENTQLQNEKLYLYYLQNGRDMYVDQELDINRLSDYDVDHIVPQSFLKDDSIDNKVLTRSDKARGKSDNVPSEEVVKKMKNYWRQLLNAKLITQRKFDNLTKAERGGLSELDKAGFIKRQLVETRQITKHVAQILDSRMNTKYDENDKLIREVKVITLKSKLVSDFRKDFQFYKVREINNYHHAHDAYLNAVVGTALIKKYPKLESEFVYGDYKVYDVRKMIAKSEQEIGKATAKYFFYSNIMNFFKTEITLANGEIRKRPLIETNGETGEIVWDKGRDFATVRKVLSMPQVNIVKKTEVQTGGFSKESILPKRNSDKLIARKKDWDPKKYGGFDSPTVAYSVLVVAKVEKGKSKKLKSVKELLGITIMERSSFEKNPIDFLEAKGYKEVKKDLIIKLPKYSLFELENGRKRMLASAGELQKGNELALPSKYVNFLYLASHYEKLKGSPEDNEQKQLFVEQHKHYLDEIIEQISEFSKRVILADANLDKVLSAYNKHRDKPIREQAENIIHLFTLTNLGAPAAFKYFDTTIDRKRYTSTKEVLDATLIHQSITGLYETRIDLSQLGGDGGGGGPAPGGTLGIEDEYRLHETSTEPDVSLGSTWLSDFPQAWAETGGMGLAVRQAPLIIPLKATSTPVSIQQYPMSHEARLGIKPHIQRLLDQGILVPCQSPWNTPLLPVKKPGTNDYRPVQDLREVNKRVEDIHPTVPNPYNLLSGLPPSHQWYTVLDLKDAFFCLRLHPTSQPLFAFEWRDPGMGISGQLTWTRLPQGFKNSPTLFNEALHRDLADFRIQHPDLILLQYVDDILLAATSELDCQQGTRALLQTLGDLGYRASAKKAQICQKQVKYLGYLLREGQRWLTEARKETVMGQPVPKTPRQLREFLGTAGFCRLWIPGFAEMAAPLYPLTKPGTLFSWGPDQQKAYQEIKQALLTAPALGLPDLTKPFELFVDEKQGYAKGVLTQKLGPWRRPVAYLSKKLDPVAAGWPPCLRMVAAIAVLTKDAGKLTMGQPLVILAPHAVEALVKQPPDRWLSNARMTHYQAMLLDTDRVQFGPVVALNPATLLPLPEEGAPHDCLEILAETHGTRPDLTDQPIPDADHTWYTDGSSFLQEGQRKAGAAVTTETEVIWAGALPAGTSAQRAELIALTQALKMAEGKRLNVYTDSRYAFATAHIHGEIYRRRGWLTSEGREIKNKSEILALLKALFLPKRLSIIHCLGHQKGDSAEARGNRLADQAAREAAIKTPPDTSTLLAGKRTADGSEFEKRTADGSEFESPKKKAKVE

SEQ ID NO: 6708 - protein, 2091 aa, synthetic construct
MPAAKRVKLDGGDKKYSIGLDIGTNSVGWAVITDEYKVPSKKFKVLGNTDRHSIKKNLIGALLFDSGETAEATRLKRTARRRYTRRKNRICYLQEIFSNEMAKVDDSFFHRLEESFLVEEDKKHERHPIFGNIVDEVAYHEKYPTIYHLRKKLVDSTDKADLRLIYLALAHMIKFRGHFLIEGDLNPDNSDVDKLFIQLVQTYNQLFEENPINASGVDAKAILSARLSKSRRLENLIAQLPGEKKNGLFGNLIALSLGLTPNFKSNFDLAEDAKLQLSKDTYDDDLDNLLAQIGDQYADLFLAAKNLSDAILLSDILRVNTEITKAPLSASMIKRYDEHHQDLTLLKALVRQQLPEKYKEIFFDQSKNGYAGYIDGGASQEEFYKFIKPILEKMDGTEELLVKLNREDLLRKQRTFDNGSIPHQIHLGELHAILRRQEDFYPFLKDNREKIEKILTFRIPYYVGPLARGNSRFAWMTRKSEETITPWNFEEVVDKGASAQSFIERMTNFDKNLPNEKVLPKHSLLYEYFTVYNELTKVKYVTEGMRKPAFLSGEQKKAIVDLLFKTNRKVTVKQLKEDYFKKIECFDSVEISGVEDRFNASLGTYHDLLKIIKDKDFLDNEENEDILEDIVLTLTLFEDREMIEERLKTYAHLFDDKVMKQLKRRRYTGWGRLSRKLINGIRDKQSGKTILDFLKSDGFANRNFMQLIHDDSLTFKEDIQKAQVSGQGDSLHEHIANLAGSPAIKKGILQTVKVVDELVKVMGRHKPENIVIEMARENQTTQKGQKNSRERMKRIEEGIKELGSQILKEHPVENTQLQNEKLYLYYLQNGRDMYVDQELDINRLSDYDVDHIVPQSFLKDDSIDNKVLTRSDKARGKSDNVPSEEVVKKMKNYWRQLLNAKLITQRKFDNLTKAERGGLSELDKAGFIKRQLVETRQITKHVAQILDSRMNTKYDENDKLIREVKVITLKSKLVSDFRKDFQFYKVREINNYHHAHDAYLNAVVGTALIKKYPKLESEFVYGDYKVYDVRKMIAKSEQEIGKATAKYFFYSNIMNFFKTEITLANGEIRKRPLIETNGETGEIVWDKGRDFATVRKVLSMPQVNIVKKTEVQTGGFSKESILPKRNSDKLIARKKDWDPKKYGGFDSPTVAYSVLVVAKVEKGKSKKLKSVKELLGITIMERSSFEKNPIDFLEAKGYKEVKKDLIIKLPKYSLFELENGRKRMLASAGELQKGNELALPSKYVNFLYLASHYEKLKGSPEDNEQKQLFVEQHKHYLDEIIEQISEFSKRVILADANLDKVLSAYNKHRDKPIREQAENIIHLFTLTNLGAPAAFKYFDTTIDRKRYTSTKEVLDATLIHQSITGLYETRIDLSQLGGDGGGGGPAPGGTLNIEDEHRLHETSKEPDVSLGSTWLSDFPQAWAETGGMGLAVRQAPLIIPLKATSTPVSIKQYPMSQEARLGIKPHIQRLLDQGILVPCQSPWNTPLLPVKKPGTNDYRPVQDLREVNKRVEDIHPTVPNPYNLLSGLPPSHQWYTVLDLKDAFFCLRLHPTSQPLFAFEWRDPEMGISGQLTWTRLPQGFKNSPTLFNEALHRDLADFRIQHPDLILLQYVDDLLLAATSELDCQQGTRALLQTLGNLGYRASAKKAQICQKQVKYLGYLLKEGQRWLTEARKETVMGQPTPKTPRQLREFLGTAGFCRLWIPGFAEMAAPLYPLTKPGTLFNWGPDQQKAYQEIKQALLTAPALGLPDLTKPFELFVDEKQGYAKGVLTQKLGPWRRPVAYLSKKLDPVAAGWPPCLRMVAAIAVLTKDAGKLTMGQPLVILAPHAVEALVKQPPDRWLSNARMTHYQALLLDTDRVQFGPVVALNPATLLPLPEEGLQHNCLDILAEAHGTRPDLTDQPLPDADHTWYTDGSSLLQEGQRKAGAAVTTETEVIWAKALPAGTSAQRAELIALTQALKMAEGKKLNVYTDSRYAFATAHIHGEIYRRRGWLTSEGKEIKNKDEILALLKALFLPKRLSIIHCPGHQKGHSAEARGNRMADQAARKAAITETPDTSTLLAGKRTADGSEFEKRTADGSEFESPKKKAKVE

SEQ ID NO: 6709 - protein, 2091 aa, synthetic construct; identical to SEQ ID NO: 6708

SEQ ID NO: 6710 - protein, 2085 aa, synthetic construct
MPAAKRVKLDGGDKKYSIGLDIGTNSVGWAVITDEYKVPSKKFKVLGNTDRHSIKKNLIGALLFDSGETAEATRLKRTARRRYTRRKNRICYLQEIFSNEMAKVDDSFFHRLEESFLVEEDKKHERHPIFGNIVDEVAYHEKYPTIYHLRKKLVDSTDKADLRLIYLALAHMIKFRGHFLIEGDLNPDNSDVDKLFIQLVQTYNQLFEENPINASGVDAKAILSARLSKSRRLENLIAQLPGEKKNGLFGNLIALSLGLTPNFKSNFDLAEDAKLQLSKDTYDDDLDNLLAQIGDQYADLFLAAKNLSDAILLSDILRVNTEITKAPLSASMIKRYDEHHQDLTLLKALVRQQLPEKYKEIFFDQSKNGYAGYIDGGASQEEFYKFIKPILEKMDGTEELLVKLNREDLLRKQRTFDNGSIPHQIHLGELHAILRRQEDFYPFLKDNREKIEKILTFRIPYYVGPLARGNSRFAWMTRKSEETITPWNFEEVVDKGASAQSFIERMTNFDKNLPNEKVLPKHSLLYEYFTVYNELTKVKYVTEGMRKPAFLSGEQKKAIVDLLFKTNRKVTVKQLKEDYFKKIECFDSVEISGVEDRFNASLGTYHDLLKIIKDKDFLDNEENEDILEDIVLTLTLFEDREMIEERLKTYAHLFDDKVMKQLKRRRYTGWGRLSRKLINGIRDKQSGKTILDFLKSDGFANRNFMQLIHDDSLTFKEDIQKAQVSGQGDSLHEHIANLAGSPAIKKGILQTVKVVDELVKVMGRHKPENIVIEMARENQTTQKGQKNSRERMKRIEEGIKELGSQILKEHPVENTQLQNEKLYLYYLQNGRDMYVDQELDINRLSDYDVDHIVPQSFLKDDSIDNKVLTRSDKARGKSDNVPSEEVVKKMKNYWRQLLNAKLITQRKFDNLTKAERGGLSELDKAGFIKRQLVETRQITKHVAQILDSRMNTKYDENDKLIREVKVITLKSKLVSDFRKDFQFYKVREINNYHHAHDAYLNAVVGTALIKKYPKLESEFVYGDYKVYDVRKMIAKSEQEIGKATAKYFFYSNIMNFFKTEITLANGEIRKRPLIETNGETGEIVWDKGRDFATVRKVLSMPQVNIVKKTEVQTGGFSKESILPKRNSDKLIARKKDWDPKKYGGFDSPTVAYSVLVVAKVEKGKSKKLKSVKELLGITIMERSSFEKNPIDFLEAKGYKEVKKDLIIKLPKYSLFELENGRKRMLASAGELQKGNELALPSKYVNFLYLASHYEKLKGSPEDNEQKQLFVEQHKHYLDEIIEQISEFSKRVILADANLDKVLSAYNKHRDKPIREQAENIIHLFTLTNLGAPAAFKYFDTTIDRKRYTSTKEVLDATLIHQSITGLYETRIDLSQLGGDGGGGGPAPGGTLQLDDEYRLYSPLVKPDQNIQFWLEQFPQAWAETAGMGLAKQVPPQVIQLKASATPVSVRQYPLSKEAQEGIRPHVQRLIQQGILVPVQSPWNTPLLPVRKPGTNDYRPVQDLREVNKRVQDIHPTVPNPYNLLCALPPQRSWYTVLDLKDAFFCLRLHPTSQPLFAFEWRDPGTGRTGQLTWTRLPQGFKNSPTIFDEALHRDLANFRIQHPQVTLLQYVDDLLLAGATKQDCLEGTKALLLELSDLGYRASAKKAQICRREVTYLGYSLRDGQRWLTEARKKTVVQIPAPTTAKQVREFLGTAGFCRLWIPGFATLAAPLYPLTKEKGEFSWAPEHQKAFDAIKKALLSAPALALPDVTKPFTLYVDERKGVARGVLTQTLGPWRRPVAYLSKKLDPVASGWPVCLKAIAAVAILVKDADKLTLGQNITVIAPHALENIVRQPPDRWMTNARMTHYQSLLLTERVTFAPPAALNPATLLPEETDEPVTHDCHQLLIEETGVRKDLTDIPLTGEVLTWFTDGSSYVVEGKRMAGAAVVDGTRTIWASSLPEGTSAQKAELMALTQALRLAEGKSINIYTDSRYAFATAHVHGAIYKQRGLLTSAGREIKNKEEILSLLEALHLPKRLAIIHCPGHQKAKDPISRGNQMADRVAKQAAQGVNLLAGKRTADGSEFEKRTADGSEFESPKKKAKVE

SEQ ID NO: 6711 - protein, 2085 aa, synthetic construct; identical to SEQ ID NO: 6710

SEQ ID NO: 6712 - protein, 2171 aa, synthetic construct
MPAAKRVKLDGGDKKYSIGLDIGTNSVGWAVITDEYKVPSKKFKVLGNTDRHSIKKNLIGALLFDSGETAEATRLKRTARRRYTRRKNRICYLQEIFSNEMAKVDDSFFHRLEESFLVEEDKKHERHPIFGNIVDEVAYHEKYPTIYHLRKKLVDSTDKADLRLIYLALAHMIKFRGHFLIEGDLNPDNSDVDKLFIQLVQTYNQLFEENPINASGVDAKAILSARLSKSRRLENLIAQLPGEKKNGLFGNLIALSLGLTPNFKSNFDLAEDAKLQLSKDTYDDDLDNLLAQIGDQYADLFLAAKNLSDAILLSDILRVNTEITKAPLSASMIKRYDEHHQDLTLLKALVRQQLPEKYKEIFFDQSKNGYAGYIDGGASQEEFYKFIKPILEKMDGTEELLVKLNREDLLRKQRTFDNGSIPHQIHLGELHAILRRQEDFYPFLKDNREKIEKILTFRIPYYVGPLARGNSRFAWMTRKSEETITPWNFEEVVDKGASAQSFIERMTNFDKNLPNEKVLPKHSLLYEYFTVYNELTKVKYVTEGMRKPAFLSGEQKKAIVDLLFKTNRKVTVKQLKEDYFKKIECFDSVEISGVEDRFNASLGTYHDLLKIIKDKDFLDNEENEDILEDIVLTLTLFEDREMIEERLKTYAHLFDDKVMKQLKRRRYTGWGRLSRKLINGIRDKQSGKTILDFLKSDGFANRNFMQLIHDDSLTFKEDIQKAQVSGQGDSLHEHIANLAGSPAIKKGILQTVKVVDELVKVMGRHKPENIVIEMARENQTTQKGQKNSRERMKRIEEGIKELGSQILKEHPVENTQLQNEKLYLYYLQNGRDMYVDQELDINRLSDYDVDHIVPQSFLKDDSIDNKVLTRSDKARGKSDNVPSEEVVKKMKNYWRQLLNAKLITQRKFDNLTKAERGGLSELDKAGFIKRQLVETRQITKHVAQILDSRMNTKYDENDKLIREVKVITLKSKLVSDFRKDFQFYKVREINNYHHAHDAYLNAVVGTALIKKYPKLESEFVYGDYKVYDVRKMIAKSEQEIGKATAKYFFYSNIMNFFKTEITLANGEIRKRPLIETNGETGEIVWDKGRDFATVRKVLSMPQVNIVKKTEVQTGGFSKESILPKRNSDKLIARKKDWDPKKYGGFDSPTVAYSVLVVAKVEKGKSKKLKSVKELLGITIMERSSFEKNPIDFLEAKGYKEVKKDLIIKLPKYSLFELENGRKRMLASAGELQKGNELALPSKYVNFLYLASHYEKLKGSPEDNEQKQLFVEQHKHYLDEIIEQISEFSKRVILADANLDKVLSAYNKHRDKPIREQAENIIHLFTLTNLGAPAAFKYFDTTIDRKRYTSTKEVLDATLIHQSITGLYETRIDLSQLGGDGGGGGPAPGGMDPLQLLQPLEAEIKGTKLKAHWNSGATITCVPEAFLEDERPIQTMLIKTIHGEKQQDVYYLTFKVQGRKVEAEVLASPYDYILLNPSDVPWLMKKPLQLTVLVPLHEYQERLLQQTALPKEQKELLQKLFLKYDALWQHWENQVGHRRIKPHNIATGTLAPRPQKQYPINPKAKPSIQIVIDDLLKQGVLIQQNSTMNTPVYPVPKPDGKWRMVLDYREVNKTIPLIAAQNQHSAGILSSIYRGKYKTTLDLTNGFWAHPITPESYWLTAFTWQGKQYCWTRLPQGFLNSPALFNADVVDLLKEIPNVQAYVDDIYISHDDPQEHLEQLEKIFSILLNAGYVVSLKKSEIAQREVEFLGFNITKEGRGLTDTFKQKLLNITPPKDLKQLQSILGKLNFARNFIPNYSELVKPLYTIVAPANGKFISWTEDNSNQLQHIISVLNQADNLEERNPETRLIIKVNSSPSAGYIRYYNEGSKRPIMYVNYIFSKAEAKFTQTEKLLTTMHKGLIKAMDLAMGQEILVYSPIVSMTKIQRTPLPERKALPVRWITWMTYLEDPRIQFHYDKSLPELQQIPNVTEDVIAKTKHPSEFAMVFYTDGSAIKHPDVNKSHSAGMGIAQVQFIPEYKIVHQWSIPLGDHTAQLAEIAAVEFACKKALKISGPVLIVTDSFYVAESANKELPYWKSNGFLNNKKKPLRHVSKWKSIAECLQLKPDIIIMHEKGHQQPMTTLHTEGNNLADKLATQGSYVVHAGKRTADGSEFEKRTADGSEFESPKKKAKVE

SEQ ID NO: 6713 - protein, 2082 aa, synthetic construct
MPAAKRVKLDGGDKKYSIGLDIGTNSVGWAVITDEYKVPSKKFKVLGNTDRHSIKKNLIGALLFDSGETAEATRLKRTARRRYTRRKNRICYLQEIFSNEMAKVDDSFFHRLEESFLVEEDKKHERHPIFGNIVDEVAYHEKYPTIYHLRKKLVDSTDKADLRLIYLALAHMIKFRGHFLIEGDLNPDNSDVDKLFIQLVQTYNQLFEENPINASGVDAKAILSARLSKSRRLENLIAQLPGEKKNGLFGNLIALSLGLTPNFKSNFDLAEDAKLQLSKDTYDDDLDNLLAQIGDQYADLFLAAKNLSDAILLSDILRVNTEITKAPLSASMIKRYDEHHQDLTLLKALVRQQLPEKYKEIFFDQSKNGYAGYIDGGASQEEFYKFIKPILEKMDGTEELLVKLNREDLLRKQRTFDNGSIPHQIHLGELHAILRRQEDFYPFLKDNREKIEKILTFRIPYYVGPLARGNSRFAWMTRKSEETITPWNFEEVVDKGASAQSFIERMTNFDKNLPNEKVLPKHSLLYEYFTVYNELTKVKYVTEGMRKPAFLSGEQKKAIVDLLFKTNRKVTVKQLKEDYFKKIECFDSVEISGVEDRFNASLGTYHDLLKIIKDKDFLDNEENEDILEDIVLTLTLFEDREMIEERLKTYAHLFDDKVMKQLKRRRYTGWGRLSRKLINGIRDKQSGKTILDFLKSDGFANRNFMQLIHDDSLTFKEDIQKAQVSGQGDSLHEHIANLAGSPAIKKGILQTVKVVDELVKVMGRHKPENIVIEMARENQTTQKGQKNSRERMKRIEEGIKELGSQILKEHPVENTQLQNEKLYLYYLQNGRDMYVDQELDINRLSDYDVDHIVPQSFLKDDSIDNKVLTRSDKARGKSDNVPSEEVVKKMKNYWRQLLNAKLITQRKFDNLTKAERGGLSELDKAGFIKRQLVETRQITKHVAQILDSRMNTKYDENDKLIREVKVITLKSKLVSDFRKDFQFYKVREINNYHHAHDAYLNAVVGTALIKKYPKLESEFVYGDYKVYDVRKMIAKSEQEIGKATAKYFFYSNIMNFFKTEITLANGEIRKRPLIETNGETGEIVWDKGRDFATVRKVLSMPQVNIVKKTEVQTGGFSKESILPKRNSDKLIARKKDWDPKKYGGFDSPTVAYSVLVVAKVEKGKSKKLKSVKELLGITIMERSSFEKNPIDFLEAKGYKEVKKDLIIKLPKYSLFELENGRKRMLASAGELQKGNELALPSKYVNFLYLASHYEKLKGSPEDNEQKQLFVEQHKHYLDEIIEQISEFSKRVILADANLDKVLSAYNKHRDKPIREQAENIIHLFTLTNLGAPAAFKYFDTTIDRKRYTSTKEVLDATLIHQSITGLYETRIDLSQLGGDGGGGGPAPGGIPWLMKKPLQLTTLVPLQEYEERLLKQTMLTGSYKEKLQSLFLKYDALWQHWENQVGHRRIKPHHIATGTVNPRPQKQYPINPKAKASIQTVINDLLKQGVLIQQNSIMNTPVYPVPKPDGKWRMVLDYREVNKTIPLIAAQNQHSAGILSSIFRGKYKTTLDLSNGFWAHSITPESYWLTAFTWLGQQYCWTRLPQGFLNSPALFNADVVDLLKEVPNVQVYVDDIYISHDDPREHLEQLEKVFSLLLNAGYVVSLKKSEIAQHEVEFLGFNITKEGRGLTETFKQKLLNITPPRDLKQLQSILGLLNFARNFIPNFSELVKPLYNIIATAPGKYITWTTDNSQQLQNIISMLNSAENLEERNPEVRLIMKVNTSPSAGYIRFYNEFAKRPIMYLNYVYTKAEVKFTNTEKLLTTIHKGLIKALDLGMGQEILVYSPIVSMTKIQKTPLPERKALPIRWITWMSYLEDPRIQFHYDKTLPELQQVPTVTDDIIAKIKHPSEFSMVFYTDGSAIKHPNVNKSHNAGMGIAQVQFKPEFTVINTWSIPLGDHTAQLAEVAAVEFACKKALKIDGPVLIVTDSFYVAESVNKELPYWQSNGFFNNKKKPLKHVSKWKSIADCIQLKPDIIIIHEKGHQPTASTFHTEGNNLADKLATQGSYVVNAGKRTADGSEFEKRTADGSEFESPKKKAKVE

SEQ ID NO: 6714 - protein, 2171 aa, synthetic construct
MPAAKRVKLDGGDKKYSIGLDIGTNSVGWAVITDEYKVPSKKFKVLGNTDRHSIKKNLIGALLFDSGETAEATRLKRTARRRYTRRKNRICYLQEIFSNEMAKVDDSFFHRLEESFLVEEDKKHERHPIFGNIVDEVAYHEKYPTIYHLRKKLVDSTDKADLRLIYLALAHMIKFRGHFLIEGDLNPDNSDVDKLFIQLVQTYNQLFEENPINASGVDAKAILSARLSKSRRLENLIAQLPGEKKNGLFGNLIALSLGLTPNFKSNFDLAEDAKLQLSKDTYDDDLDNLLAQIGDQYADLFLAAKNLSDAILLSDILRVNTEITKAPLSASMIKRYDEHHQDLTLLKALVRQQLPEKYKEIFFDQSKNGYAGYIDGGASQEEFYKFIKPILEKMDGTEELLVKLNREDLLRKQRTFDNGSIPHQIHLGELHAILRRQEDFYPFLKDNREKIEKILTFRIPYYVGPLARGNSRFAWMTRKSEETITPWNFEEVVDKGASAQSFIERMTNFDKNLPNEKVLPKHSLLYEYFTVYNELTKVKYVTEGMRKPAFLSGEQKKAIVDLLFKTNRKVTVKQLKEDYFKKIECFDSVEISGVEDRFNASLGTYHDLLKIIKDKDFLDNEENEDILEDIVLTLTLFEDREMIEERLKTYAHLFDDKVMKQLKRRRYTGWGRLSRKLINGIRDKQSGKTILDFLKSDGFANRNFMQLIHDDSLTFKEDIQKAQVSGQGDSLHEHIANLAGSPAIKKGILQTVKVVDELVKVMGRHKPENIVIEMARENQTTQKGQKNSRERMKRIEEGIKELGSQILKEHPVENTQLQNEKLYLYYLQNGRDMYVDQELDINRLSDYDVDHIVPQSFLKDDSIDNKVLTRSDKARGKSDNVPSEEVVKKMKNYWRQLLNAKLITQRKFDNLTKAERGGLSELDKAGFIKRQLVETRQITKHVAQILDSRMNTKYDENDKLIREVKVITLKSKLVSDFRKDFQFYKVREINNYHHAHDAYLNAVVGTALIKKYPKLESEFVYGDYKVYDVRKMIAKSEQEIGKATAKYFFYSNIMNFFKTEITLANGEIRKRPLIETNGETGEIVWDKGRDFATVRKVLSMPQVNIVKKTEVQTGGFSKESILPKRNSDKLIARKKDWDPKKYGGFDSPTVAYSVLVVAKVEKGKSKKLKSVKELLGITIMERSSFEKNPIDFLEAKGYKEVKKDLIIKLPKYSLFELENGRKRMLASAGELQKGNELALPSKYVNFLYLASHYEKLKGSPEDNEQKQLFVEQHKHYLDEIIEQISEFSKRVILADANLDKVLSAYNKHRDKPIREQAENIIHLFTLTNLGAPAAFKYFDTTIDRKRYTSTKEVLDATLIHQSITGLYETRIDLSQLGGDGGGGGPAPGGMNPLQLLQPLPAEVKGTKLLAHWNSGATITCIPESFLEDEQPIKQTLIKTIHGEKQQNVYYLTFKVKGRKVEAEVIASPYEYILLSPTDVPWLTQQPLQLTILVPLQEYQDRILNKTALPEEQKQQLKALFTKYDNLWQHWENQVGHRKIRPHNIATGDYPPRPQKQYPINPKAKPSIQIVIDDLLKQGVLTPQNSTMNTPVYPVPKPDGRWRMVLDYREVNKTIPLTAAQNQHSAGILATIVRQKYKTTLDLANGFWAHPITPDSYWLTAFTWQGKQYCWTRLPQGFLNSPALFTADAVDLLKEVPNVQVYVDDIYLSHDNPHEHIQQLEKVFQILLQAGYVVSLKKSEIGQRTVEFLGFNITKEGRGLTDTFKTKLLNVTPPKDLKQLQSILGLLNFARNFIPNFAELVQTLYNLIASSKGKYIEWTEDNTKQLNKVIEALNTASNLEERLPDQRLVIKVNTSPSAGYVRYYNESGKKPIMYLNYVFSKAELKFSMLEKLLTTMHKALIKAMDLAMGQEILVYSPIVSMTKIQKTPLPERKALPIRWITWMTYLEDPRIQFHYDKTLPELKHIPDVYTSSIPPLKHPSQYEGVFCTDGSAIKSPDPTKSNNAGMGIVHAIYNPEYKILNQWSIPLGHHTAQMAEIAAVEFACKKALKVPGPVLVITDSFYVAESANKELPYWKSNGFVNNKKEPLKHISKWKSIAECLSIKPDITIQHEKGHQPINTSIHTEGNALADKLATQGSYVVNAGKRTADGSEFEKRTADGSEFESPKKKAKVE

SEQ ID NO: 6715 - protein, 2089 aa, synthetic construct
MPAAKRVKLDGGDKKYSIGLDIGTNSVGWAVITDEYKVPSKKFKVLGNTDRHSIKKNLIGALLFDSGETAEATRLKRTARRRYTRRKNRICYLQEIFSNEMAKVDDSFFHRLEESFLVEEDKKHERHPIFGNIVDEVAYHEKYPTIYHLRKKLVDSTDKADLRLIYLALAHMIKFRGHFLIEGDLNPDNSDVDKLFIQLVQTYNQLFEENPINASGVDAKAILSARLSKSRRLENLIAQLPGEKKNGLFGNLIALSLGLTPNFKSNFDLAEDAKLQLSKDTYDDDLDNLLAQIGDQYADLFLAAKNLSDAILLSDILRVNTEITKAPLSASMIKRYDEHHQDLTLLKALVRQQLPEKYKEIFFDQSKNGYAGYIDGGASQEEFYKFIKPILEKMDGTEELLVKLNREDLLRKQRTFDNGSIPHQIHLGELHAILRRQEDFYPFLKDNREKIEKILTFRIPYYVGPLARGNSRFAWMTRKSEETITPWNFEEVVDKGASAQSFIERMTNFDKNLPNEKVLPKHSLLYEYFTVYNELTKVKYVTEGMRKPAFLSGEQKKAIVDLLFKTNRKVTVKQLKEDYFKKIECFDSVEISGVEDRFNASLGTYHDLLKIIKDKDFLDNEENEDILEDIVLTLTLFEDREMIEERLKTYAHLFDDKVMKQLKRRRYTGWGRLSRKLINGIRDKQSGKTILDFLKSDGFANRNFMQLIHDDSLTFKEDIQKAQVSGQGDSLHEHIANLAGSPAIKKGILQTVKVVDELVKVMGRHKPENIVIEMARENQTTQKGQKNSRERMKRIEEGIKELGSQILKEHPVENTQLQNEKLYLYYLQNGRDMYVDQELDINRLSDYDVDHIVPQSFLKDDSIDNKVLTRSDKARGKSDNVPSEEVVKKMKNYWRQLLNAKLITQRKFDNLTKAERGGLSELDKAGFIKRQLVETRQITKHVAQILDSRMNTKYDENDKLIREVKVITLKSKLVSDFRKDFQFYKVREINNYHHAHDAYLNAVVGTALIKKYPKLESEFVYGDYKVYDVRKMIAKSEQEIGKATAKYFFYSNIMNFFKTEITLANGEIRKRPLIETNGETGEIVWDKGRDFATVRKVLSMPQVNIVKKTEVQTGGFSKESILPKRNSDKLIARKKDWDPKKYGGFDSPTVAYSVLVVAKVEKGKSKKLKSVKELLGITIMERSSFEKNPIDFLEAKGYKEVKKDLIIKLPKYSLFELENGRKRMLASAGELQKGNELALPSKYVNFLYLASHYEKLKGSPEDNEQKQLFVEQHKHYLDEIIEQISEFSKRVILADANLDKVLSAYNKHRDKPIREQAENIIHLFTLTNLGAPAAFKYFDTTIDRKRYTSTKEVLDATLIHQSITGLYETRIDLSQLGGDGGGGGPAPGGVLNLEEEYRLHEKPVPSSIDPSWLQLFPTVWAERAGMGLANQVPPVVVELRSGASPVAVRQYPMSKEAREGIRPHIQRFLDLGVLVPCQSPWNTPLLPVKKPGTNDYRPVQDLREINKRVQDIHPTVPNPYNLLSSLPPSHTWYSVLDLKDAFFCLKLHPNSQPLFAFEWRDPEKGNTGQLTWTRLPQGFKNSPTLFNEALHRDLAPFRALNPQVVLLQYVDDLLVAAPTYRDCKEGTQKLLQELSKLGYRVSAKKAQLCQKEVTYLGYLLKEGKRWLTPARKATVMKIPPPTTPRQVREFLGTAGFCRLWIPGFASLAAPLYPLTKPSIPFIWTEEHQKAFDRIKEALLSAPALALPDLTKPFTLYVDERAGVARGVLTQTLGPWRRPVAYLSKKLDPVASGWPTCLKAVAAVALLLKDADKLTLGQNVTVIASHSLESIVRQPPDRWMTNARMTHYQSLLLNERVSFAPPAVLNPATLLPVESEATPVHRCSEILAEETGTRRDLKDQPLPGVPAWYTDGSSFIAEGKRRAGAAIVDGKRTVWASSLPEGTSAQKAELVALTQALRLAEGKDINIYTDSRYAFATAHIHGAIYKQRGWLTSAGKDIKNKEEILALLEAIHLPKRVAIIHCPGHQKGNDPVATGNRRADEAAKQAALSTRVLAETTKPAGKRTADGSEFEKRTADGSEFESPKKKAKVE

SEQ ID NO: 6716 - protein, 2091 aa, synthetic construct
MPAAKRVKLDGGDKKYSIGLDIGTNSVGWAVITDEYKVPSKKFKVLGNTDRHSIKKNLIGALLFDSGETAEATRLKRTARRRYTRRKNRICYLQEIFSNEMAKVDDSFFHRLEESFLVEEDKKHERHPIFGNIVDEVAYHEKYPTIYHLRKKLVDSTDKADLRLIYLALAHMIKFRGHFLIEGDLNPDNSDVDKLFIQLVQTYNQLFEENPINASGVDAKAILSARLSKSRRLENLIAQLPGEKKNGLFGNLIALSLGLTPNFKSNFDLAEDAKLQLSKDTYDDDLDNLLAQIGDQYADLFLAAKNLSDAILLSDILRVNTEITKAPLSASMIKRYDEHHQDLTLLKALVRQQLPEKYKEIFFDQSKNGYAGYIDGGASQEEFYKFIKPILEKMDGTEELLVKLNREDLLRKQRTFDNGSIPHQIHLGELHAILRRQEDFYPFLKDNREKIEKILTFRIPYYVGPLARGNSRFAWMTRKSEETITPWNFEEVVDKGASAQSFIERMTNFDKNLPNEKVLPKHSLLYEYFTVYNELTKVKYVTEGMRKPAFLSGEQKKAIVDLLFKTNRKVTVKQLKEDYFKKIECFDSVEISGVEDRFNASLGTYHDLLKIIKDKDFLDNEENEDILEDIVLTLTLFEDREMIEERLKTYAHLFDDKVMKQLKRRRYTGWGRLSRKLINGIRDKQSGKTILDFLKSDGFANRNFMQLIHDDSLTFKEDIQKAQVSGQGDSLHEHIANLAGSPAIKKGILQTVKVVDELVKVMGRHKPENIVIEMARENQTTQKGQKNSRERMKRIEEGIKELGSQILKEHPVENTQLQNEKLYLYYLQNGRDMYVDQELDINRLSDYDVDHIVPQSFLKDDSIDNKVLTRSDKARGKSDNVPSEEVVKKMKNYWRQLLNAKLITQRKFDNLTKAERGGLSELDKAGFIKRQLVETRQITKHVAQILDSRMNTKYDENDKLIREVKVITLKSKLVSDFRKDFQFYKVREINNYHHAHDAYLNAVVGTALIKKYPKLESEFVYGDYKVYDVRKMIAKSEQEIGKATAKYFFYSNIMNFFKTEITLANGEIRKRPLIETNGETGEIVWDKGRDFATVRKVLSMPQVNIVKKTEVQTGGFSKESILPKRNSDKLIARKKDWDPKKYGGFDSPTVAYSVLVVAKVEKGKSKKLKSVKELLGITIMERSSFEKNPIDFLEAKGYKEVKKDLIIKLPKYSLFELENGRKRMLASAGELQKGNELALPSKYVNFLYLASHYEKLKGSPEDNEQKQLFVEQHKHYLDEIIEQISEFSKRVILADANLDKVLSAYNKHRDKPIREQAENIIHLFTLTNLGAPAAFKYFDTTIDRKRYTSTKEVLDATLIHQSITGLYETRIDLSQLGGDGGGGGPAPGGTLNIEDEYRLHETSKEPDVPLGSTWLSDFPQAWAETGGMGLAVRQAPLIIPLKATSTPVSIKQYPMSQEARLGIKPHIQRLLDQGILVPCQSPWNTPLLPVKKPGTNDYRPVQDLREVNKRVEDIHPTVPNPYNLLSGLPPSHQWYTVLDLKDAFFCLRLHPTSQPLFAFEWRDPEMGISGQLTWTRLPQGFKNSPTLFNEALHRDLADFRIQHPDLILLQYVDDLLLAATSEQDCQRGTRALLQTLGNLGYRASAKKAQICQKQVKYLGYLLKEGQRWLTEARKETVMGQPTPKTPRQLREFLGTAGFCRLWIPGFAEMAAPLYPLTKPGTLFNWGPDQQKAYQEIKQALLTAPALGLPDLTKPFELFVDEKQGYAKGVLTQKLGPWRRPVAYLSKKLDPVAAGWPPCLRMVAAIAVLTKDAGKLTMGQPLVILAPHAVEALVKQPPDRWLSNARMTHYQAMLLDTDRVQFGPVVALNPATLLPLPEKEAPHDCLEILAETHGTRPDLTDQPIPDADYTWYTDGSSFLQEGQRRAGAAVTTETEVIWARALPAGTSAQRAELIALTQALKMAEGKKLNVYTDSRYAFATAHVHGEIYRRRGWLTSEGREIKNKNEILALLKALFLPKRLSIIHCPGHQKGNSAEARGNRMADQAAREAAMKAVLETSTLLAGKRTADGSEFEKRTADGSEFESPKKKAKVE

SEQ ID NO: 6717 - protein, 2091 aa, synthetic construct
MPAAKRVKLDGGDKKYSIGLDIGTNSVGWAVITDEYKVPSKKFKVLGNTDRHSIKKNLIGALLFDSGETAEATRLKRTARRRYTRRKNRICYLQEIFSNEMAKVDDSFFHRLEESFLVEEDKKHERHPIFGNIVDEVAYHEKYPTIYHLRKKLVDSTDKADLRLIYLALAHMIKFRGHFLIEGDLNPDNSDVDKLFIQLVQTYNQLFEENPINASGVDAKAILSARLSKSRRLENLIAQLPGEKKNGLFGNLIALSLGLTPNFKSNFDLAEDAKLQLSKDTYDDDLDNLLAQIGDQYADLFLAAKNLSDAILLSDILRVNTEITKAPLSASMIKRYDEHHQDLTLLKALVRQQLPEKYKEIFFDQSKNGYAGYIDGGASQEEFYKFIKPILEKMDGTEELLVKLNREDLLRKQRTFDNGSIPHQIHLGELHAILRRQEDFYPFLKDNREKIEKILTFRIPYYVGPLARGNSRFAWMTRKSEETITPWNFEEVVDKGASAQSFIERMTNFDKNLPNEKVLPKHSLLYEYFTVYNELTKVKYVTEGMRKPAFLSGEQKKAIVDLLFKTNRKVTVKQLKEDYFKKIECFDSVEISGVEDRFNASLGTYHDLLKIIKDKDFLDNEENEDILEDIVLTLTLFEDREMIEERLKTYAHLFDDKVMKQLKRRRYTGWGRLSRKLINGIRDKQSGKTILDFLKSDGFANRNFMQLIHDDSLTFKEDIQKAQVSGQGDSLHEHIANLAGSPAIKKGILQTVKVVDELVKVMGRHKPENIVIEMARENQTTQKGQKNSRERMKRIEEGIKELGSQILKEHPVENTQLQNEKLYLYYLQNGRDMYVDQELDINRLSDYDVDHIVPQSFLKDDSIDNKVLTRSDKARGKSDNVPSEEVVKKMKNYWRQLLNAKLITQRKFDNLTKAERGGLSELDKAGFIKRQLVETRQITKHVAQILDSRMNTKYDENDKLIREVKVITLKSKLVSDFRKDFQFYKVREINNYHHAHDAYLNAVVGTALIKKYPKLESEFVYGDYKVYDVRKMIAKSEQEIGKATAKYFFYSNIMNFFKTEITLANGEIRKRPLIETNGETGEIVWDKGRDFATVRKVLSMPQVNIVKKTEVQTGGFSKESILPKRNSDKLIARKKDWDPKKYGGFDSPTVAYSVLVVAKVEKGKSKKLKSVKELLGITIMERSSFEKNPIDFLEAKGYKEVKKDLIIKLPKYSLFELENGRKRMLASAGELQKGNELALPSKYVNFLYLASHYEKLKGSPEDNEQKQLFVEQHKHYLDEIIEQISEFSKRVILADANLDKVLSAYNKHRDKPIREQAENIIHLFTLTNLGAPAAFKYFDTTIDRKRYTSTKEVLDATLIHQSITGLYETRIDLSQLGGDGGGGGPAPGGTLNIEDEYRLHETSKEPDVPLGSTWLSDFPQAWAETGGMGLAVRQAPLIIPLKATSTPVSIKQYPMSQEARLGIKPHIQRLLDQGILVPCQSPWNTPLLPVKKPGTNDYRPVQDLREVNKRVEDIHPTVPNPYNLLSGLPPSHQWYTVLDLKDAFFCLRLHPTSQPLFAFEWRDPEMGISGQLTWTRLPQGFKNSPTLFNEALHRDLADFRIQHPDLILLQYVDDLLLAATSEQDCQRGTRALLQTLGNLGYRASAKKAQICQKQVKYLGYLLKEGQRWLTEARKETVMGQPTPKTPRQLREFLGKAGFCRLFIPGFAEMAAPLYPLTKPGTLFNWGPDQQKAYQEIKQALLTAPALGLPDLTKPFELFVDEKQGYAKGVLTQKLGPWRRPVAYLSKKLDPVAAGWPPCLRMVAAIAVLTKDAGKLTMGQPLVILAPHAVEALVKQPPDRWLSNARMTHYQAMLLDTDRVQFGPVVALNPATLLPLPEKEAPHDCLEILAETHGTRPDLTDQPIPDADYTWYTDGSSFLQEGQRRAGAAVTTETEVIWARALPAGTSAQRAELIALTQALKMAEGKKLNVYTDSRYAFATAHVHGEIYRRRGWLTSEGREIKNKNEILALLKALFLPKRLSIIHCPGHQKGNSAEARGNRMADQAAREAAMKAVLETSTLLAGKRTADGSEFEKRTADGSEFESPKKKAKVE

SEQ ID NO: 6718 - protein, 2122 aa, synthetic construct
MPAAKRVKLDGGDKKYSIGLDIGTNSVGWAVITDEYKVPSKKFKVLGNTDRHSIKKNLIGALLFDSGETAEATRLKRTARRRYTRRKNRICYLQEIFSNEMAKVDDSFFHRLEESFLVEEDKKHERHPIFGNIVDEVAYHEKYPTIYHLRKKLVDSTDKADLRLIYLALAHMIKFRGHFLIEGDLNPDNSDVDKLFIQLVQTYNQLFEENPINASGVDAKAILSARLSKSRRLENLIAQLPGEKKNGLFGNLIALSLGLTPNFKSNFDLAEDAKLQLSKDTYDDDLDNLLAQIGDQYADLFLAAKNLSDAILLSDILRVNTEITKAPLSASMIKRYDEHHQDLTLLKALVRQQLPEKYKEIFFDQSKNGYAGYIDGGASQEEFYKFIKPILEKMDGTEELLVKLNREDLLRKQRTFDNGSIPHQIHLGELHAILRRQEDFYPFLKDNREKIEKILTFRIPYYVGPLARGNSRFAWMTRKSEETITPWNFEEVVDKGASAQSFIERMTNFDKNLPNEKVLPKHSLLYEYFTVYNELTKVKYVTEGMRKPAFLSGEQKKAIVDLLFKTNRKVTVKQLKEDYFKKIECFDSVEISGVEDRFNASLGTYHDLLKIIKDKDFLDNEENEDILEDIVLTLTLFEDREMIEERLKTYAHLFDDKVMKQLKRRRYTGWGRLSRKLINGIRDKQSGKTILDFLKSDGFANRNFMQLIHDDSLTFKEDIQKAQVSGQGDSLHEHIANLAGSPAIKKGILQTVKVVDELVKVMGRHKPENIVIEMARENQTTQKGQKNSRERMKRIEEGIKELGSQILKEHPVENTQLQNEKLYLYYLQNGRDMYVDQELDINRLSDYDVDHIVPQSFLKDDSIDNKVLTRSDKARGKSDNVPSEEVVKKMKNYWRQLLNAKLITQRKFDNLTKAERGGLSELDKAGFIKRQLVETRQITKHVAQILDSRMNTKYDENDKLIREVKVITLKSKLVSDFRKDFQFYKVREINNYHHAHDAYLNAVVGTALIKKYPKLESEFVYGDYKVYDVRKMIAKSEQEIGKATAKYFFYSNIMNFFKTEITLANGEIRKRPLIETNGETGEIVWDKGRDFATVRKVLSMPQVNIVKKTEVQTGGFSKESILPKRNSDKLIARKKDWDPKKYGGFDSPTVAYSVLVVAKVEKGKSKKLKSVKELLGITIMERSSFEKNPIDFLEAKGYKEVKKDLIIKLPKYSLFELENGRKRMLASAGELQKGNELALPSKYVNFLYLASHYEKLKGSPEDNEQKQLFVEQHKHYLDEIIEQISEFSKRVILADANLDKVLSAYNKHRDKPIREQAENIIHLFTLTNLGAPAAFKYFDTTIDRKRYTSTKEVLDATLIHQSITGLYETRIDLSQLGGDGGPAPGGGGGLLGRDLLTKLKAQIQFSTEGPQVTWEDRPAMCLVLNLEEEYRLHEKPVPPSIDPSWLQLFPMVWAEKAGMGLANQVPPVVVELKSDASPVAVRQYPMSKEAREGIRPHIQRFLDLGILVPCQSPWNTPLLPVKKPGTNDYRPVQDLREVNKRVQDIHPTVPNPYNLLSSLPPSHTWYSVLDLKDAFFCLKLHPNSQPLFAFEWRDPEKGNTGQLTWTRLPQGFKNSPTLFNEALHRDLASFRALNPQVVMLQYVDDLLVAAPTYRDCKEGTRRLLQELSKLGYRVSAKKAQLCREEVTYLGYLLKGGKRWLTPARKATVMKIPTPTTPRQVREFLGTAGFCRLWIPGFASLAAPLYPLTRPKVPFTWTEAHQEAFGRIKEALLSAPALALPDLTKPFALYVDEKEGVARGVLTQTLGPWRRPVAYLSKKLDPVASGWPTCLKAIAAVALLLKDADKLTLGQNVLVIAPHNLESIVRQPPDRWMTNARMTHYQSLLLNERVSFAPPAILNPATLLPVESDDTPIHICSEILAEETGTRPDLRDQPLPGVPAWYTDGSSFIMDGRRQAGAAIVDNKRTVWASNLPEGTSAQKAELIALTQALRLAEGKSINIYTDSRYAFATAHVHGAIYKQRGWLTSAGKDIKNKEEILALLEAIHLPKRVAIIHCPGHQRGTDPVATGNRKADEAAKQAAQSTRILTETTKNAGKRTADGSEFEKRTADGSEFESPKKKAKVE

SEQ ID NO: 6719 - protein, 2122 aa, synthetic construct
MPAAKRVKLDGGDKKYSIGLDIGTNSVGWAVITDEYKVPSKKFKVLGNTDRHSIKKNLIGALLFDSGETAEATRLKRTARRRYTRRKNRICYLQEIFSNEMAKVDDSFFHRLEESFLVEEDKKHERHPIFGNIVDEVAYHEKYPTIYHLRKKLVDSTDKADLRLIYLALAHMIKFRGHFLIEGDLNPDNSDVDKLFIQLVQTYNQLFEENPINASGVDAKAILSARLSKSRRLENLIAQLPGEKKNGLFGNLIALSLGLTPNFKSNFDLAEDAKLQLSKDTYDDDLDNLLAQIGDQYADLFLAAKNLSDAILLSDILRVNTEITKAPLSASMIKRYDEHHQDLTLLKALVRQQLPEKYKEIFFDQSKNGYAGYIDGGASQEEFYKFIKPILEKMDGTEELLVKLNREDLLRKQRTFDNGSIPHQIHLGELHAILRRQEDFYPFLKDNREKIEKILTFRIPYYVGPLARGNSRFAWMTRKSEETITPWNFEEVVDKGASAQSFIERMTNFDKNLPNEKVLPKHSLLYEYFTVYNELTKVKYVTEGMRKPAFLSGEQKKAIVDLLFKTNRKVTVKQLKEDYFKKIECFDSVEISGVEDRFNASLGTYHDLLKIIKDKDFLDNEENEDILEDIVLTLTLFEDREMIEERLKTYAHLFDDKVMKQLKRRRYTGWGRLSRKLINGIRDKQSGKTILDFLKSDGFANRNFMQLIHDDSLTFKEDIQKAQVSGQGDSLHEHIANLAGSPAIKKGILQTVKVVDELVKVMGRHKPENIVIEMARENQTTQKGQKNSRERMKRIEEGIKELGSQILKEHPVENTQLQNEKLYLYYLQNGRDMYVDQELDINRLSDYDVDHIVPQSFLKDDSIDNKVLTRSDKARGKSDNVPSEEVVKKMKNYWRQLLNAKLITQRKFDNLTKAERGGLSELDKAGFIKRQLVETRQITKHVAQILDSRMNTKYDENDKLIREVKVITLKSKLVSDFRKDFQFYKVREINNYHHAHDAYLNAVVGTALIKKYPKLESEFVYGDYKVYDVRKMIAKSEQEIGKATAKYFFYSNIMNFFKTEITLANGEIRKRPLIETNGETGEIVWDKGRDFATVRKVLSMPQVNIVKKTEVQTGGFSKESILPKRNSDKLIARKKDWDPKKYGGFDSPTVAYSVLVVAKVEKGKSKKLKSVKELLGITIMERSSFEKNPIDFLEAKGYKEVKKDLIIKLPKYSLFELENGRKRMLASAGELQKGNELALPSKYVNFLYLASHYEKLKGSPEDNEQKQLFVEQHKHYLDEIIEQISEFSKRVILADANLDKVLSAYNKHRDKPIREQAENIIHLFTLTNLGAPAAFKYFDTTIDRKRYTSTKEVLDATLIHQSITGLYETRIDLSQLGGDGGPAPGGGGGLLGRDLLTKLKAQIQFSTEGPQVTWEDRPAMCLVLNLEEEYRLHEKPVPPSIDPSWLQLFPMVWAEKAGMGLANQVPPVVVELKSDASPVAVRQYPMSKEAREGIRPHIQRFLDLGILVPCQSPWNTPLLPVKKPGTNDYRPVQDLREVNKRVQDIHPTVPNPYNLLSSLPPSHTWYSVLDLKDAFFCLKLHPNSQPLFAFEWRDPEKGNTGQLTWTRLPQGFKNSPTLFNEALHRDLASFRALNPQVVMLQYVDDLLVAAPTYRDCKEGTRRLLQELSKLGYRVSAKKAQLCREEVTYLGYLLKGGKRWLTPARKATVMKIPTPTTPRQVREFLGKAGFCRLFIPGFASLAAPLYPLTRPKVPFTWTEAHQEAFGRIKEALLSAPALALPDLTKPFALYVDEKEGVARGVLTQTLGPWRRPVAYLSKKLDPVASGWPTCLKAIAAVALLLKDADKLTLGQNVLVIAPHNLESIVRQPPDRWMTNARMTHYQSLLLNERVSFAPPAILNPATLLPVESDDTPIHICSEILAEETGTRPDLRDQPLPGVPAWYTDGSSFIMDGRRQAGAAIVDNKRTVWASNLPEGTSAQKAELIALTQALRLAEGKSINIYTDSRYAFATAHVHGAIYKQRGWLTSAGKDIKNKEEILALLEAIHLPKRVAIIHCPGHQRGTDPVATGNRKADEAAKQAAQSTRILTETTKNAGKRTADGSEFEKRTADGSEFESPKKKAKVE

SEQ ID NO: 6720 - protein, 2213 aa, synthetic construct
MPAAKRVKLDGGDKKYSIGLDIGTNSVGWAVITDEYKVPSKKFKVLGNTDRHSIKKNLIGALLFDSGETAEATRLKRTARRRYTRRKNRICYLQEIFSNEMAKVDDSFFHRLEESFLVEEDKKHERHPIFGNIVDEVAYHEKYPTIYHLRKKLVDSTDKADLRLIYLALAHMIKFRGHFLIEGDLNPDNSDVDKLFIQLVQTYNQLFEENPINASGVDAKAILSARLSKSRRLENLIAQLPGEKKNGLFGNLIALSLGLTPNFKSNFDLAEDAKLQLSKDTYDDDLDNLLAQIGDQYADLFLAAKNLSDAILLSDILRVNTEITKAPLSASMIKRYDEHHQDLTLLKALVRQQLPEKYKEIFFDQSKNGYAGYIDGGASQEEFYKFIKPILEKMDGTEELLVKLNREDLLRKQRTFDNGSIPHQIHLGELHAILRRQEDFYPFLKDNREKIEKILTFRIPYYVGPLARGNSRFAWMTRKSEETITPWNFEEVVDKGASAQSFIERMTNFDKNLPNEKVLPKHSLLYEYFTVYNELTKVKYVTEGMRKPAFLSGEQKKAIVDLLFKTNRKVTVKQLKEDYFKKIECFDSVEISGVEDRFNASLGTYHDLLKIIKDKDFLDNEENEDILEDIVLTLTLFEDREMIEERLKTYAHLFDDKVMKQLKRRRYTGWGRLSRKLINGIRDKQSGKTILDFLKSDGFANRNFMQLIHDDSLTFKEDIQKAQVSGQGDSLHEHIANLAGSPAIKKGILQTVKVVDELVKVMGRHKPENIVIEMARENQTTQKGQKNSRERMKRIEEGIKELGSQILKEHPVENTQLQNEKLYLYYLQNGRDMYVDQELDINRLSDYDVDHIVPQSFLKDDSIDNKVLTRSDKARGKSDNVPSEEVVKKMKNYWRQLLNAKLITQRKFDNLTKAERGGLSELDKAGFIKRQLVETRQITKHVAQILDSRMNTKYDENDKLIREVKVITLKSKLVSDFRKDFQFYKVREINNYHHAHDAYLNAVVGTALIKKYPKLESEFVYGDYKVYDVRKMIAKSEQEIGKATAKYFFYSNIMNFFKTEITLANGEIRKRPLIETNGETGEIVWDKGRDFATVRKVLSMPQVNIVKKTEVQTGGFSKESILPKRNSDKLIARKKDWDPKKYGGFDSPTVAYSVLVVAKVEKGKSKKLKSVKELLGITIMERSSFEKNPIDFLEAKGYKEVKKDLIIKLPKYSLFELENGRKRMLASAGELQKGNELALPSKYVNFLYLASHYEKLKGSPEDNEQKQLFVEQHKHYLDEIIEQISEFSKRVILADANLDKVLSAYNKHRDKPIREQAENIIHLFTLTNLGAPAAFKYFDTTIDRKRYTSTKEVLDATLIHQSITGLYETRIDLSQLGGDGGPAPGGGGGTLGDQGSRGSDPLPEPRVTLTVEGIPTEFLVNTGAEHSVLTKPMGKMGSKRTVVAGATGSKVYPWTTKRLLKIGQKQVTHSFLVIPECPAPLLGRDLLTKLKAQIQFSTEGPQVTWEDRPAMCLVLNLEEEYRLHEKPVPPSIDPSWLQLFPMVWAEKAGMGLANQVPPVVVELKSDASPVAVRQYPMSKEAREGIRPHIQRFLDLGILVPCQSPWNTPLLPVKKPGTNDYRPVQDLREVNKRVQDIHPTVPNPYNLLSSLPPSHTWYSVLDLKDAFFCLKLHPNSQPLFAFEWRDPEKGNTGQLTWTRLPQGFKNSPTLFNEALHRDLASFRALNPQVVMLQYVDDLLVAAPTYRDCKEGTRRLLQELSKLGYRVSAKKAQLCREEVTYLGYLLKGGKRWLTPARKATVMKIPTPTTPRQVREFLGTAGFCRLWIPGFASLAAPLYPLTRPKVPFTWTEAHQEAFGRIKEALLSAPALALPDLTKPFALYVDEKEGVARGVLTQTLGPWRRPVAYLSKKLDPVASGWPTCLKAIAAVALLLKDADKLTLGQNVLVIAPHNLESIVRQPPDRWMTNARMTHYQSLLLNERVSFAPPAILNPATLLPVESDDTPIHICSEILAEETGTRPDLRDQPLPGVPAWYTDGSSFIMDGRRQAGAAIVDNKRTVWASNLPEGTSAQKAELIALTQALRLAEGKSINIYTDSRYAFATAHVHGAIYKQRGWLTSAGKDIKNKEEILALLEAIHLPKRVAIIHCPGHQRGTDPVATGNRKADEAAKQAAQSTRILTETTKNAGKRTADGSEFEKRTADGSEFESPKKKAKVE

SEQ ID NO: 6721 - protein, 2091 aa, synthetic construct
MPAAKRVKLDGGDKKYSIGLDIGTNSVGWAVITDEYKVPSKKFKVLGNTDRHSIKKNLIGALLFDSGETAEATRLKRTARRRYTRRKNRICYLQEIFSNEMAKVDDSFFHRLEESFLVEEDKKHERHPIFGNIVDEVAYHEKYPTIYHLRKKLVDSTDKADLRLIYLALAHMIKFRGHFLIEGDLNPDNSDVDKLFIQLVQTYNQLFEENPINASGVDAKAILSARLSKSRRLENLIAQLPGEKKNGLFGNLIALSLGLTPNFKSNFDLAEDAKLQLSKDTYDDDLDNLLAQIGDQYADLFLAAKNLSDAILLSDILRVNTEITKAPLSASMIKRYDEHHQDLTLLKALVRQQLPEKYKEIFFDQSKNGYAGYIDGGASQEEFYKFIKPILEKMDGTEELLVKLNREDLLRKQRTFDNGSIPHQIHLGELHAILRRQEDFYPFLKDNREKIEKILTFRIPYYVGPLARGNSRFAWMTRKSEETITPWNFEEVVDKGASAQSFIERMTNFDKNLPNEKVLPKHSLLYEYFTVYNELTKVKYVTEGMRKPAFLSGEQKKAIVDLLFKTNRKVTVKQLKEDYFKKIECFDSVEISGVEDRFNASLGTYHDLLKIIKDKDFLDNEENEDILEDIVLTLTLFEDREMIEERLKTYAHLFDDKVMKQLKRRRYTGWGRLSRKLINGIRDKQSGKTILDFLKSDGFANRNFMQLIHDDSLTFKEDIQKAQVSGQGDSLHEHIANLAGSPAIKKGILQTVKVVDELVKVMGRHKPENIVIEMARENQTTQKGQKNSRERMKRIEEGIKELGSQILKEHPVENTQLQNEKLYLYYLQNGRDMYVDQELDINRLSDYDVDHIVPQSFLKDDSIDNKVLTRSDKARGKSDNVPSEEVVKKMKNYWRQLLNAKLITQRKFDNLTKAERGGLSELDKAGFIKRQLVETRQITKHVAQILDSRMNTKYDENDKLIREVKVITLKSKLVSDFRKDFQFYKVREINNYHHAHDAYLNAVVGTALIKKYPKLESEFVYGDYKVYDVRKMIAKSEQEIGKATAKYFFYSNIMNFFKTEITLANGEIRKRPLIETNGETGEIVWDKGRDFATVRKVLSMPQVNIVKKTEVQTGGFSKESILPKRNSDKLIARKKDWDPKKYGGFDSPTVAYSVLVVAKVEKGKSKKLKSVKELLGITIMERSSFEKNPIDFLEAKGYKEVKKDLIIKLPKYSLFELENGRKRMLASAGELQKGNELALPSKYVNFLYLASHYEKLKGSPEDNEQKQLFVEQHKHYLDEIIEQISEFSKRVILADANLDKVLSAYNKHRDKPIREQAENIIHLFTLTNLGAPAAFKYFDTTIDRKRYTSTKEVLDATLIHQSITGLYETRIDLSQLGGDGGPAPGGGGGTLGIEDEYRLHETSTEPDVSLGSTWLSDFPQAWAETGGMGLAVRQAPLIIPLKATSTPVSIQQYPMSHEARLGIKPHIQRLLDQGILVPCQSPWNTPLLPVKKPGTNDYRPVQDLREVNKRVEDIHPTVPNPYNLLSGLPPSHQWYTVLDLKDAFFCLRLHPTSQPLFAFEWRDPGMGISGQLTWTRLPQGFKNSPTLFNEALHRDLADFRIQHPDLILLQYVDDILLAATSELDCQQGTRALLQTLGDLGYRASAKKAQICQKQVKYLGYLLREGQRWLTEARKETVMGQPVPKTPRQLREFLGTAGFCRLWIPGFAEMAAPLYPLTKPGTLFSWGPDQQKAYQEIKQALLTAPALGLPDLTKPFELFVDEKQGYAKGVLTQKLGPWRRPVAYLSKKLDPVAAGWPPCLRMVAAIAVLTKDAGKLTMGQPLVILAPHAVEALVKQPPDRWLSNARMTHYQAMLLDTDRVQFGPVVALNPATLLPLPEEGAPHDCLEILAETHGTRPDLTDQPIPDADHTWYTDGSSFLQEGQRKAGAAVTTETEVIWAGALPAGTSAQRAELIALTQALKMAEGKRLNVYTDSRYAFATAHIHGEIYRRRGWLTSEGREIKNKSEILALLKALFLPKRLSIIHCLGHQKGDSAEARGNRLADQAAREAAIKTPPDTSTLLAGKRTADGSEFEKRTADGSEFESPKKKAKVE

SEQ ID NO: 6722 - protein, 2085 aa, synthetic construct
MPAAKRVKLDGGDKKYSIGLDIGTNSVGWAVITDEYKVPSKKFKVLGNTDRHSIKKNLIGALLFDSGETAEATRLKRTARRRYTRRKNRICYLQEIFSNEMAKVDDSFFHRLEESFLVEEDKKHERHPIFGNIVDEVAYHEKYPTIYHLRKKLVDSTDKADLRLIYLALAHMIKFRGHFLIEGDLNPDNSDVDKLFIQLVQTYNQLFEENPINASGVDAKAILSARLSKSRRLENLIAQLPGEKKNGLFGNLIALSLGLTPNFKSNFDLAEDAKLQLSKDTYDDDLDNLLAQIGDQYADLFLAAKNLSDAILLSDILRVNTEITKAPLSASMIKRYDEHHQDLTLLKALVRQQLPEKYKEIFFDQSKNGYAGYIDGGASQEEFYKFIKPILEKMDGTEELLVKLNREDLLRKQRTFDNGSIPHQIHLGELHAILRRQEDFYPFLKDNREKIEKILTFRIPYYVGPLARGNSRFAWMTRKSEETITPWNFEEVVDKGASAQSFIERMTNFDKNLPNEKVLPKHSLLYEYFTVYNELTKVKYVTEGMRKPAFLSGEQKKAIVDLLFKTNRKVTVKQLKEDYFKKIECFDSVEISGVEDRFNASLGTYHDLLKIIKDKDFLDNEENEDILEDIVLTLTLFEDREMIEERLKTYAHLFDDKVMKQLKRRRYTGWGRLSRKLINGIRDKQSGKTILDFLKSDGFANRNFMQLIHDDSLTFKEDIQKAQVSGQGDSLHEHIANLAGSPAIKKGILQTVKVVDELVKVMGRHKPENIVIEMARENQTTQKGQKNSRERMKRIEEGIKELGSQILKEHPVENTQLQNEKLYLYYLQNGRDMYVDQELDINRLSDYDVDHIVPQSFLKDDSIDNKVLTRSDKARGKSDNVPSEEVVKKMKNYWRQLLNAKLITQRKFDNLTKAERGGLSELDKAGFIKRQLVETRQITKHVAQILDSRMNTKYDENDKLIREVKVITLKSKLVSDFRKDFQFYKVREINNYHHAHDAYLNAVVGTALIKKYPKLESEFVYGDYKVYDVRKMIAKSEQEIGKATAKYFFYSNIMNFFKTEITLANGEIRKRPLIETNGETGEIVWDKGRDFATVRKVLSMPQVNIVKKTEVQTGGFSKESILPKRNSDKLIARKKDWDPKKYGGFDSPTVAYSVLVVAKVEKGKSKKLKSVKELLGITIMERSSFEKNPIDFLEAKGYKEVKKDLIIKLPKYSLFELENGRKRMLASAGELQKGNELALPSKYVNFLYLASHYEKLKGSPEDNEQKQLFVEQHKHYLDEIIEQISEFSKRVILADANLDKVLSAYNKHRDKPIREQAENIIHLFTLTNLGAPAAFKYFDTTIDRKRYTSTKEVLDATLIHQSITGLYETRIDLSQLGGDGGPAPGGGGGTLQLDDEYRLYSPLVKPDQNIQFWLEQFPQAWAETAGMGLAKQVPPQVIQLKASATPVSVRQYPLSKEAQEGIRPHVQRLIQQGILVPVQSPWNTPLLPVRKPGTNDYRPVQDLREVNKRVQDIHPTVPNPYNLLCALPPQRSWYTVLDLKDAFFCLRLHPTSQPLFAFEWRDPGTGRTGQLTWTRLPQGFKNSPTIFDEALHRDLANFRIQHPQVTLLQYVDDLLLAGATKQDCLEGTKALLLELSDLGYRASAKKAQICRREVTYLGYSLRDGQRWLTEARKKTVVQIPAPTTAKQVREFLGTAGFCRLWIPGFATLAAPLYPLTKEKGEFSWAPEHQKAFDAIKKALLSAPALALPDVTKPFTLYVDERKGVARGVLTQTLGPWRRPVAYLSKKLDPVASGWPVCLKAIAAVAILVKDADKLTLGQNITVIAPHALENIVRQPPDRWMTNARMTHYQSLLLTERVTFAPPAALNPATLLPEETDEPVTHDCHQLLIEETGVRKDLTDIPLTGEVLTWFTDGSSYVVEGKRMAGAAVVDGTRTIWASSLPEGTSAQKAELMALTQALRLAEGKSINIYTDSRYAFATAHVHGAIYKQRGLLTSAGREIKNKEEILSLLEALHLPKRLAIIHCPGHQKAKDPISRGNQMADRVAKQAAQGVNLLAGKRTADGSEFEKRTADGSEFESPKKKAKVE

SEQ ID NO: 6723 - protein, 2082 aa, synthetic construct
MPAAKRVKLDGGDKKYSIGLDIGTNSVGWAVITDEYKVPSKKFKVLGNTDRHSIKKNLIGALLFDSGETAEATRLKRTARRRYTRRKNRICYLQEIFSNEMAKVDDSFFHRLEESFLVEEDKKHERHPIFGNIVDEVAYHEKYPTIYHLRKKLVDSTDKADLRLIYLALAHMIKFRGHFLIEGDLNPDNSDVDKLFIQLVQTYNQLFEENPINASGVDAKAILSARLSKSRRLENLIAQLPGEKKNGLFGNLIALSLGLTPNFKSNFDLAEDAKLQLSKDTYDDDLDNLLAQIGDQYADLFLAAKNLSDAILLSDILRVNTEITKAPLSASMIKRYDEHHQDLTLLKALVRQQLPEKYKEIFFDQSKNGYAGYIDGGASQEEFYKFIKPILEKMDGTEELLVKLNREDLLRKQRTFDNGSIPHQIHLGELHAILRRQEDFYPFLKDNREKIEKILTFRIPYYVGPLARGNSRFAWMTRKSEETITPWNFEEVVDKGASAQSFIERMTNFDKNLPNEKVLPKHSLLYEYFTVYNELTKVKYVTEGMRKPAFLSGEQKKAIVDLLFKTNRKVTVKQLKEDYFKKIECFDSVEISGVEDRFNASLGTYHDLLKIIKDKDFLDNEENEDILEDIVLTLTLFEDREMIEERLKTYAHLFDDKVMKQLKRRRYTGWGRLSRKLINGIRDKQSGKTILDFLKSDGFANRNFMQLIHDDSLTFKEDIQKAQVSGQGDSLHEHIANLAGSPAIKKGILQTVKVVDELVKVMGRHKPENIVIEMARENQTTQKGQKNSRERMKRIEEGIKELGSQILKEHPVENTQLQNEKLYLYYLQNGRDMYVDQELDINRLSDYDVDHIVPQSFLKDDSIDNKVLTRSDKARGKSDNVPSEEVVKKMKNYWRQLLNAKLITQRKFDNLTKAERGGLSELDKAGFIKRQLVETRQITKHVAQILDSRMNTKYDENDKLIREVKVITLKSKLVSDFRKDFQFYKVREINNYHHAHDAYLNAVVGTALIKKYPKLESEFVYGDYKVYDVRKMIAKSEQEIGKATAKYFFYSNIMNFFKTEITLANGEIRKRPLIETNGETGEIVWDKGRDFATVRKVLSMPQVNIVKKTEVQTGGFSKESILPKRNSDKLIARKKDWDPKKYGGFDSPTVAYSVLVVAKVEKGKSKKLKSVKELLGITIMERSSFEKNPIDFLEAKGYKEVKKDLIIKLPKYSLFELENGRKRMLASAGELQKGNELALPSKYVNFLYLASHYEKLKGSPEDNEQKQLFVEQHKHYLDEIIEQISEFSKRVILADANLDKVLSAYNKHRDKPIREQAENIIHLFTLTNLGAPAAFKYFDTTIDRKRYTSTKEVLDATLIHQSITGLYETRIDLSQLGGDGGPAPGGGGGIPWLMKKPLQLTTLVPLQEYEERLLKQTMLTGSYKEKLQSLFLKYDALWQHWENQVGHRRIKPHHIATGTVNPRPQKQYPINPKAKASIQTVINDLLKQGVLIQQNSIMNTPVYPVPKPDGKWRMVLDYREVNKTIPLIAAQNQHSAGILSSIFRGKYKTTLDLSNGFWAHSITPESYWLTAFTWLGQQYCWTRLPQGFLNSPALFNADVVDLLKEVPNVQVYVDDIYISHDDPREHLEQLEKVFSLLLNAGYVVSLKKSEIAQHEVEFLGFNITKEGRGLTETFKQKLLNITPPRDLKQLQSILGLLNFARNFIPNFSELVKPLYNIIATAPGKYITWTTDNSQQLQNIISMLNSAENLEERNPEVRLIMKVNTSPSAGYIRFYNEFAKRPIMYLNYVYTKAEVKFTNTEKLLTTIHKGLIKALDLGMGQEILVYSPIVSMTKIQKTPLPERKALPIRWITWMSYLEDPRIQFHYDKTLPELQQVPTVTDDIIAKIKHPSEFSMVFYTDGSAIKHPNVNKSHNAGMGIAQVQFKPEFTVINTWSIPLGDHTAQLAEVAAVEFACKKALKIDGPVLIVTDSFYVAESVNKELPYWQSNGFFNNKKKPLKHVSKWKSIADCIQLKPDIIIIHEKGHQPTASTFHTEGNNLADKLATQGSYVVNAGKRTADGSEFEKRTADGSEFESPKKKAKVE

SEQ ID NO: 6724 - protein, 2082 aa, synthetic construct
MPAAKRVKLDGGDKKYSIGLDIGTNSVGWAVITDEYKVPSKKFKVLGNTDRHSIKKNLIGALLFDSGETAEATRLKRTARRRYTRRKNRICYLQEIFSNEMAKVDDSFFHRLEESFLVEEDKKHERHPIFGNIVDEVAYHEKYPTIYHLRKKLVDSTDKADLRLIYLALAHMIKFRGHFLIEGDLNPDNSDVDKLFIQLVQTYNQLFEENPINASGVDAKAILSARLSKSRRLENLIAQLPGEKKNGLFGNLIALSLGLTPNFKSNFDLAEDAKLQLSKDTYDDDLDNLLAQIGDQYADLFLAAKNLSDAILLSDILRVNTEITKAPLSASMIKRYDEHHQDLTLLKALVRQQLPEKYKEIFFDQSKNGYAGYIDGGASQEEFYKFIKPILEKMDGTEELLVKLNREDLLRKQRTFDNGSIPHQIHLGELHAILRRQEDFYPFLKDNREKIEKILTFRIPYYVGPLARGNSRFAWMTRKSEETITPWNFEEVVDKGASAQSFIERMTNFDKNLPNEKVLPKHSLLYEYFTVYNELTKVKYVTEGMRKPAFLSGEQKKAIVDLLFKTNRKVTVKQLKEDYFKKIECFDSVEISGVEDRFNASLGTYHDLLKIIKDKDFLDNEENEDILEDIVLTLTLFEDREMIEERLKTYAHLFDDKVMKQLKRRRYTGWGRLSRKLINGIRDKQSGKTILDFLKSDGFANRNFMQLIHDDSLTFKEDIQKAQVSGQGDSLHEHIANLAGSPAIKKGILQTVKVVDELVKVMGRHKPENIVIEMARENQTTQKGQKNSRERMKRIEEGIKELGSQILKEHPVENTQLQNEKLYLYYLQNGRDMYVDQELDINRLSDYDVDHIVPQSFLKDDSIDNKVLTRSDKARGKSDNVPSEEVVKKMKNYWRQLLNAKLITQRKFDNLTKAERGGLSELDKAGFIKRQLVETRQITKHVAQILDSRMNTKYDENDKLIREVKVITLKSKLVSDFRKDFQFYKVREINNYHHAHDAYLNAVVGTALIKKYPKLESEFVYGDYKVYDVRKMIAKSEQEIGKATAKYFFYSNIMNFFKTEITLANGEIRKRPLIETNGETGEIVWDKGRDFATVRKVLSMPQVNIVKKTEVQTGGFSKESILPKRNSDKLIARKKDWDPKKYGGFDSPTVAYSVLVVAKVEKGKSKKLKSVKELLGITIMERSSFEKNPIDFLEAKGYKEVKKDLIIKLPKYSLFELENGRKRMLASAGELQKGNELALPSKYVNFLYLASHYEKLKGSPEDNEQKQLFVEQHKHYLDEIIEQISEFSKRVILADANLDKVLSAYNKHRDKPIREQAENIIHLFTLTNLGAPAAFKYFDTTIDRKRYTSTKEVLDATLIHQSITGLYETRIDLSQLGGDGGPAPGGGGGIPWLMKKPLQLTTLVPLQEYEERLLKQTMLTGSYKEKLQSLFLKYDALWQHWENQVGHRRIKPHHIATGTVNPRPQKQYPINPKAKASIQTVINDLLKQGVLIQQNSIMNTPVYPVPKPDGKWRMVLDYREVNKTIPLIAAQNQHSAGILSSIFRGKYKTTLDLSNGFWAHSITPESYWLTAFTWLGQQYCWTRLPQGFLNSPALFNADVVDLLKEVPNVQVYVDDIYISHDDPREHLEQLEKVFSLLLNAGYVVSLKKSEIAQHEVEFLGFNITKEGRGLTETFKQKLLNITPPRDLKQLQSILGKLNFARNFIPNFSELVKPLYNIIATAPGKYITWTTDNSQQLQNIISMLNSAENLEERNPEVRLIMKVNTSPSAGYIRFYNEFAKRPIMYLNYVYTKAEVKFTNTEKLLTTIHKGLIKALDLGMGQEILVYSPIVSMTKIQKTPLPERKALPIRWITWMSYLEDPRIQFHYDKTLPELQQVPTVTDDIIAKIKHPSEFSMVFYTDGSAIKHPNVNKSHNAGMGIAQVQFKPEFTVINTWSIPLGDHTAQLAEVAAVEFACKKALKIDGPVLIVTDSFYVAESVNKELPYWQSNGFFNNKKKPLKHVSKWKSIADCIQLKPDIIIIHEKGHQPTASTFHTEGNNLADKLATQGSYVVNAGKRTADGSEFEKRTADGSEFESPKKKAKVE

SEQ ID NO: 6725 - protein, 2091 aa, synthetic construct
MPAAKRVKLDGGDKKYSIGLDIGTNSVGWAVITDEYKVPSKKFKVLGNTDRHSIKKNLIGALLFDSGETAEATRLKRTARRRYTRRKNRICYLQEIFSNEMAKVDDSFFHRLEESFLVEEDKKHERHPIFGNIVDEVAYHEKYPTIYHLRKKLVDSTDKADLRLIYLALAHMIKFRGHFLIEGDLNPDNSDVDKLFIQLVQTYNQLFEENPINASGVDAKAILSARLSKSRRLENLIAQLPGEKKNGLFGNLIALSLGLTPNFKSNFDLAEDAKLQLSKDTYDDDLDNLLAQIGDQYADLFLAAKNLSDAILLSDILRVNTEITKAPLSASMIKRYDEHHQDLTLLKALVRQQLPEKYKEIFFDQSKNGYAGYIDGGASQEEFYKFIKPILEKMDGTEELLVKLNREDLLRKQRTFDNGSIPHQIHLGELHAILRRQEDFYPFLKDNREKIEKILTFRIPYYVGPLARGNSRFAWMTRKSEETITPWNFEEVVDKGASAQSFIERMTNFDKNLPNEKVLPKHSLLYEYFTVYNELTKVKYVTEGMRKPAFLSGEQKKAIVDLLFKTNRKVTVKQLKEDYFKKIECFDSVEISGVEDRFNASLGTYHDLLKIIKDKDFLDNEENEDILEDIVLTLTLFEDREMIEERLKTYAHLFDDKVMKQLKRRRYTGWGRLSRKLINGIRDKQSGKTILDFLKSDGFANRNFMQLIHDDSLTFKEDIQKAQVSGQGDSLHEHIANLAGSPAIKKGILQTVKVVDELVKVMGRHKPENIVIEMARENQTTQKGQKNSRERMKRIEEGIKELGSQILKEHPVENTQLQNEKLYLYYLQNGRDMYVDQELDINRLSDYDVDHIVPQSFLKDDSIDNKVLTRSDKARGKSDNVPSEEVVKKMKNYWRQLLNAKLITQRKFDNLTKAERGGLSELDKAGFIKRQLVETRQITKHVAQILDSRMNTKYDENDKLIREVKVITLKSKLVSDFRKDFQFYKVREINNYHHAHDAYLNAVVGTALIKKYPKLESEFVYGDYKVYDVRKMIAKSEQEIGKATAKYFFYSNIMNFFKTEITLANGEIRKRPLIETNGETGEIVWDKGRDFATVRKVLSMPQVNIVKKTEVQTGGFSKESILPKRNSDKLIARKKDWDPKKYGGFDSPTVAYSVLVVAKVEKGKSKKLKSVKELLGITIMERSSFEKNPIDFLEAKGYKEVKKDLIIKLPKYSLFELENGRKRMLASAGELQKGNELALPSKYVNFLYLASHYEKLKGSPEDNEQKQLFVEQHKHYLDEIIEQISEFSKRVILADANLDKVLSAYNKHRDKPIREQAENIIHLFTLTNLGAPAAFKYFDTTIDRKRYTSTKEVLDATLIHQSITGLYETRIDLSQLGGDGGPAPGGGGGTLNIEDEYRLHETSKEPDVPLGSTWLSDFPQAWAETGGMGLAVRQAPLIIPLKATSTPVSIKQYPMSQEARLGIKPHIQRLLDQGILVPCQSPWNTPLLPVKKPGTNDYRPVQDLREVNKRVEDIHPTVPNPYNLLSGLPPSHQWYTVLDLKDAFFCLRLHPTSQPLFAFEWRDPEMGISGQLTWTRLPQGFKNSPTLFNEALHRDLADFRIQHPDLILLQYVDDLLLAATSEQDCQRGTRALLQTLGNLGYRASAKKAQICQKQVKYLGYLLKEGQRWLTEARKETVMGQPTPKTPRQLREFLGTAGFCRLWIPGFAEMAAPLYPLTKPGTLFNWGPDQQKAYQEIKQALLTAPALGLPDLTKPFELFVDEKQGYAKGVLTQKLGPWRRPVAYLSKKLDPVAAGWPPCLRMVAAIAVLTKDAGKLTMGQPLVILAPHAVEALVKQPPDRWLSNARMTHYQAMLLDTDRVQFGPVVALNPATLLPLPEKEAPHDCLEILAETHGTRPDLTDQPIPDADYTWYTDGSSFLQEGQRRAGAAVTTETEVIWARALPAGTSAQRAELIALTQALKMAEGKKLNVYTDSRYAFATAHVHGEIYRRRGWLTSEGREIKNKNEILALLKALFLPKRLSIIHCPGHQKGNSAEARGNRMADQAAREAAMKAVLETSTLLAGKRTADGSEFEKRTADGSEFESPKKKAKVE

SEQ ID NO: 6726 - protein, 2091 aa, synthetic construct
MPAAKRVKLDGGDKKYSIGLDIGTNSVGWAVITDEYKVPSKKFKVLGNTDRHSIKKNLIGALLFDSGETAEATRLKRTARRRYTRRKNRICYLQEIFSNEMAKVDDSFFHRLEESFLVEEDKKHERHPIFGNIVDEVAYHEKYPTIYHLRKKLVDSTDKADLRLIYLALAHMIKFRGHFLIEGDLNPDNSDVDKLFIQLVQTYNQLFEENPINASGVDAKAILSARLSKSRRLENLIAQLPGEKKNGLFGNLIALSLGLTPNFKSNFDLAEDAKLQLSKDTYDDDLDNLLAQIGDQYADLFLAAKNLSDAILLSDILRVNTEITKAPLSASMIKRYDEHHQDLTLLKALVRQQLPEKYKEIFFDQSKNGYAGYIDGGASQEEFYKFIKPILEKMDGTEELLVKLNREDLLRKQRTFDNGSIPHQIHLGELHAILRRQEDFYPFLKDNREKIEKILTFRIPYYVGPLARGNSRFAWMTRKSEETITPWNFEEVVDKGASAQSFIERMTNFDKNLPNEKVLPKHSLLYEYFTVYNELTKVKYVTEGMRKPAFLSGEQKKAIVDLLFKTNRKVTVKQLKEDYFKKIECFDSVEISGVEDRFNASLGTYHDLLKIIKDKDFLDNEENEDILEDIVLTLTLFEDREMIEERLKTYAHLFDDKVMKQLKRRRYTGWGRLSRKLINGIRDKQSGKTILDFLKSDGFANRNFMQLIHDDSLTFKEDIQKAQVSGQGDSLHEHIANLAGSPAIKKGILQTVKVVDELVKVMGRHKPENIVIEMARENQTTQKGQKNSRERMKRIEEGIKELGSQILKEHPVENTQLQNEKLYLYYLQNGRDMYVDQELDINRLSDYDVDHIVPQSFLKDDSIDNKVLTRSDKARGKSDNVPSEEVVKKMKNYWRQLLNAKLITQRKFDNLTKAERGGLSELDKAGFIKRQLVETRQITKHVAQILDSRMNTKYDENDKLIREVKVITLKSKLVSDFRKDFQFYKVREINNYHHAHDAYLNAVVGTALIKKYPKLESEFVYGDYKVYDVRKMIAKSEQEIGKATAKYFFYSNIMNFFKTEITLANGEIRKRPLIETNGETGEIVWDKGRDFATVRKVLSMPQVNIVKKTEVQTGGFSKESILPKRNSDKLIARKKDWDPKKYGGFDSPTVAYSVLVVAKVEKGKSKKLKSVKELLGITIMERSSFEKNPIDFLEAKGYKEVKKDLIIKLPKYSLFELENGRKRMLASAGELQKGNELALPSKYVNFLYLASHYEKLKGSPEDNEQKQLFVEQHKHYLDEIIEQISEFSKRVILADANLDKVLSAYNKHRDKPIREQAENIIHLFTLTNLGAPAAFKYFDTTIDRKRYTSTKEVLDATLIHQSITGLYETRIDLSQLGGDGGPAPGGGGGTLNIEDEYRLHETSKEPDVPLGSTWLSDFPQAWAETGGMGLAVRQAPLIIPLKATSTPVSIKQYPMSQEARLGIKPHIQRLLDQGILVPCQSPWNTPLLPVKKPGTNDYRPVQDLREVNKRVEDIHPTVPNPYNLLSGLPPSHQWYTVLDLKDAFFCLRLHPTSQPLFAFEWRDPEMGISGQLTWTRLPQGFKNSPTLFNEALHRDLADFRIQHPDLILLQYVDDLLLAATSEQDCQRGTRALLQTLGNLGYRASAKKAQICQKQVKYLGYLLKEGQRWLTEARKETVMGQPTPKTPRQLREFLGKAGFCRLFIPGFAEMAAPLYPLTKPGTLFNWGPDQQKAYQEIKQALLTAPALGLPDLTKPFELFVDEKQGYAKGVLTQKLGPWRRPVAYLSKKLDPVAAGWPPCLRMVAAIAVLTKDAGKLTMGQPLVILAPHAVEALVKQPPDRWLSNARMTHYQAMLLDTDRVQFGPVVALNPATLLPLPEKEAPHDCLEILAETHGTRPDLTDQPIPDADYTWYTDGSSFLQEGQRRAGAAVTTETEVIWARALPAGTSAQRAELIALTQALKMAEGKKLNVYTDSRYAFATAHVHGEIYRRRGWLTSEGREIKNKNEILALLKALFLPKRLSIIHCPGHQKGNSAEARGNRMADQAAREAAMKAVLETSTLLAGKRTADGSEFEKRTADGSEFESPKKKAKVE

SEQ ID NO: 6727 - protein, 2095 aa, synthetic construct
MPAAKRVKLDGGDKKYSIGLDIGTNSVGWAVITDEYKVPSKKFKVLGNTDRHSIKKNLIGALLFDSGETAEATRLKRTARRRYTRRKNRICYLQEIFSNEMAKVDDSFFHRLEESFLVEEDKKHERHPIFGNIVDEVAYHEKYPTIYHLRKKLVDSTDKADLRLIYLALAHMIKFRGHFLIEGDLNPDNSDVDKLFIQLVQTYNQLFEENPINASGVDAKAILSARLSKSRRLENLIAQLPGEKKNGLFGNLIALSLGLTPNFKSNFDLAEDAKLQLSKDTYDDDLDNLLAQIGDQYADLFLAAKNLSDAILLSDILRVNTEITKAPLSASMIKRYDEHHQDLTLLKALVRQQLPEKYKEIFFDQSKNGYAGYIDGGASQEEFYKFIKPILEKMDGTEELLVKLNREDLLRKQRTFDNGSIPHQIHLGELHAILRRQEDFYPFLKDNREKIEKILTFRIPYYVGPLARGNSRFAWMTRKSEETITPWNFEEVVDKGASAQSFIERMTNFDKNLPNEKVLPKHSLLYEYFTVYNELTKVKYVTEGMRKPAFLSGEQKKAIVDLLFKTNRKVTVKQLKEDYFKKIECFDSVEISGVEDRFNASLGTYHDLLKIIKDKDFLDNEENEDILEDIVLTLTLFEDREMIEERLKTYAHLFDDKVMKQLKRRRYTGWGRLSRKLINGIRDKQSGKTILDFLKSDGFANRNFMQLIHDDSLTFKEDIQKAQVSGQGDSLHEHIANLAGSPAIKKGILQTVKVVDELVKVMGRHKPENIVIEMARENQTTQKGQKNSRERMKRIEEGIKELGSQILKEHPVENTQLQNEKLYLYYLQNGRDMYVDQELDINRLSDYDVDHIVPQSFLKDDSIDNKVLTRSDKARGKSDNVPSEEVVKKMKNYWRQLLNAKLITQRKFDNLTKAERGGLSELDKAGFIKRQLVETRQITKHVAQILDSRMNTKYDENDKLIREVKVITLKSKLVSDFRKDFQFYKVREINNYHHAHDAYLNAVVGTALIKKYPKLESEFVYGDYKVYDVRKMIAKSEQEIGKATAKYFFYSNIMNFFKTEITLANGEIRKRPLIETNGETGEIVWDKGRDFATVRKVLSMPQVNIVKKTEVQTGGFSKESILPKRNSDKLIARKKDWDPKKYGGFDSPTVAYSVLVVAKVEKGKSKKLKSVKELLGITIMERSSFEKNPIDFLEAKGYKEVKKDLIIKLPKYSLFELENGRKRMLASAGELQKGNELALPSKYVNFLYLASHYEKLKGSPEDNEQKQLFVEQHKHYLDEIIEQISEFSKRVILADANLDKVLSAYNKHRDKPIREQAENIIHLFTLTNLGAPAAFKYFDTTIDRKRYTSTKEVLDATLIHQSITGLYETRIDLSQLGGDGGGSSEAAAKGGTAPLEEEYRLFLEAPIQNVTLLEQWKREIPKVWAEINPPGLASTQAPIHVQLLSTALPVRVRQYPITLEAKRSLRETIRKFRAAGILRPVHSPWNTPLLPVRKSGTSEYRMVQDLREVNKRVETIHPTVPNPYTLLSLLPPDRIWYSVLDLKDAFFCIPLAPESQLIFAFEWADAEEGESGQLTWTRLPQGFKNSPTLFNEALNRDLQGFRLDHPSVSLLQYVDDLLIAADTQAACLSATRDLLMTLAELGYRVSGKKAQLCQEEVTYLGFKIHKGSRSLSNSRTQAILQIPVPKTKRQVREFLGTIGYCRLWIPGFAELAQPLYAATRPGNDPLVWGEKEEEAFQSLKLALTQPPALALPSLDKPFQLFVEETSGAAKGVLTQALGPWKRPVAYLSKRLDPVAAGWPRCLRAIAAAALLTREASKLTFGQDIEITSSHNLESLLRSPPDKWLTNARITQYQVLLLDPPRVRFKQTAALNPATLLPETDDTLPIHHCLDTLDSLTSTRPDLTDQPLAQAEATLFTDGSSYIRDGKRYAGAAVVTLDSVIWAEPLPIGTSAQKAELIALTKALEWSKDKSVNIYTDSRYAFATLHVHGMIYRERGWLTAGGKAIKNAPEILALLTAVWLPKRVAVMHCKGHQKDDAPTSTGNRRADEVAREVAIRPLSTQATISAGKRTADGSEFEKRTADGSEFESPKKKAKVE

SEQ ID NO: 6728 - protein, 2099 aa, synthetic construct
MPAAKRVKLDGGDKKYSIGLDIGTNSVGWAVITDEYKVPSKKFKVLGNTDRHSIKKNLIGALLFDSGETAEATRLKRTARRRYTRRKNRICYLQEIFSNEMAKVDDSFFHRLEESFLVEEDKKHERHPIFGNIVDEVAYHEKYPTIYHLRKKLVDSTDKADLRLIYLALAHMIKFRGHFLIEGDLNPDNSDVDKLFIQLVQTYNQLFEENPINASGVDAKAILSARLSKSRRLENLIAQLPGEKKNGLFGNLIALSLGLTPNFKSNFDLAEDAKLQLSKDTYDDDLDNLLAQIGDQYADLFLAAKNLSDAILLSDILRVNTEITKAPLSASMIKRYDEHHQDLTLLKALVRQQLPEKYKEIFFDQSKNGYAGYIDGGASQEEFYKFIKPILEKMDGTEELLVKLNREDLLRKQRTFDNGSIPHQIHLGELHAILRRQEDFYPFLKDNREKIEKILTFRIPYYVGPLARGNSRFAWMTRKSEETITPWNFEEVVDKGASAQSFIERMTNFDKNLPNEKVLPKHSLLYEYFTVYNELTKVKYVTEGMRKPAFLSGEQKKAIVDLLFKTNRKVTVKQLKEDYFKKIECFDSVEISGVEDRFNASLGTYHDLLKIIKDKDFLDNEENEDILEDIVLTLTLFEDREMIEERLKTYAHLFDDKVMKQLKRRRYTGWGRLSRKLINGIRDKQSGKTILDFLKSDGFANRNFMQLIHDDSLTFKEDIQKAQVSGQGDSLHEHIANLAGSPAIKKGILQTVKVVDELVKVMGRHKPENIVIEMARENQTTQKGQKNSRERMKRIEEGIKELGSQILKEHPVENTQLQNEKLYLYYLQNGRDMYVDQELDINRLSDYDVDHIVPQSFLKDDSIDNKVLTRSDKARGKSDNVPSEEVVKKMKNYWRQLLNAKLITQRKFDNLTKAERGGLSELDKAGFIKRQLVETRQITKHVAQILDSRMNTKYDENDKLIREVKVITLKSKLVSDFRKDFQFYKVREINNYHHAHDAYLNAVVGTALIKKYPKLESEFVYGDYKVYDVRKMIAKSEQEIGKATAKYFFYSNIMNFFKTEITLANGEIRKRPLIETNGETGEIVWDKGRDFATVRKVLSMPQVNIVKKTEVQTGGFSKESILPKRNSDKLIARKKDWDPKKYGGFDSPTVAYSVLVVAKVEKGKSKKLKSVKELLGITIMERSSFEKNPIDFLEAKGYKEVKKDLIIKLPKYSLFELENGRKRMLASAGELQKGNELALPSKYVNFLYLASHYEKLKGSPEDNEQKQLFVEQHKHYLDEIIEQISEFSKRVILADANLDKVLSAYNKHRDKPIREQAENIIHLFTLTNLGAPAAFKYFDTTIDRKRYTSTKEVLDATLIHQSITGLYETRIDLSQLGGDGGGSSEAAAKGGTVSLQDEHRLFDIPVTTSLPDVWLQDFPQAWAETGGLGRAKCQAPIIIDLKPTAVPVSIKQYPMSLEAHMGIRQHIIKFLELGVLRPCRSPWNTPLLPVKKPGTQDYRPVQDLREINKRTVDIHPTVPNPYNLLSTLKPDYSWYTVLDLKDAFFCLPLAPQSQELFAFEWKDPERGISGQLTWTRLPQGFKNSPTLFNEALHRDLTDFRTQHPEVTLLQYVDDLLLAAPTKKACTQGTRHLLQELGEKGYRASAKKAQICQTKVTYLGYILSEGKRWLTPGRIETVARIPPPRNPREVREFLGTAGFCRLWIPGFAELAAPLYALTKPSTPFTWQTEHQLAFEALKKALLSAPALGLPDTSKPFTLFLDERQGIAKGVLTQKLGPWKRPVAYLSKKLDPVAAGWPPCLRIMAATAMLVKDSAKLTLGQPLTVITPHTLEAIVRQPPDRWITNARLTHYQALLLDTDRVQFGPPVTLNPATLLPVPENQPSPHDCRQVLAETHGTREDLKDQELPDADHTWYTDGSSYLDSGTRRAGAAVVDGHNTIWAQSLPPGTSAQKAELIALTKALELSKGKKANIYTDSRYAFATAHTHGSIYERRGWLTSEGKEIKNKAEIIALLKALFLPQEVAIIHCPGHQKGQDPVAVGNRQADRVARQAAMAEVLTLATEPDNTSHITAGKRTADGSEFEKRTADGSEFESPKKKAKVE

SEQ ID NO: 6729 - protein, 2124 aa, synthetic construct
MPAAKRVKLDGGDKKYSIGLDIGTNSVGWAVITDEYKVPSKKFKVLGNTDRHSIKKNLIGALLFDSGETAEATRLKRTARRRYTRRKNRICYLQEIFSNEMAKVDDSFFHRLEESFLVEEDKKHERHPIFGNIVDEVAYHEKYPTIYHLRKKLVDSTDKADLRLIYLALAHMIKFRGHFLIEGDLNPDNSDVDKLFIQLVQTYNQLFEENPINASGVDAKAILSARLSKSRRLENLIAQLPGEKKNGLFGNLIALSLGLTPNFKSNFDLAEDAKLQLSKDTYDDDLDNLLAQIGDQYADLFLAAKNLSDAILLSDILRVNTEITKAPLSASMIKRYDEHHQDLTLLKALVRQQLPEKYKEIFFDQSKNGYAGYIDGGASQEEFYKFIKPILEKMDGTEELLVKLNREDLLRKQRTFDNGSIPHQIHLGELHAILRRQEDFYPFLKDNREKIEKILTFRIPYYVGPLARGNSRFAWMTRKSEETITPWNFEEVVDKGASAQSFIERMTNFDKNLPNEKVLPKHSLLYEYFTVYNELTKVKYVTEGMRKPAFLSGEQKKAIVDLLFKTNRKVTVKQLKEDYFKKIECFDSVEISGVEDRFNASLGTYHDLLKIIKDKDFLDNEENEDILEDIVLTLTLFEDREMIEERLKTYAHLFDDKVMKQLKRRRYTGWGRLSRKLINGIRDKQSGKTILDFLKSDGFANRNFMQLIHDDSLTFKEDIQKAQVSGQGDSLHEHIANLAGSPAIKKGILQTVKVVDELVKVMGRHKPENIVIEMARENQTTQKGQKNSRERMKRIEEGIKELGSQILKEHPVENTQLQNEKLYLYYLQNGRDMYVDQELDINRLSDYDVDHIVPQSFLKDDSIDNKVLTRSDKARGKSDNVPSEEVVKKMKNYWRQLLNAKLITQRKFDNLTKAERGGLSELDKAGFIKRQLVETRQITKHVAQILDSRMNTKYDENDKLIREVKVITLKSKLVSDFRKDFQFYKVREINNYHHAHDAYLNAVVGTALIKKYPKLESEFVYGDYKVYDVRKMIAKSEQEIGKATAKYFFYSNIMNFFKTEITLANGEIRKRPLIETNGETGEIVWDKGRDFATVRKVLSMPQVNIVKKTEVQTGGFSKESILPKRNSDKLIARKKDWDPKKYGGFDSPTVAYSVLVVAKVEKGKSKKLKSVKELLGITIMERSSFEKNPIDFLEAKGYKEVKKDLIIKLPKYSLFELENGRKRMLASAGELQKGNELALPSKYVNFLYLASHYEKLKGSPEDNEQKQLFVEQHKHYLDEIIEQISEFSKRVILADANLDKVLSAYNKHRDKPIREQAENIIHLFTLTNLGAPAAFKYFDTTIDRKRYTSTKEVLDATLIHQSITGLYETRIDLSQLGGDGGGSSEAAAKGGLLGRDLLTKLKAQIQFSTEGPQVTWEDRPAMCLVLNLEEEYRLHEKPVPPSIDPSWLQLFPMVWAEKAGMGLANQVPPVVVELKSDASPVAVRQYPMSKEAREGIRPHIQRFLDLGILVPCQSPWNTPLLPVKKPGTNDYRPVQDLREVNKRVQDIHPTVPNPYNLLSSLPPSHTWYSVLDLKDAFFCLKLHPNSQPLFAFEWRDPEKGNTGQLTWTRLPQGFKNSPTLFNEALHRDLASFRALNPQVVMLQYVDDLLVAAPTYRDCKEGTRRLLQELSKLGYRVSAKKAQLCREEVTYLGYLLKGGKRWLTPARKATVMKIPTPTTPRQVREFLGTAGFCRLWIPGFASLAAPLYPLTRPKVPFTWTEAHQEAFGRIKEALLSAPALALPDLTKPFALYVDEKEGVARGVLTQTLGPWRRPVAYLSKKLDPVASGWPTCLKAIAAVALLLKDADKLTLGQNVLVIAPHNLESIVRQPPDRWMTNARMTHYQSLLLNERVSFAPPAILNPATLLPVESDDTPIHICSEILAEETGTRPDLRDQPLPGVPAWYTDGSSFIMDGRRQAGAAIVDNKRTVWASNLPEGTSAQKAELIALTQALRLAEGKSINIYTDSRYAFATAHVHGAIYKQRGWLTSAGKDIKNKEEILALLEAIHLPKRVAIIHCPGHQRGTDPVATGNRKADEAAKQAAQSTRILTETTKNAGKRTADGSEFEKRTADGSEFESPKKKAKVE

SEQ ID NO: 6730 - protein, 2093 aa, synthetic construct
MPAAKRVKLDGGDKKYSIGLDIGTNSVGWAVITDEYKVPSKKFKVLGNTDRHSIKKNLIGALLFDSGETAEATRLKRTARRRYTRRKNRICYLQEIFSNEMAKVDDSFFHRLEESFLVEEDKKHERHPIFGNIVDEVAYHEKYPTIYHLRKKLVDSTDKADLRLIYLALAHMIKFRGHFLIEGDLNPDNSDVDKLFIQLVQTYNQLFEENPINASGVDAKAILSARLSKSRRLENLIAQLPGEKKNGLFGNLIALSLGLTPNFKSNFDLAEDAKLQLSKDTYDDDLDNLLAQIGDQYADLFLAAKNLSDAILLSDILRVNTEITKAPLSASMIKRYDEHHQDLTLLKALVRQQLPEKYKEIFFDQSKNGYAGYIDGGASQEEFYKFIKPILEKMDGTEELLVKLNREDLLRKQRTFDNGSIPHQIHLGELHAILRRQEDFYPFLKDNREKIEKILTFRIPYYVGPLARGNSRFAWMTRKSEETITPWNFEEVVDKGASAQSFIERMTNFDKNLPNEKVLPKHSLLYEYFTVYNELTKVKYVTEGMRKPAFLSGEQKKAIVDLLFKTNRKVTVKQLKEDYFKKIECFDSVEISGVEDRFNASLGTYHDLLKIIKDKDFLDNEENEDILEDIVLTLTLFEDREMIEERLKTYAHLFDDKVMKQLKRRRYTGWGRLSRKLINGIRDKQSGKTILDFLKSDGFANRNFMQLIHDDSLTFKEDIQKAQVSGQGDSLHEHIANLAGSPAIKKGILQTVKVVDELVKVMGRHKPENIVIEMARENQTTQKGQKNSRERMKRIEEGIKELGSQILKEHPVENTQLQNEKLYLYYLQNGRDMYVDQELDINRLSDYDVDHIVPQSFLKDDSIDNKVLTRSDKARGKSDNVPSEEVVKKMKNYWRQLLNAKLITQRKFDNLTKAERGGLSELDKAGFIKRQLVETRQITKHVAQILDSRMNTKYDENDKLIREVKVITLKSKLVSDFRKDFQFYKVREINNYHHAHDAYLNAVVGTALIKKYPKLESEFVYGDYKVYDVRKMIAKSEQEIGKATAKYFFYSNIMNFFKTEITLANGEIRKRPLIETNGETGEIVWDKGRDFATVRKVLSMPQVNIVKKTEVQTGGFSKESILPKRNSDKLIARKKDWDPKKYGGFDSPTVAYSVLVVAKVEKGKSKKLKSVKELLGITIMERSSFEKNPIDFLEAKGYKEVKKDLIIKLPKYSLFELENGRKRMLASAGELQKGNELALPSKYVNFLYLASHYEKLKGSPEDNEQKQLFVEQHKHYLDEIIEQISEFSKRVILADANLDKVLSAYNKHRDKPIREQAENIIHLFTLTNLGAPAAFKYFDTTIDRKRYTSTKEVLDATLIHQSITGLYETRIDLSQLGGDGGGSSEAAAKGGTLNLEDEYRLYETSAEPEVSPGSTWLSDFPQAWAETGGMGLAVRQAPLIIPLKATSTPVSIKQYPMSQEAKLGIKPHIQRLLDQGILVPCQSPWNTPLLPVKKPGTNDYRPVQDLREVNKRVEDIHPTVPNPYNLLSGLPPSHRWYTVLDLKDAFFCLRLHPTSQPLFAFEWRDPGMGISGQLTWTRLPQGFKNSPTLFNEALHRDLADFRIQHPDLILLQYVDDILLAATSELDCQQGTRALLLTLGNLGYRASAKKAQLCQKQVKYLGYLLKEGQRWLTEARKETVMGQPTPKTPRQLREFLGTAGFCRLWIPGFAEMAAPLYPLTKPGTLFNWGPDQQKAYQEIKQALLTAPALGLPDLTKPFELFVDEKQGYAKGVLTQKLGPWRRPVAYLSKKLDPVAAGWPPCLRMVAAIAVLRKDAGKLTMGQPLVILAPHAVEALVKQPPDRWLSNARMTHYQAMLLDTDRVQFGPVVALNPATLLPLPEEGAPHDCLEILAETHGTRPDLTDQPIPDADHTWYTDGSSFLQEGQRKAGAAVTTETEVIWARALPAGTSAQRAELIALTQALKMAEGKRLNVYTDSRYAFATAHIHGEIYRRRGWLTSEGREIKNKSEILALLKALFLPKRLSIIHCLGHQKGDSAEARGNRLADQAAREAAIKTPPDTSTLLAGKRTADGSEFEKRTADGSEFESPKKKAKVE

SEQ ID NO: 6731 - protein, 2093 aa, synthetic construct
MPAAKRVKLDGGDKKYSIGLDIGTNSVGWAVITDEYKVPSKKFKVLGNTDRHSIKKNLIGALLFDSGETAEATRLKRTARRRYTRRKNRICYLQEIFSNEMAKVDDSFFHRLEESFLVEEDKKHERHPIFGNIVDEVAYHEKYPTIYHLRKKLVDSTDKADLRLIYLALAHMIKFRGHFLIEGDLNPDNSDVDKLFIQLVQTYNQLFEENPINASGVDAKAILSARLSKSRRLENLIAQLPGEKKNGLFGNLIALSLGLTPNFKSNFDLAEDAKLQLSKDTYDDDLDNLLAQIGDQYADLFLAAKNLSDAILLSDILRVNTEITKAPLSASMIKRYDEHHQDLTLLKALVRQQLPEKYKEIFFDQSKNGYAGYIDGGASQEEFYKFIKPILEKMDGTEELLVKLNREDLLRKQRTFDNGSIPHQIHLGELHAILRRQEDFYPFLKDNREKIEKILTFRIPYYVGPLARGNSRFAWMTRKSEETITPWNFEEVVDKGASAQSFIERMTNFDKNLPNEKVLPKHSLLYEYFTVYNELTKVKYVTEGMRKPAFLSGEQKKAIVDLLFKTNRKVTVKQLKEDYFKKIECFDSVEISGVEDRFNASLGTYHDLLKIIKDKDFLDNEENEDILEDIVLTLTLFEDREMIEERLKTYAHLFDDKVMKQLKRRRYTGWGRLSRKLINGIRDKQSGKTILDFLKSDGFANRNFMQLIHDDSLTFKEDIQKAQVSGQGDSLHEHIANLAGSPAIKKGILQTVKVVDELVKVMGRHKPENIVIEMARENQTTQKGQKNSRERMKRIEEGIKELGSQILKEHPVENTQLQNEKLYLYYLQNGRDMYVDQELDINRLSDYDVDHIVPQSFLKDDSIDNKVLTRSDKARGKSDNVPSEEVVKKMKNYWRQLLNAKLITQRKFDNLTKAERGGLSELDKAGFIKRQLVETRQITKHVAQILDSRMNTKYDENDKLIREVKVITLKSKLVSDFRKDFQFYKVREINNYHHAHDAYLNAVVGTALIKKYPKLESEFVYGDYKVYDVRKMIAKSEQEIGKATAKYFFYSNIMNFFKTEITLANGEIRKRPLIETNGETGEIVWDKGRDFATVRKVLSMPQVNIVKKTEVQTGGFSKESILPKRNSDKLIARKKDWDPKKYGGFDSPTVAYSVLVVAKVEKGKSKKLKSVKELLGITIMERSSFEKNPIDFLEAKGYKEVKKDLIIKLPKYSLFELENGRKRMLASAGELQKGNELALPSKYVNFLYLASHYEKLKGSPEDNEQKQLFVEQHKHYLDEIIEQISEFSKRVILADANLDKVLSAYNKHRDKPIREQAENIIHLFTLTNLGAPAAFKYFDTTIDRKRYTSTKEVLDATLIHQSITGLYETRIDLSQLGGDGGGSSEAAAKGGTLNIEDEYRLHETSKEPDVPLGSTWLSDFPQAWAETGGMGLAVRQAPLIIPLKATSTPVSIKQYPMSQEARLGIKPHIQRLLDQGILVPCQSPWNTPLLPVKKPGTNDYRPVQDLREVNKRVEDIHPTVPNPYNLLSGLPPSHQWYTVLDLKDAFFCLRLHPTSQPLFAFEWRDPEMGISGQLTWTRLPQGFKNSPTLFNEALHRDLADFRIQHPDLILLQYVDDLLLAATSEQDCQRGTRALLQTLGNLGYRASAKKAQICQKQVKYLGYLLKEGQRWLTEARKETVMGQPTPKTPRQLREFLGKAGFCRLFIPGFAEMAAPLYPLTKPGTLFNWGPDQQKAYQEIKQALLTAPALGLPDLTKPFELFVDEKQGYAKGVLTQKLGPWRRPVAYLSKKLDPVAAGWPPCLRMVAAIAVLTKDAGKLTMGQPLVILAPHAVEALVKQPPDRWLSNARMTHYQAMLLDTDRVQFGPVVALNPATLLPLPEKEAPHDCLEILAETHGTRPDLTDQPIPDADYTWYTDGSSFLQEGQRRAGAAVTTETEVIWARALPAGTSAQRAELIALTQALKMAEGKKLNVYTDSRYAFATAHVHGEIYRRRGWLTSEGREIKNKNEILALLKALFLPKRLSIIHCPGHQKGNSAEARGNRMADQAAREAAMKAVLETSTLLAGKRTADGSEFEKRTADGSEFESPKKKAKVE

SEQ ID NO: 6732 - protein, 2095 aa, synthetic construct
MPAAKRVKLDGGDKKYSIGLDIGTNSVGWAVITDEYKVPSKKFKVLGNTDRHSIKKNLIGALLFDSGETAEATRLKRTARRRYTRRKNRICYLQEIFSNEMAKVDDSFFHRLEESFLVEEDKKHERHPIFGNIVDEVAYHEKYPTIYHLRKKLVDSTDKADLRLIYLALAHMIKFRGHFLIEGDLNPDNSDVDKLFIQLVQTYNQLFEENPINASGVDAKAILSARLSKSRRLENLIAQLPGEKKNGLFGNLIALSLGLTPNFKSNFDLAEDAKLQLSKDTYDDDLDNLLAQIGDQYADLFLAAKNLSDAILLSDILRVNTEITKAPLSASMIKRYDEHHQDLTLLKALVRQQLPEKYKEIFFDQSKNGYAGYIDGGASQEEFYKFIKPILEKMDGTEELLVKLNREDLLRKQRTFDNGSIPHQIHLGELHAILRRQEDFYPFLKDNREKIEKILTFRIPYYVGPLARGNSRFAWMTRKSEETITPWNFEEVVDKGASAQSFIERMTNFDKNLPNEKVLPKHSLLYEYFTVYNELTKVKYVTEGMRKPAFLSGEQKKAIVDLLFKTNRKVTVKQLKEDYFKKIECFDSVEISGVEDRFNASLGTYHDLLKIIKDKDFLDNEENEDILEDIVLTLTLFEDREMIEERLKTYAHLFDDKVMKQLKRRRYTGWGRLSRKLINGIRDKQSGKTILDFLKSDGFANRNFMQLIHDDSLTFKEDIQKAQVSGQGDSLHEHIANLAGSPAIKKGILQTVKVVDELVKVMGRHKPENIVIEMARENQTTQKGQKNSRERMKRIEEGIKELGSQILKEHPVENTQLQNEKLYLYYLQNGRDMYVDQELDINRLSDYDVDHIVPQSFLKDDSIDNKVLTRSDKARGKSDNVPSEEVVKKMKNYWRQLLNAKLITQRKFDNLTKAERGGLSELDKAGFIKRQLVETRQITKHVAQILDSRMNTKYDENDKLIREVKVITLKSKLVSDFRKDFQFYKVREINNYHHAHDAYLNAVVGTALIKKYPKLESEFVYGDYKVYDVRKMIAKSEQEIGKATAKYFFYSNIMNFFKTEITLANGEIRKRPLIETNGETGEIVWDKGRDFATVRKVLSMPQVNIVKKTEVQTGGFSKESILPKRNSDKLIARKKDWDPKKYGGFDSPTVAYSVLVVAKVEKGKSKKLKSVKELLGITIMERSSFEKNPIDFLEAKGYKEVKKDLIIKLPKYSLFELENGRKRMLASAGELQKGNELALPSKYVNFLYLASHYEKLKGSPEDNEQKQLFVEQHKHYLDEIIEQISEFSKRVILADANLDKVLSAYNKHRDKPIREQAENIIHLFTLTNLGAPAAFKYFDTTIDRKRYTSTKEVLDATLIHQSITGLYETRIDLSQLGGDGGEAAAKGSSGGTAPLEEEYRLFLEAPIQNVTLLEQWKREIPKVWAEINPPGLASTQAPIHVQLLSTALPVRVRQYPITLEAKRSLRETIRKFRAAGILRPVHSPWNTPLLPVRKSGTSEYRMVQDLREVNKRVETIHPTVPNPYTLLSLLPPDRIWYSVLDLKDAFFCIPLAPESQLIFAFEWADAEEGESGQLTWTRLPQGFKNSPTLFNEALNRDLQGFRLDHPSVSLLQYVDDLLIAADTQAACLSATRDLLMTLAELGYRVSGKKAQLCQEEVTYLGFKIHKGSRSLSNSRTQAILQIPVPKTKRQVREFLGTIGYCRLWIPGFAELAQPLYAATRPGNDPLVWGEKEEEAFQSLKLALTQPPALALPSLDKPFQLFVEETSGAAKGVLTQALGPWKRPVAYLSKRLDPVAAGWPRCLRAIAAAALLTREASKLTFGQDIEITSSHNLESLLRSPPDKWLTNARITQYQVLLLDPPRVRFKQTAALNPATLLPETDDTLPIHHCLDTLDSLTSTRPDLTDQPLAQAEATLFTDGSSYIRDGKRYAGAAVVTLDSVIWAEPLPIGTSAQKAELIALTKALEWSKDKSVNIYTDSRYAFATLHVHGMIYRERGWLTAGGKAIKNAPEILALLTAVWLPKRVAVMHCKGHQKDDAPTSTGNRRADEVAREVAIRPLSTQATISAGKRTADGSEFEKRTADGSEFESPKKKAKVE

SEQ ID NO: 6733 - protein, 2095 aa, synthetic construct
MPAAKRVKLDGGDKKYSIGLDIGTNSVGWAVITDEYKVPSKKFKVLGNTDRHSIKKNLIGALLFDSGETAEATRLKRTARRRYTRRKNRICYLQEIFSNEMAKVDDSFFHRLEESFLVEEDKKHERHPIFGNIVDEVAYHEKYPTIYHLRKKLVDSTDKADLRLIYLALAHMIKFRGHFLIEGDLNPDNSDVDKLFIQLVQTYNQLFEENPINASGVDAKAILSARLSKSRRLENLIAQLPGEKKNGLFGNLIALSLGLTPNFKSNFDLAEDAKLQLSKDTYDDDLDNLLAQIGDQYADLFLAAKNLSDAILLSDILRVNTEITKAPLSASMIKRYDEHHQDLTLLKALVRQQLPEKYKEIFFDQSKNGYAGYIDGGASQEEFYKFIKPILEKMDGTEELLVKLNREDLLRKQRTFDNGSIPHQIHLGELHAILRRQEDFYPFLKDNREKIEKILTFRIPYYVGPLARGNSRFAWMTRKSEETITPWNFEEVVDKGASAQSFIERMTNFDKNLPNEKVLPKHSLLYEYFTVYNELTKVKYVTEGMRKPAFLSGEQKKAIVDLLFKTNRKVTVKQLKEDYFKKIECFDSVEISGVEDRFNASLGTYHDLLKIIKDKDFLDNEENEDILEDIVLTLTLFEDREMIEERLKTYAHLFDDKVMKQLKRRRYTGWGRLSRKLINGIRDKQSGKTILDFLKSDGFANRNFMQLIHDDSLTFKEDIQKAQVSGQGDSLHEHIANLAGSPAIKKGILQTVKVVDELVKVMGRHKPENIVIEMARENQTTQKGQKNSRERMKRIEEGIKELGSQILKEHPVENTQLQNEKLYLYYLQNGRDMYVDQELDINRLSDYDVDHIVPQSFLKDDSIDNKVLTRSDKARGKSDNVPSEEVVKKMKNYWRQLLNAKLITQRKFDNLTKAERGGLSELDKAGFIKRQLVETRQITKHVAQILDSRMNTKYDENDKLIREVKVITLKSKLVSDFRKDFQFYKVREINNYHHAHDAYLNAVVGTALIKKYPKLESEFVYGDYKVYDVRKMIAKSEQEIGKATAKYFFYSNIMNFFKTEITLANGEIRKRPLIETNGETGEIVWDKGRDFATVRKVLSMPQVNIVKKTEVQTGGFSKESILPKRNSDKLIARKKDWDPKKYGGFDSPTVAYSVLVVAKVEKGKSKKLKSVKELLGITIMERSSFEKNPIDFLEAKGYKEVKKDLIIKLPKYSLFELENGRKRMLASAGELQKGNELALPSKYVNFLYLASHYEKLKGSPEDNEQKQLFVEQHKHYLDEIIEQISEFSKRVILADANLDKVLSAYNKHRDKPIREQAENIIHLFTLTNLGAPAAFKYFDTTIDRKRYTSTKEVLDATLIHQSITGLYETRIDLSQLGGDGGEAAAKGSSGGTAPLEEEYRLFLEAPIQNVTLLEQWKREIPKVWAEINPPGLASTQAPIHVQLLSTALPVRVRQYPITLEAKRSLRETIRKFRAAGILRPVHSPWNTPLLPVRKSGTSEYRMVQDLREVNKRVETIHPTVPNPYTLLSLLPPDRIWYSVLDLKDAFFCIPLAPESQLIFAFEWADAEEGESGQLTWTRLPQGFKNSPTLFNEALNRDLQGFRLDHPSVSLLQYVDDLLIAADTQAACLSATRDLLMTLAELGYRVSGKKAQLCQEEVTYLGFKIHKGSRSLSNSRTQAILQIPVPKTKRQVREFLGKIGYCRLFIPGFAELAQPLYAATRPGNDPLVWGEKEEEAFQSLKLALTQPPALALPSLDKPFQLFVEETSGAAKGVLTQALGPWKRPVAYLSKRLDPVAAGWPRCLRAIAAAALLTREASKLTFGQDIEITSSHNLESLLRSPPDKWLTNARITQYQVLLLDPPRVRFKQTAALNPATLLPETDDTLPIHHCLDTLDSLTSTRPDLTDQPLAQAEATLFTDGSSYIRDGKRYAGAAVVTLDSVIWAEPLPIGTSAQKAELIALTKALEWSKDKSVNIYTDSRYAFATLHVHGMIYRERGWLTAGGKAIKNAPEILALLTAVWLPKRVAVMHCKGHQKDDAPTSTGNRRADEVAREVAIRPLSTQATISAGKRTADGSEFEKRTADGSEFESPKKKAKVE

SEQ ID NO: 6734 - protein, 2092 aa, synthetic construct
MPAAKRVKLDGGDKKYSIGLDIGTNSVGWAVITDEYKVPSKKFKVLGNTDRHSIKKNLIGALLFDSGETAEATRLKRTARRRYTRRKNRICYLQEIFSNEMAKVDDSFFHRLEESFLVEEDKKHERHPIFGNIVDEVAYHEKYPTIYHLRKKLVDSTDKADLRLIYLALAHMIKFRGHFLIEGDLNPDNSDVDKLFIQLVQTYNQLFEENPINASGVDAKAILSARLSKSRRLENLIAQLPGEKKNGLFGNLIALSLGLTPNFKSNFDLAEDAKLQLSKDTYDDDLDNLLAQIGDQYADLFLAAKNLSDAILLSDILRVNTEITKAPLSASMIKRYDEHHQDLTLLKALVRQQLPEKYKEIFFDQSKNGYAGYIDGGASQEEFYKFIKPILEKMDGTEELLVKLNREDLLRKQRTFDNGSIPHQIHLGELHAILRRQEDFYPFLKDNREKIEKILTFRIPYYVGPLARGNSRFAWMTRKSEETITPWNFEEVVDKGASAQSFIERMTNFDKNLPNEKVLPKHSLLYEYFTVYNELTKVKYVTEGMRKPAFLSGEQKKAIVDLLFKTNRKVTVKQLKEDYFKKIECFDSVEISGVEDRFNASLGTYHDLLKIIKDKDFLDNEENEDILEDIVLTLTLFEDREMIEERLKTYAHLFDDKVMKQLKRRRYTGWGRLSRKLINGIRDKQSGKTILDFLKSDGFANRNFMQLIHDDSLTFKEDIQKAQVSGQGDSLHEHIANLAGSPAIKKGILQTVKVVDELVKVMGRHKPENIVIEMARENQTTQKGQKNSRERMKRIEEGIKELGSQILKEHPVENTQLQNEKLYLYYLQNGRDMYVDQELDINRLSDYDVDHIVPQSFLKDDSIDNKVLTRSDKARGKSDNVPSEEVVKKMKNYWRQLLNAKLITQRKFDNLTKAERGGLSELDKAGFIKRQLVETRQITKHVAQILDSRMNTKYDENDKLIREVKVITLKSKLVSDFRKDFQFYKVREINNYHHAHDAYLNAVVGTALIKKYPKLESEFVYGDYKVYDVRKMIAKSEQEIGKATAKYFFYSNIMNFFKTEITLANGEIRKRPLIETNGETGEIVWDKGRDFATVRKVLSMPQVNIVKKTEVQTGGFSKESILPKRNSDKLIARKKDWDPKKYGGFDSPTVAYSVLVVAKVEKGKSKKLKSVKELLGITIMERSSFEKNPIDFLEAKGYKEVKKDLIIKLPKYSLFELENGRKRMLASAGELQKGNELALPSKYVNFLYLASHYEKLKGSPEDNEQKQLFVEQHKHYLDEIIEQISEFSKRVILADANLDKVLSAYNKHRDKPIREQAENIIHLFTLTNLGAPAAFKYFDTTIDRKRYTSTKEVLDATLIHQSITGLYETRIDLSQLGGDGGEAAAKGSSGGTLQLEEEYRLFEPESTQKQEMDIWLKNFPQAWAETGGMGTAHCQAPVLIQLKATATPISIRQYPMPHEAYQGIKPHIRRMLDQGILKPCQSPWNTPLLPVKKPGTEDYRPVQDLREVNKRVEDIHPTVPNPYNLLSTLPPSHPWYTVLDLKDAFFCLRLHSESQLLFAFEWRDPEIGLSGQLTWTRLPQGFKNSPTLFNEALHSDLADFRVRYPALVLLQYVDDLLLAAATRTECLEGTKALLETLGNKGYRASAKKAQICLQEVTYLGYSLKDGQRWLTKARKEAILSIPVPKNSRQVREFLGKAGYCRLFIPGFAELAAPLYPLTRPGTLFQWGTEQQLAFEDIKKALLSSPALGLPDITKPFELFIDENSGFAKGVLVQKLGPWKRPVAYLSKKLDTVASGWPPCLRMVAAIAILVKDAGKLTLGQPLTILTSHPVEALVRQPPNKWLSNARMTHYQAMLLDAERVHFGPTVSLNPATLLPLPSGGNHHDCLQILAETHGTRPDLTDQPLPDADLTWYTDGSSFIRNGEREAGAAVTTESEVIWAAPLPPGTSAQRAELIALTQALKMAEGKKLTVYTDSRYAFATTHVHGEIYRRRGWLTSEGKEIKNKNEILALLEALFLPKRLSIIHCPGHQKGDSPQAKGNRLADDTAKKAATETHSSLTVLPAGKRTADGSEFEKRTADGSEFESPKKKAKVE

SEQ ID NO: 6735 - protein, 2091 aa, synthetic construct
MPAAKRVKLDGGDKKYSIGLDIGTNSVGWAVITDEYKVPSKKFKVLGNTDRHSIKKNLIGALLFDSGETAEATRLKRTARRRYTRRKNRICYLQEIFSNEMAKVDDSFFHRLEESFLVEEDKKHERHPIFGNIVDEVAYHEKYPTIYHLRKKLVDSTDKADLRLIYLALAHMIKFRGHFLIEGDLNPDNSDVDKLFIQLVQTYNQLFEENPINASGVDAKAILSARLSKSRRLENLIAQLPGEKKNGLFGNLIALSLGLTPNFKSNFDLAEDAKLQLSKDTYDDDLDNLLAQIGDQYADLFLAAKNLSDAILLSDILRVNTEITKAPLSASMIKRYDEHHQDLTLLKALVRQQLPEKYKEIFFDQSKNGYAGYIDGGASQEEFYKFIKPILEKMDGTEELLVKLNREDLLRKQRTFDNGSIPHQIHLGELHAILRRQEDFYPFLKDNREKIEKILTFRIPYYVGPLARGNSRFAWMTRKSEETITPWNFEEVVDKGASAQSFIERMTNFDKNLPNEKVLPKHSLLYEYFTVYNELTKVKYVTEGMRKPAFLSGEQKKAIVDLLFKTNRKVTVKQLKEDYFKKIECFDSVEISGVEDRFNASLGTYHDLLKIIKDKDFLDNEENEDILEDIVLTLTLFEDREMIEERLKTYAHLFDDKVMKQLKRRRYTGWGRLSRKLINGIRDKQSGKTILDFLKSDGFANRNFMQLIHDDSLTFKEDIQKAQVSGQGDSLHEHIANLAGSPAIKKGILQTVKVVDELVKVMGRHKPENIVIEMARENQTTQKGQKNSRERMKRIEEGIKELGSQILKEHPVENTQLQNEKLYLYYLQNGRDMYVDQELDINRLSDYDVDHIVPQSFLKDDSIDNKVLTRSDKARGKSDNVPSEEVVKKMKNYWRQLLNAKLITQRKFDNLTKAERGGLSELDKAGFIKRQLVETRQITKHVAQILDSRMNTKYDENDKLIREVKVITLKSKLVSDFRKDFQFYKVREINNYHHAHDAYLNAVVGTALIKKYPKLESEFVYGDYKVYDVRKMIAKSEQEIGKATAKYFFYSNIMNFFKTEITLANGEIRKRPLIETNGETGEIVWDKGRDFATVRKVLSMPQVNIVKKTEVQTGGFSKESILPKRNSDKLIARKKDWDPKKYGGFDSPTVAYSVLVVAKVEKGKSKKLKSVKELLGITIMERSSFEKNPIDFLEAKGYKEVKKDLIIKLPKYSLFELENGRKRMLASAGELQKGNELALPSKYVNFLYLASHYEKLKGSPEDNEQKQLFVEQHKHYLDEIIEQISEFSKRVILADANLDKVLSAYNKHRDKPIREQAENIIHLFTLTNLGAPAAFKYFDTTIDRKRYTSTKEVLDATLIHQSITGLYETRIDLSQLGGDGGEAAAKGSSGGVLNLEEEYRLHEKPVPSSIDPSWLQLFPTVWAERAGMGLANQVPPVVVELRSGASPVAVRQYPMSKEAREGIRPHIQKFLDLGVLVPCRSPWNTPLLPVKKPGTNDYRPVQDLREINKRVQDIHPTVPNPYNLLSSLPPSYTWYSVLDLKDAFFCLRLHPNSQPLFAFEWKDPEKGNTGQLTWTRLPQGFKNSPTLFNEALHRDLAPFRALNPQVVLLQYVDDLLVAAPTYEDCKKGTQKLLQELSKLGYRVSAKKAQLCQREVTYLGYLLKEGKRWLTPARKATVMKIPVPTTPRQVREFLGKAGFCRLFIPGFASLAAPLYPLTKPSIPFIWTEEHQQAFDHIKKALLSAPALALPDLTKPFTLYIDERAGVARGVLTQTLGPWRRPVAYLSKKLDPVASGWPTCLKAVAAVALLLKDADKLTLGQNVTVIASHSLESIVRQPPDRWMTNARMTHYQSLLLNERVSFAPPAVLNPATLLPVESEATPVHRCSEILAEETGTRRDLEDQPLPGVPTWYTDGSSFITEGKRRAGAPIVDGKRTVWASSLPEGTSAQKAELVALTQALRLAEGKNINIYTDSRYAFATAHIHGAIYKQRGWLTSAGKDIKNKEEILALLEAIHLPRRVAIIHCPGHQRGSNPVATGNRRADEAAKQAALSTRVLAGTTKPAGKRTADGSEFEKRTADGSEFESPKKKAKVE

SEQ ID NO: 6736 - protein, 2215 aa, synthetic construct
MPAAKRVKLDGGDKKYSIGLDIGTNSVGWAVITDEYKVPSKKFKVLGNTDRHSIKKNLIGALLFDSGETAEATRLKRTARRRYTRRKNRICYLQEIFSNEMAKVDDSFFHRLEESFLVEEDKKHERHPIFGNIVDEVAYHEKYPTIYHLRKKLVDSTDKADLRLIYLALAHMIKFRGHFLIEGDLNPDNSDVDKLFIQLVQTYNQLFEENPINASGVDAKAILSARLSKSRRLENLIAQLPGEKKNGLFGNLIALSLGLTPNFKSNFDLAEDAKLQLSKDTYDDDLDNLLAQIGDQYADLFLAAKNLSDAILLSDILRVNTEITKAPLSASMIKRYDEHHQDLTLLKALVRQQLPEKYKEIFFDQSKNGYAGYIDGGASQEEFYKFIKPILEKMDGTEELLVKLNREDLLRKQRTFDNGSIPHQIHLGELHAILRRQEDFYPFLKDNREKIEKILTFRIPYYVGPLARGNSRFAWMTRKSEETITPWNFEEVVDKGASAQSFIERMTNFDKNLPNEKVLPKHSLLYEYFTVYNELTKVKYVTEGMRKPAFLSGEQKKAIVDLLFKTNRKVTVKQLKEDYFKKIECFDSVEISGVEDRFNASLGTYHDLLKIIKDKDFLDNEENEDILEDIVLTLTLFEDREMIEERLKTYAHLFDDKVMKQLKRRRYTGWGRLSRKLINGIRDKQSGKTILDFLKSDGFANRNFMQLIHDDSLTFKEDIQKAQVSGQGDSLHEHIANLAGSPAIKKGILQTVKVVDELVKVMGRHKPENIVIEMARENQTTQKGQKNSRERMKRIEEGIKELGSQILKEHPVENTQLQNEKLYLYYLQNGRDMYVDQELDINRLSDYDVDHIVPQSFLKDDSIDNKVLTRSDKARGKSDNVPSEEVVKKMKNYWRQLLNAKLITQRKFDNLTKAERGGLSELDKAGFIKRQLVETRQITKHVAQILDSRMNTKYDENDKLIREVKVITLKSKLVSDFRKDFQFYKVREINNYHHAHDAYLNAVVGTALIKKYPKLESEFVYGDYKVYDVRKMIAKSEQEIGKATAKYFFYSNIMNFFKTEITLANGEIRKRPLIETNGETGEIVWDKGRDFATVRKVLSMPQVNIVKKTEVQTGGFSKESILPKRNSDKLIARKKDWDPKKYGGFDSPTVAYSVLVVAKVEKGKSKKLKSVKELLGITIMERSSFEKNPIDFLEAKGYKEVKKDLIIKLPKYSLFELENGRKRMLASAGELQKGNELALPSKYVNFLYLASHYEKLKGSPEDNEQKQLFVEQHKHYLDEIIEQISEFSKRVILADANLDKVLSAYNKHRDKPIREQAENIIHLFTLTNLGAPAAFKYFDTTIDRKRYTSTKEVLDATLIHQSITGLYETRIDLSQLGGDGGEAAAKGSSGGTLGDQGSRGSDPLPEPRVTLTVEGIPTEFLVNTGAEHSVLTKPMGKMGSKRTVVAGATGSKVYPWTTKRLLKIGQKQVTHSFLVIPECPAPLLGRDLLTKLKAQIQFSTEGPQVTWEDRPAMCLVLNLEEEYRLHEKPVPPSIDPSWLQLFPMVWAEKAGMGLANQVPPVVVELKSDASPVAVRQYPMSKEAREGIRPHIQRFLDLGILVPCQSPWNTPLLPVKKPGTNDYRPVQDLREVNKRVQDIHPTVPNPYNLLSSLPPSHTWYSVLDLKDAFFCLKLHPNSQPLFAFEWRDPEKGNTGQLTWTRLPQGFKNSPTLFNEALHRDLASFRALNPQVVMLQYVDDLLVAAPTYRDCKEGTRRLLQELSKLGYRVSAKKAQLCREEVTYLGYLLKGGKRWLTPARKATVMKIPTPTTPRQVREFLGKAGFCRLFIPGFASLAAPLYPLTRPKVPFTWTEAHQEAFGRIKEALLSAPALALPDLTKPFALYVDEKEGVARGVLTQTLGPWRRPVAYLSKKLDPVASGWPTCLKAIAAVALLLKDADKLTLGQNVLVIAPHNLESIVRQPPDRWMTNARMTHYQSLLLNERVSFAPPAILNPATLLPVESDDTPIHICSEILAEETGTRPDLRDQPLPGVPAWYTDGSSFIMDGRRQAGAAIVDNKRTVWASNLPEGTSAQKAELIALTQALRLAEGKSINIYTDSRYAFATAHVHGAIYKQRGWLTSAGKDIKNKEEILALLEAIHLPKRVAIIHCPGHQRGTDPVATGNRKADEAAKQAAQSTRILTETTKNAGKRTADGSEFEKRTADGSEFESPKKKAKVE

SEQ ID NO: 6737 - protein, 2093 aa, synthetic construct
MPAAKRVKLDGGDKKYSIGLDIGTNSVGWAVITDEYKVPSKKFKVLGNTDRHSIKKNLIGALLFDSGETAEATRLKRTARRRYTRRKNRICYLQEIFSNEMAKVDDSFFHRLEESFLVEEDKKHERHPIFGNIVDEVAYHEKYPTIYHLRKKLVDSTDKADLRLIYLALAHMIKFRGHFLIEGDLNPDNSDVDKLFIQLVQTYNQLFEENPINASGVDAKAILSARLSKSRRLENLIAQLPGEKKNGLFGNLIALSLGLTPNFKSNFDLAEDAKLQLSKDTYDDDLDNLLAQIGDQYADLFLAAKNLSDAILLSDILRVNTEITKAPLSASMIKRYDEHHQDLTLLKALVRQQLPEKYKEIFFDQSKNGYAGYIDGGASQEEFYKFIKPILEKMDGTEELLVKLNREDLLRKQRTFDNGSIPHQIHLGELHAILRRQEDFYPFLKDNREKIEKILTFRIPYYVGPLARGNSRFAWMTRKSEETITPWNFEEVVDKGASAQSFIERMTNFDKNLPNEKVLPKHSLLYEYFTVYNELTKVKYVTEGMRKPAFLSGEQKKAIVDLLFKTNRKVTVKQLKEDYFKKIECFDSVEISGVEDRFNASLGTYHDLLKIIKDKDFLDNEENEDILEDIVLTLTLFEDREMIEERLKTYAHLFDDKVMKQLKRRRYTGWGRLSRKLINGIRDKQSGKTILDFLKSDGFANRNFMQLIHDDSLTFKEDIQKAQVSGQGDSLHEHIANLAGSPAIKKGILQTVKVVDELVKVMGRHKPENIVIEMARENQTTQKGQKNSRERMKRIEEGIKELGSQILKEHPVENTQLQNEKLYLYYLQNGRDMYVDQELDINRLSDYDVDHIVPQSFLKDDSIDNKVLTRSDKARGKSDNVPSEEVVKKMKNYWRQLLNAKLITQRKFDNLTKAERGGLSELDKAGFIKRQLVETRQITKHVAQILDSRMNTKYDENDKLIREVKVITLKSKLVSDFRKDFQFYKVREINNYHHAHDAYLNAVVGTALIKKYPKLESEFVYGDYKVYDVRKMIAKSEQEIGKATAKYFFYSNIMNFFKTEITLANGEIRKRPLIETNGETGEIVWDKGRDFATVRKVLSMPQVNIVKKTEVQTGGFSKESILPKRNSDKLIARKKDWDPKKYGGFDSPTVAYSVLVVAKVEKGKSKKLKSVKELLGITIMERSSFEKNPIDFLEAKGYKEVKKDLIIKLPKYSLFELENGRKRMLASAGELQKGNELALPSKYVNFLYLASHYEKLKGSPEDNEQKQLFVEQHKHYLDEIIEQISEFSKRVILADANLDKVLSAYNKHRDKPIREQAENIIHLFTLTNLGAPAAFKYFDTTIDRKRYTSTKEVLDATLIHQSITGLYETRIDLSQLGGDGGEAAAKGSSGGTLNLEDEYRLYETSAEPEVSPGSTWLSDFPQAWAETGGMGLAVRQAPLIIPLKATSTPVSIKQYPMSQEAKLGIKPHIQRLLDQGILVPCQSPWNTPLLPVKKPGTNDYRPVQDLREVNKRVEDIHPTVPNPYNLLSGLPPSHRWYTVLDLKDAFFCLRLHPTSQPLFAFEWRDPGMGISGQLTWTRLPQGFKNSPTLFNEALHRDLADFRIQHPDLILLQYVDDILLAATSELDCQQGTRALLLTLGNLGYRASAKKAQLCQKQVKYLGYLLKEGQRWLTEARKETVMGQPTPKTPRQLREFLGTAGFCRLWIPGFAEMAAPLYPLTKPGTLFNWGPDQQKAYQEIKQALLTAPALGLPDLTKPFELFVDEKQGYAKGVLTQKLGPWRRPVAYLSKKLDPVAAGWPPCLRMVAAIAVLRKDAGKLTMGQPLVILAPHAVEALVKQPPDRWLSNARMTHYQAMLLDTDRVQFGPVVALNPATLLPLPEEGAPHDCLEILAETHGTRPDLTDQPIPDADHTWYTDGSSFLQEGQRKAGAAVTTETEVIWARALPAGTSAQRAELIALTQALKMAEGKRLNVYTDSRYAFATAHIHGEIYRRRGWLTSEGREIKNKSEILALLKALFLPKRLSIIHCLGHQKGDSAEARGNRLADQAAREAAIKTPPDTSTLLAGKRTADGSEFEKRTADGSEFESPKKKAKVE

SEQ ID NO: 6738 - protein, 2093 aa, synthetic construct; identical to SEQ ID NO: 4512

SEQ ID NO: 6739 - protein, 2093 aa, synthetic construct
MPAAKRVKLDGGDKKYSIGLDIGTNSVGWAVITDEYKVPSKKFKVLGNTDRHSIKKNLIGALLFDSGETAEATRLKRTARRRYTRRKNRICYLQEIFSNEMAKVDDSFFHRLEESFLVEEDKKHERHPIFGNIVDEVAYHEKYPTIYHLRKKLVDSTDKADLRLIYLALAHMIKFRGHFLIEGDLNPDNSDVDKLFIQLVQTYNQLFEENPINASGVDAKAILSARLSKSRRLENLIAQLPGEKKNGLFGNLIALSLGLTPNFKSNFDLAEDAKLQLSKDTYDDDLDNLLAQIGDQYADLFLAAKNLSDAILLSDILRVNTEITKAPLSASMIKRYDEHHQDLTLLKALVRQQLPEKYKEIFFDQSKNGYAGYIDGGASQEEFYKFIKPILEKMDGTEELLVKLNREDLLRKQRTFDNGSIPHQIHLGELHAILRRQEDFYPFLKDNREKIEKILTFRIPYYVGPLARGNSRFAWMTRKSEETITPWNFEEVVDKGASAQSFIERMTNFDKNLPNEKVLPKHSLLYEYFTVYNELTKVKYVTEGMRKPAFLSGEQKKAIVDLLFKTNRKVTVKQLKEDYFKKIECFDSVEISGVEDRFNASLGTYHDLLKIIKDKDFLDNEENEDILEDIVLTLTLFEDREMIEERLKTYAHLFDDKVMKQLKRRRYTGWGRLSRKLINGIRDKQSGKTILDFLKSDGFANRNFMQLIHDDSLTFKEDIQKAQVSGQGDSLHEHIANLAGSPAIKKGILQTVKVVDELVKVMGRHKPENIVIEMARENQTTQKGQKNSRERMKRIEEGIKELGSQILKEHPVENTQLQNEKLYLYYLQNGRDMYVDQELDINRLSDYDVDHIVPQSFLKDDSIDNKVLTRSDKARGKSDNVPSEEVVKKMKNYWRQLLNAKLITQRKFDNLTKAERGGLSELDKAGFIKRQLVETRQITKHVAQILDSRMNTKYDENDKLIREVKVITLKSKLVSDFRKDFQFYKVREINNYHHAHDAYLNAVVGTALIKKYPKLESEFVYGDYKVYDVRKMIAKSEQEIGKATAKYFFYSNIMNFFKTEITLANGEIRKRPLIETNGETGEIVWDKGRDFATVRKVLSMPQVNIVKKTEVQTGGFSKESILPKRNSDKLIARKKDWDPKKYGGFDSPTVAYSVLVVAKVEKGKSKKLKSVKELLGITIMERSSFEKNPIDFLEAKGYKEVKKDLIIKLPKYSLFELENGRKRMLASAGELQKGNELALPSKYVNFLYLASHYEKLKGSPEDNEQKQLFVEQHKHYLDEIIEQISEFSKRVILADANLDKVLSAYNKHRDKPIREQAENIIHLFTLTNLGAPAAFKYFDTTIDRKRYTSTKEVLDATLIHQSITGLYETRIDLSQLGGDGGEAAAKGSSGGTLGIEDEYRLHETSTEPDVSLGSTWLSDFPQAWAETGGMGLAVRQAPLIIPLKATSTPVSIQQYPMSHEARLGIKPHIQRLLDQGILVPCQSPWNTPLLPVKKPGTNDYRPVQDLREVNKRVEDIHPTVPNPYNLLSGLPPSHQWYTVLDLKDAFFCLRLHPTSQPLFAFEWRDPGMGISGQLTWTRLPQGFKNSPTLFDEALHRDLADFRIQHPDLILLQYVDDILLAATSELDCQQGTRALLQTLGDLGYRASAKKAQICQKQVKYLGYLLREGQRWLTEARKETVMGQPVPKTPRQLREFLGTAGFCRLWIPGFAEMAAPLYPLTKTGTLFSWGPDQQKAYQEIKQALLTAPALGLPDLTKPFELFVDEKQGYAKGVLTQKLGPWRRPVAYLSKKLDPVAAGWPPCLRMVAAIAVLTKDAGKLTMGQPLVILAPHAVEALVKQPPDRWLSNARMTHYQAMLLDTDRVQFGPVVALNPATLLPLPEEGAPHDCLEILAETHGTRPDLTDQPIPDADHTWYTDGSSFLQEGQRKAGAAVTTETEVIWAGALPAGTSAQRAELIALTQALKMAEGKRLNVYTDSRYAFATAHIHGEIYRRRGLLTSEGREIKNKSEILALLKALFLPKRLSIIHCLGHQKGDSAEARGNRLADQAAREAAIKTPPDTSTLLAGKRTADGSEFEKRTADGSEFESPKKKAKVE

SEQ ID NO: 6740 - protein, 2093 aa, synthetic construct
MPAAKRVKLDGGDKKYSIGLDIGTNSVGWAVITDEYKVPSKKFKVLGNTDRHSIKKNLIGALLFDSGETAEATRLKRTARRRYTRRKNRICYLQEIFSNEMAKVDDSFFHRLEESFLVEEDKKHERHPIFGNIVDEVAYHEKYPTIYHLRKKLVDSTDKADLRLIYLALAHMIKFRGHFLIEGDLNPDNSDVDKLFIQLVQTYNQLFEENPINASGVDAKAILSARLSKSRRLENLIAQLPGEKKNGLFGNLIALSLGLTPNFKSNFDLAEDAKLQLSKDTYDDDLDNLLAQIGDQYADLFLAAKNLSDAILLSDILRVNTEITKAPLSASMIKRYDEHHQDLTLLKALVRQQLPEKYKEIFFDQSKNGYAGYIDGGASQEEFYKFIKPILEKMDGTEELLVKLNREDLLRKQRTFDNGSIPHQIHLGELHAILRRQEDFYPFLKDNREKIEKILTFRIPYYVGPLARGNSRFAWMTRKSEETITPWNFEEVVDKGASAQSFIERMTNFDKNLPNEKVLPKHSLLYEYFTVYNELTKVKYVTEGMRKPAFLSGEQKKAIVDLLFKTNRKVTVKQLKEDYFKKIECFDSVEISGVEDRFNASLGTYHDLLKIIKDKDFLDNEENEDILEDIVLTLTLFEDREMIEERLKTYAHLFDDKVMKQLKRRRYTGWGRLSRKLINGIRDKQSGKTILDFLKSDGFANRNFMQLIHDDSLTFKEDIQKAQVSGQGDSLHEHIANLAGSPAIKKGILQTVKVVDELVKVMGRHKPENIVIEMARENQTTQKGQKNSRERMKRIEEGIKELGSQILKEHPVENTQLQNEKLYLYYLQNGRDMYVDQELDINRLSDYDVDHIVPQSFLKDDSIDNKVLTRSDKARGKSDNVPSEEVVKKMKNYWRQLLNAKLITQRKFDNLTKAERGGLSELDKAGFIKRQLVETRQITKHVAQILDSRMNTKYDENDKLIREVKVITLKSKLVSDFRKDFQFYKVREINNYHHAHDAYLNAVVGTALIKKYPKLESEFVYGDYKVYDVRKMIAKSEQEIGKATAKYFFYSNIMNFFKTEITLANGEIRKRPLIETNGETGEIVWDKGRDFATVRKVLSMPQVNIVKKTEVQTGGFSKESILPKRNSDKLIARKKDWDPKKYGGFDSPTVAYSVLVVAKVEKGKSKKLKSVKELLGITIMERSSFEKNPIDFLEAKGYKEVKKDLIIKLPKYSLFELENGRKRMLASAGELQKGNELALPSKYVNFLYLASHYEKLKGSPEDNEQKQLFVEQHKHYLDEIIEQISEFSKRVILADANLDKVLSAYNKHRDKPIREQAENIIHLFTLTNLGAPAAFKYFDTTIDRKRYTSTKEVLDATLIHQSITGLYETRIDLSQLGGDGGEAAAKGSSGGTLNIEDEYRLHEISTEPDVSPGSTWLSDFPQAWAETGGMGLAVRQAPLIIPLKATSTPVSIKQYPMSQEAKLGIKPHIQRLLDQGILVPCQSPWNTPLLPVKKPGTNDYRPVQGLREVNKRVEDIHPTVPNPYNLLSGLPTSHRWYTVLDLKDAFFCLRLHPTSQPLFASEWRDPGMGISGQLTWTRLPQGFKNSPTLFNEALHRGLADFRIQHPDLILLQYVDDLLLAATSELDCQQGTRALLKTLGNLGYRASAKKAQICQKQVKYLGYLLREGQRWLTEARKETVMGQPTPKTPRQLREFLGTAGFCRLWIPRFAEMAAPLYPLTKPGTLFNWGPDQQKAYHEIKQALLTAPALGLPDLTKPFELFVDEKQGYAKGVLTQKLGPWRRPVAYLSKKLDPVAAGWPPCLRMVAAIAVLTKDAGKLTMGQPLVILAPHAVEALVKQPPDRWLSNARMTHYQAMLLDTDRVQFGPVVALNPATLLPLPEEGAPHDCLEILAETHGTEPDLTDQPIPDADHTWYTDGSSFLQEGQRKAGAAVTTETEVIWARALPAGTSAQRAELIALTQALKMAEGKRLNVYTDSRYAFATAHIHGEIYKRRGWLTSEGREIKNKSEILALLKALFLPKRLSIIHCLGHQKGDSAEARGNRLADQAAREAAIKTPPDTSTLLAGKRTADGSEFEKRTADGSEFESPKKKAKVE

SEQ ID NO: 6741 - protein, 2087 aa, synthetic construct
MPAAKRVKLDGGDKKYSIGLDIGTNSVGWAVITDEYKVPSKKFKVLGNTDRHSIKKNLIGALLFDSGETAEATRLKRTARRRYTRRKNRICYLQEIFSNEMAKVDDSFFHRLEESFLVEEDKKHERHPIFGNIVDEVAYHEKYPTIYHLRKKLVDSTDKADLRLIYLALAHMIKFRGHFLIEGDLNPDNSDVDKLFIQLVQTYNQLFEENPINASGVDAKAILSARLSKSRRLENLIAQLPGEKKNGLFGNLIALSLGLTPNFKSNFDLAEDAKLQLSKDTYDDDLDNLLAQIGDQYADLFLAAKNLSDAILLSDILRVNTEITKAPLSASMIKRYDEHHQDLTLLKALVRQQLPEKYKEIFFDQSKNGYAGYIDGGASQEEFYKFIKPILEKMDGTEELLVKLNREDLLRKQRTFDNGSIPHQIHLGELHAILRRQEDFYPFLKDNREKIEKILTFRIPYYVGPLARGNSRFAWMTRKSEETITPWNFEEVVDKGASAQSFIERMTNFDKNLPNEKVLPKHSLLYEYFTVYNELTKVKYVTEGMRKPAFLSGEQKKAIVDLLFKTNRKVTVKQLKEDYFKKIECFDSVEISGVEDRFNASLGTYHDLLKIIKDKDFLDNEENEDILEDIVLTLTLFEDREMIEERLKTYAHLFDDKVMKQLKRRRYTGWGRLSRKLINGIRDKQSGKTILDFLKSDGFANRNFMQLIHDDSLTFKEDIQKAQVSGQGDSLHEHIANLAGSPAIKKGILQTVKVVDELVKVMGRHKPENIVIEMARENQTTQKGQKNSRERMKRIEEGIKELGSQILKEHPVENTQLQNEKLYLYYLQNGRDMYVDQELDINRLSDYDVDHIVPQSFLKDDSIDNKVLTRSDKARGKSDNVPSEEVVKKMKNYWRQLLNAKLITQRKFDNLTKAERGGLSELDKAGFIKRQLVETRQITKHVAQILDSRMNTKYDENDKLIREVKVITLKSKLVSDFRKDFQFYKVREINNYHHAHDAYLNAVVGTALIKKYPKLESEFVYGDYKVYDVRKMIAKSEQEIGKATAKYFFYSNIMNFFKTEITLANGEIRKRPLIETNGETGEIVWDKGRDFATVRKVLSMPQVNIVKKTEVQTGGFSKESILPKRNSDKLIARKKDWDPKKYGGFDSPTVAYSVLVVAKVEKGKSKKLKSVKELLGITIMERSSFEKNPIDFLEAKGYKEVKKDLIIKLPKYSLFELENGRKRMLASAGELQKGNELALPSKYVNFLYLASHYEKLKGSPEDNEQKQLFVEQHKHYLDEIIEQISEFSKRVILADANLDKVLSAYNKHRDKPIREQAENIIHLFTLTNLGAPAAFKYFDTTIDRKRYTSTKEVLDATLIHQSITGLYETRIDLSQLGGDGGEAAAKGSSGGTLQLDDEYRLYSPLVKPDQNIQFWLEQFPQAWAETAGMGLAKQVPPQVIQLKASATPVSVRQYPLSKEAQEGIRPHVQRLIQQGILVPVQSPWNTPLLPVRKPGTNDYRPVQDLREVNKRVQDIHPTVPNPYNLLCALPPQRSWYTVLDLKDAFFCLRLHPTSQPLFAFEWRDPGTGRTGQLTWTRLPQGFKNSPTIFDEALHRDLANFRIQHPQVTLLQYVDDLLLAGATKQDCLEGTKALLLELSDLGYRASAKKAQICRREVTYLGYSLRDGQRWLTEARKKTVVQIPAPTTAKQVREFLGTAGFCRLWIPGFATLAAPLYPLTKEKGEFSWAPEHQKAFDAIKKALLSAPALALPDVTKPFTLYVDERKGVARGVLTQTLGPWRRPVAYLSKKLDPVASGWPVCLKAIAAVAILVKDADKLTLGQNITVIAPHALENIVRQPPDRWMTNARMTHYQSLLLTERVTFAPPAALNPATLLPEETDEPVTHDCHQLLIEETGVRKDLTDIPLTGEVLTWFTDGSSYVVEGKRMAGAAVVDGTRTIWASSLPEGTSAQKAELMALTQALRLAEGKSINIYTDSRYAFATAHVHGAIYKQRGLLTSAGREIKNKEEILSLLEALHLPKRLAIIHCPGHQKAKDPISRGNQMADRVAKQAAQGVNLLAGKRTADGSEFEKRTADGSEFESPKKKAKVE

SEQ ID NO: 6742 - protein, 2014 aa, synthetic construct
MPAAKRVKLDGGDKKYSIGLDIGTNSVGWAVITDEYKVPSKKFKVLGNTDRHSIKKNLIGALLFDSGETAEATRLKRTARRRYTRRKNRICYLQEIFSNEMAKVDDSFFHRLEESFLVEEDKKHERHPIFGNIVDEVAYHEKYPTIYHLRKKLVDSTDKADLRLIYLALAHMIKFRGHFLIEGDLNPDNSDVDKLFIQLVQTYNQLFEENPINASGVDAKAILSARLSKSRRLENLIAQLPGEKKNGLFGNLIALSLGLTPNFKSNFDLAEDAKLQLSKDTYDDDLDNLLAQIGDQYADLFLAAKNLSDAILLSDILRVNTEITKAPLSASMIKRYDEHHQDLTLLKALVRQQLPEKYKEIFFDQSKNGYAGYIDGGASQEEFYKFIKPILEKMDGTEELLVKLNREDLLRKQRTFDNGSIPHQIHLGELHAILRRQEDFYPFLKDNREKIEKILTFRIPYYVGPLARGNSRFAWMTRKSEETITPWNFEEVVDKGASAQSFIERMTNFDKNLPNEKVLPKHSLLYEYFTVYNELTKVKYVTEGMRKPAFLSGEQKKAIVDLLFKTNRKVTVKQLKEDYFKKIECFDSVEISGVEDRFNASLGTYHDLLKIIKDKDFLDNEENEDILEDIVLTLTLFEDREMIEERLKTYAHLFDDKVMKQLKRRRYTGWGRLSRKLINGIRDKQSGKTILDFLKSDGFANRNFMQLIHDDSLTFKEDIQKAQVSGQGDSLHEHIANLAGSPAIKKGILQTVKVVDELVKVMGRHKPENIVIEMARENQTTQKGQKNSRERMKRIEEGIKELGSQILKEHPVENTQLQNEKLYLYYLQNGRDMYVDQELDINRLSDYDVDHIVPQSFLKDDSIDNKVLTRSDKARGKSDNVPSEEVVKKMKNYWRQLLNAKLITQRKFDNLTKAERGGLSELDKAGFIKRQLVETRQITKHVAQILDSRMNTKYDENDKLIREVKVITLKSKLVSDFRKDFQFYKVREINNYHHAHDAYLNAVVGTALIKKYPKLESEFVYGDYKVYDVRKMIAKSEQEIGKATAKYFFYSNIMNFFKTEITLANGEIRKRPLIETNGETGEIVWDKGRDFATVRKVLSMPQVNIVKKTEVQTGGFSKESILPKRNSDKLIARKKDWDPKKYGGFDSPTVAYSVLVVAKVEKGKSKKLKSVKELLGITIMERSSFEKNPIDFLEAKGYKEVKKDLIIKLPKYSLFELENGRKRMLASAGELQKGNELALPSKYVNFLYLASHYEKLKGSPEDNEQKQLFVEQHKHYLDEIIEQISEFSKRVILADANLDKVLSAYNKHRDKPIREQAENIIHLFTLTNLGAPAAFKYFDTTIDRKRYTSTKEVLDATLIHQSITGLYETRIDLSQLGGDGGEAAAKGSSGGPRSRAIDIPVPHADKISWKITDPVWVDQWPLTYEKTLAAIALVQEQLAAGHIEPTNSPWNTPIFIIKKKSGSWRLLQDLRAVNKVMVPMGALQPGLPSPVAPPLNYHKIVIDLKDCFFTIPLHPEDRPYFAFSVPQINFQSPMPRYQWKVLPQGMANSPTLCQKFVAAAIAPVRSQWPEAYILHYMDDILLACDSAEAAKACYAHIISCLTSYGLKIAPDKVQVSEPFSYLGFELHHQQVFTPRVCLKTDHLKTLNDFQKLLGDIQWLRPYLKLPTSALVPLNNILKPDPNPLSVRALTPEAKQSLALINKAIQNQSVQQISYNLPLVLLLLPTPHTPTAVFWQPNGTDPTKNGSPLLWLHLPASPSKVLLTYPSLLAMLIIKGRYTGRQLFGRDPHSIIIPYTQDQLTWLLQTSDEWAIALSSFTGDIDNHYPSDPVIQFAKLHQFIFPKITKCAPIPQATLVFTDGSSNGIAAYVIDNQPISIKSPYLSAQLVELYAILQVFTVLAHQPFNLYTDSAYIAQSVPLLETVPFIKSSTNATPLFSKLQQLILNRQHPFFIGHLRAHLNLPGPLAEGNALADAATQIFPIISDAGKRTADGSEFEKRTADGSEFESPKKKAKVE

SEQ ID NO: 6743 - protein, 2072 aa, synthetic construct
MPAAKRVKLDGGDKKYSIGLDIGTNSVGWAVITDEYKVPSKKFKVLGNTDRHSIKKNLIGALLFDSGETAEATRLKRTARRRYTRRKNRICYLQEIFSNEMAKVDDSFFHRLEESFLVEEDKKHERHPIFGNIVDEVAYHEKYPTIYHLRKKLVDSTDKADLRLIYLALAHMIKFRGHFLIEGDLNPDNSDVDKLFIQLVQTYNQLFEENPINASGVDAKAILSARLSKSRRLENLIAQLPGEKKNGLFGNLIALSLGLTPNFKSNFDLAEDAKLQLSKDTYDDDLDNLLAQIGDQYADLFLAAKNLSDAILLSDILRVNTEITKAPLSASMIKRYDEHHQDLTLLKALVRQQLPEKYKEIFFDQSKNGYAGYIDGGASQEEFYKFIKPILEKMDGTEELLVKLNREDLLRKQRTFDNGSIPHQIHLGELHAILRRQEDFYPFLKDNREKIEKILTFRIPYYVGPLARGNSRFAWMTRKSEETITPWNFEEVVDKGASAQSFIERMTNFDKNLPNEKVLPKHSLLYEYFTVYNELTKVKYVTEGMRKPAFLSGEQKKAIVDLLFKTNRKVTVKQLKEDYFKKIECFDSVEISGVEDRFNASLGTYHDLLKIIKDKDFLDNEENEDILEDIVLTLTLFEDREMIEERLKTYAHLFDDKVMKQLKRRRYTGWGRLSRKLINGIRDKQSGKTILDFLKSDGFANRNFMQLIHDDSLTFKEDIQKAQVSGQGDSLHEHIANLAGSPAIKKGILQTVKVVDELVKVMGRHKPENIVIEMARENQTTQKGQKNSRERMKRIEEGIKELGSQILKEHPVENTQLQNEKLYLYYLQNGRDMYVDQELDINRLSDYDVDHIVPQSFLKDDSIDNKVLTRSDKARGKSDNVPSEEVVKKMKNYWRQLLNAKLITQRKFDNLTKAERGGLSELDKAGFIKRQLVETRQITKHVAQILDSRMNTKYDENDKLIREVKVITLKSKLVSDFRKDFQFYKVREINNYHHAHDAYLNAVVGTALIKKYPKLESEFVYGDYKVYDVRKMIAKSEQEIGKATAKYFFYSNIMNFFKTEITLANGEIRKRPLIETNGETGEIVWDKGRDFATVRKVLSMPQVNIVKKTEVQTGGFSKESILPKRNSDKLIARKKDWDPKKYGGFDSPTVAYSVLVVAKVEKGKSKKLKSVKELLGITIMERSSFEKNPIDFLEAKGYKEVKKDLIIKLPKYSLFELENGRKRMLASAGELQKGNELALPSKYVNFLYLASHYEKLKGSPEDNEQKQLFVEQHKHYLDEIIEQISEFSKRVILADANLDKVLSAYNKHRDKPIREQAENIIHLFTLTNLGAPAAFKYFDTTIDRKRYTSTKEVLDATLIHQSITGLYETRIDLSQLGGDGGEAAAKGSSGGSCQTKNTLNIDEYLLQFPDQLWASLPTDIGRMLVPPITIKIKDNASLPSIRQYPLPKDKTEGLRPLISSLENQGILIKCHSPCNTPIFPIKKAGRDEYRMIHDLRAINNIVAPLTAVVASPTTVLSNLAPSLHWFTVIDLSNAFFSVPIHKDSQYLFAFTFEGHQYTWTVLPQGFIHSPTLFSQALYQSLHKIKFKISSEICIYMDDVLIASKDRDTNLKDTAVMLQHLASEGHKVSKKKLQLCQQEVVYLGQLLTPEGRKILPDRKVTVSQFQQPTTIRQIRAFLGLVGYCRHWIPEFSIHSKFLEKQLKKDTAEPFQLDDQQVEAFNKLKHAITTAPVLVVPDPAKPFQLYTSHSEHASIAVLTQKHAGRTRPIAFLSSKFDAIESGLPPCLKACASIHRSLTQADSFILGAPLIIYTTHAICTLLQRDRSQLVTASRFSKWEADLLRPELTFVACSAVSPAHLYMQSCENNIPPHDCVLLTHTISRPRPDLSDLPIPDPDMTLFSDGSYTTGRGGAAVVMHRPVTDDFIIIHQQPGGASAQTAELLALAAACHLATDKTVNIYTDSRYAYGVVHDFGHLWMHRGFVTSAGTPIKNHKEIEYLLKQIMKPKQVSVIKIEAHTKGVSMEVRGNAAADEAAKNAVFLVQRAGKRTADGSEFEKRTADGSEFESPKKKAKVE

SEQ ID NO: 6744 - protein, 2093 aa, synthetic construct
MPAAKRVKLDGGDKKYSIGLDIGTNSVGWAVITDEYKVPSKKFKVLGNTDRHSIKKNLIGALLFDSGETAEATRLKRTARRRYTRRKNRICYLQEIFSNEMAKVDDSFFHRLEESFLVEEDKKHERHPIFGNIVDEVAYHEKYPTIYHLRKKLVDSTDKADLRLIYLALAHMIKFRGHFLIEGDLNPDNSDVDKLFIQLVQTYNQLFEENPINASGVDAKAILSARLSKSRRLENLIAQLPGEKKNGLFGNLIALSLGLTPNFKSNFDLAEDAKLQLSKDTYDDDLDNLLAQIGDQYADLFLAAKNLSDAILLSDILRVNTEITKAPLSASMIKRYDEHHQDLTLLKALVRQQLPEKYKEIFFDQSKNGYAGYIDGGASQEEFYKFIKPILEKMDGTEELLVKLNREDLLRKQRTFDNGSIPHQIHLGELHAILRRQEDFYPFLKDNREKIEKILTFRIPYYVGPLARGNSRFAWMTRKSEETITPWNFEEVVDKGASAQSFIERMTNFDKNLPNEKVLPKHSLLYEYFTVYNELTKVKYVTEGMRKPAFLSGEQKKAIVDLLFKTNRKVTVKQLKEDYFKKIECFDSVEISGVEDRFNASLGTYHDLLKIIKDKDFLDNEENEDILEDIVLTLTLFEDREMIEERLKTYAHLFDDKVMKQLKRRRYTGWGRLSRKLINGIRDKQSGKTILDFLKSDGFANRNFMQLIHDDSLTFKEDIQKAQVSGQGDSLHEHIANLAGSPAIKKGILQTVKVVDELVKVMGRHKPENIVIEMARENQTTQKGQKNSRERMKRIEEGIKELGSQILKEHPVENTQLQNEKLYLYYLQNGRDMYVDQELDINRLSDYDVDHIVPQSFLKDDSIDNKVLTRSDKARGKSDNVPSEEVVKKMKNYWRQLLNAKLITQRKFDNLTKAERGGLSELDKAGFIKRQLVETRQITKHVAQILDSRMNTKYDENDKLIREVKVITLKSKLVSDFRKDFQFYKVREINNYHHAHDAYLNAVVGTALIKKYPKLESEFVYGDYKVYDVRKMIAKSEQEIGKATAKYFFYSNIMNFFKTEITLANGEIRKRPLIETNGETGEIVWDKGRDFATVRKVLSMPQVNIVKKTEVQTGGFSKESILPKRNSDKLIARKKDWDPKKYGGFDSPTVAYSVLVVAKVEKGKSKKLKSVKELLGITIMERSSFEKNPIDFLEAKGYKEVKKDLIIKLPKYSLFELENGRKRMLASAGELQKGNELALPSKYVNFLYLASHYEKLKGSPEDNEQKQLFVEQHKHYLDEIIEQISEFSKRVILADANLDKVLSAYNKHRDKPIREQAENIIHLFTLTNLGAPAAFKYFDTTIDRKRYTSTKEVLDATLIHQSITGLYETRIDLSQLGGDGGEAAAKGSSGGTLNIEDEYRLHETSKEPDVPLGSTWLSDFPQAWAETGGMGLAVRQAPLIIPLKATSTPVSIKQYPMSQEARLGIKPHIQRLLDQGILVPCQSPWNTPLLPVKKPGTNDYRPVQDLREVNKRVEDIHPTVPNPYNLLSGLPPSHQWYTVLDLKDAFFCLRLHPTSQPLFAFEWRDPEMGISGQLTWTRLPQGFKNSPTLFNEALHRDLADFRIQHPDLILLQYVDDLLLAATSEQDCQRGTRALLQTLGNLGYRASAKKAQICQKQVKYLGYLLKEGQRWLTEARKETVMGQPTPKTPRQLREFLGTAGFCRLWIPGFAEMAAPLYPLTKPGTLFNWGPDQQKAYQEIKQALLTAPALGLPDLTKPFELFVDEKQGYAKGVLTQKLGPWRRPVAYLSKKLDPVAAGWPPCLRMVAAIAVLTKDAGKLTMGQPLVILAPHAVEALVKQPPDRWLSNARMTHYQAMLLDTDRVQFGPVVALNPATLLPLPEKEAPHDCLEILAETHGTRPDLTDQPIPDADYTWYTDGSSFLQEGQRRAGAAVTTETEVIWARALPAGTSAQRAELIALTQALKMAEGKKLNVYTDSRYAFATAHVHGEIYRRRGWLTSEGREIKNKNEILALLKALFLPKRLSIIHCPGHQKGNSAEARGNRMADQAAREAAMKAVLETSTLLAGKRTADGSEFEKRTADGSEFESPKKKAKVE

SEQ ID NO: 6745 - protein, 2093 aa, synthetic construct
MPAAKRVKLDGGDKKYSIGLDIGTNSVGWAVITDEYKVPSKKFKVLGNTDRHSIKKNLIGALLFDSGETAEATRLKRTARRRYTRRKNRICYLQEIFSNEMAKVDDSFFHRLEESFLVEEDKKHERHPIFGNIVDEVAYHEKYPTIYHLRKKLVDSTDKADLRLIYLALAHMIKFRGHFLIEGDLNPDNSDVDKLFIQLVQTYNQLFEENPINASGVDAKAILSARLSKSRRLENLIAQLPGEKKNGLFGNLIALSLGLTPNFKSNFDLAEDAKLQLSKDTYDDDLDNLLAQIGDQYADLFLAAKNLSDAILLSDILRVNTEITKAPLSASMIKRYDEHHQDLTLLKALVRQQLPEKYKEIFFDQSKNGYAGYIDGGASQEEFYKFIKPILEKMDGTEELLVKLNREDLLRKQRTFDNGSIPHQIHLGELHAILRRQEDFYPFLKDNREKIEKILTFRIPYYVGPLARGNSRFAWMTRKSEETITPWNFEEVVDKGASAQSFIERMTNFDKNLPNEKVLPKHSLLYEYFTVYNELTKVKYVTEGMRKPAFLSGEQKKAIVDLLFKTNRKVTVKQLKEDYFKKIECFDSVEISGVEDRFNASLGTYHDLLKIIKDKDFLDNEENEDILEDIVLTLTLFEDREMIEERLKTYAHLFDDKVMKQLKRRRYTGWGRLSRKLINGIRDKQSGKTILDFLKSDGFANRNFMQLIHDDSLTFKEDIQKAQVSGQGDSLHEHIANLAGSPAIKKGILQTVKVVDELVKVMGRHKPENIVIEMARENQTTQKGQKNSRERMKRIEEGIKELGSQILKEHPVENTQLQNEKLYLYYLQNGRDMYVDQELDINRLSDYDVDHIVPQSFLKDDSIDNKVLTRSDKARGKSDNVPSEEVVKKMKNYWRQLLNAKLITQRKFDNLTKAERGGLSELDKAGFIKRQLVETRQITKHVAQILDSRMNTKYDENDKLIREVKVITLKSKLVSDFRKDFQFYKVREINNYHHAHDAYLNAVVGTALIKKYPKLESEFVYGDYKVYDVRKMIAKSEQEIGKATAKYFFYSNIMNFFKTEITLANGEIRKRPLIETNGETGEIVWDKGRDFATVRKVLSMPQVNIVKKTEVQTGGFSKESILPKRNSDKLIARKKDWDPKKYGGFDSPTVAYSVLVVAKVEKGKSKKLKSVKELLGITIMERSSFEKNPIDFLEAKGYKEVKKDLIIKLPKYSLFELENGRKRMLASAGELQKGNELALPSKYVNFLYLASHYEKLKGSPEDNEQKQLFVEQHKHYLDEIIEQISEFSKRVILADANLDKVLSAYNKHRDKPIREQAENIIHLFTLTNLGAPAAFKYFDTTIDRKRYTSTKEVLDATLIHQSITGLYETRIDLSQLGGDGGGSSPAPGGTAPLEEEYRLFLEAPIQNVTLLEQWKREIPKVWAEINPPGLASTQAPIHVQLLSTALPVRVRQYPITLEAKRSLRETIRKFRAAGILRPVHSPWNTPLLPVRKSGTSEYRMVQDLREVNKRVETIHPTVPNPYTLLSLLPPDRIWYSVLDLKDAFFCIPLAPESQLIFAFEWADAEEGESGQLTWTRLPQGFKNSPTLFNEALNRDLQGFRLDHPSVSLLQYVDDLLIAADTQAACLSATRDLLMTLAELGYRVSGKKAQLCQEEVTYLGFKIHKGSRSLSNSRTQAILQIPVPKTKRQVREFLGTIGYCRLWIPGFAELAQPLYAATRPGNDPLVWGEKEEEAFQSLKLALTQPPALALPSLDKPFQLFVEETSGAAKGVLTQALGPWKRPVAYLSKRLDPVAAGWPRCLRAIAAAALLTREASKLTFGQDIEITSSHNLESLLRSPPDKWLTNARITQYQVLLLDPPRVRFKQTAALNPATLLPETDDTLPIHHCLDTLDSLTSTRPDLTDQPLAQAEATLFTDGSSYIRDGKRYAGAAVVTLDSVIWAEPLPIGTSAQKAELIALTKALEWSKDKSVNIYTDSRYAFATLHVHGMIYRERGWLTAGGKAIKNAPEILALLTAVWLPKRVAVMHCKGHQKDDAPTSTGNRRADEVAREVAIRPLSTQATISAGKRTADGSEFEKRTADGSEFESPKKKAKVE

SEQ ID NO: 6746 - protein, 2097 aa, synthetic construct
MPAAKRVKLDGGDKKYSIGLDIGTNSVGWAVITDEYKVPSKKFKVLGNTDRHSIKKNLIGALLFDSGETAEATRLKRTARRRYTRRKNRICYLQEIFSNEMAKVDDSFFHRLEESFLVEEDKKHERHPIFGNIVDEVAYHEKYPTIYHLRKKLVDSTDKADLRLIYLALAHMIKFRGHFLIEGDLNPDNSDVDKLFIQLVQTYNQLFEENPINASGVDAKAILSARLSKSRRLENLIAQLPGEKKNGLFGNLIALSLGLTPNFKSNFDLAEDAKLQLSKDTYDDDLDNLLAQIGDQYADLFLAAKNLSDAILLSDILRVNTEITKAPLSASMIKRYDEHHQDLTLLKALVRQQLPEKYKEIFFDQSKNGYAGYIDGGASQEEFYKFIKPILEKMDGTEELLVKLNREDLLRKQRTFDNGSIPHQIHLGELHAILRRQEDFYPFLKDNREKIEKILTFRIPYYVGPLARGNSRFAWMTRKSEETITPWNFEEVVDKGASAQSFIERMTNFDKNLPNEKVLPKHSLLYEYFTVYNELTKVKYVTEGMRKPAFLSGEQKKAIVDLLFKTNRKVTVKQLKEDYFKKIECFDSVEISGVEDRFNASLGTYHDLLKIIKDKDFLDNEENEDILEDIVLTLTLFEDREMIEERLKTYAHLFDDKVMKQLKRRRYTGWGRLSRKLINGIRDKQSGKTILDFLKSDGFANRNFMQLIHDDSLTFKEDIQKAQVSGQGDSLHEHIANLAGSPAIKKGILQTVKVVDELVKVMGRHKPENIVIEMARENQTTQKGQKNSRERMKRIEEGIKELGSQILKEHPVENTQLQNEKLYLYYLQNGRDMYVDQELDINRLSDYDVDHIVPQSFLKDDSIDNKVLTRSDKARGKSDNVPSEEVVKKMKNYWRQLLNAKLITQRKFDNLTKAERGGLSELDKAGFIKRQLVETRQITKHVAQILDSRMNTKYDENDKLIREVKVITLKSKLVSDFRKDFQFYKVREINNYHHAHDAYLNAVVGTALIKKYPKLESEFVYGDYKVYDVRKMIAKSEQEIGKATAKYFFYSNIMNFFKTEITLANGEIRKRPLIETNGETGEIVWDKGRDFATVRKVLSMPQVNIVKKTEVQTGGFSKESILPKRNSDKLIARKKDWDPKKYGGFDSPTVAYSVLVVAKVEKGKSKKLKSVKELLGITIMERSSFEKNPIDFLEAKGYKEVKKDLIIKLPKYSLFELENGRKRMLASAGELQKGNELALPSKYVNFLYLASHYEKLKGSPEDNEQKQLFVEQHKHYLDEIIEQISEFSKRVILADANLDKVLSAYNKHRDKPIREQAENIIHLFTLTNLGAPAAFKYFDTTIDRKRYTSTKEVLDATLIHQSITGLYETRIDLSQLGGDGGGSSPAPGGTVSLQDEHRLFDIPVTTSLPDVWLQDFPQAWAETGGLGRAKCQAPIIIDLKPTAVPVSIKQYPMSLEAHMGIRQHIIKFLELGVLRPCRSPWNTPLLPVKKPGTQDYRPVQDLREINKRTVDIHPTVPNPYNLLSTLKPDYSWYTVLDLKDAFFCLPLAPQSQELFAFEWKDPERGISGQLTWTRLPQGFKNSPTLFNEALHRDLTDFRTQHPEVTLLQYVDDLLLAAPTKKACTQGTRHLLQELGEKGYRASAKKAQICQTKVTYLGYILSEGKRWLTPGRIETVARIPPPRNPREVREFLGKAGFCRLFIPGFAELAAPLYALTKPSTPFTWQTEHQLAFEALKKALLSAPALGLPDTSKPFTLFLDERQGIAKGVLTQKLGPWKRPVAYLSKKLDPVAAGWPPCLRIMAATAMLVKDSAKLTLGQPLTVITPHTLEAIVRQPPDRWITNARLTHYQALLLDTDRVQFGPPVTLNPATLLPVPENQPSPHDCRQVLAETHGTREDLKDQELPDADHTWYTDGSSYLDSGTRRAGAAVVDGHNTIWAQSLPPGTSAQKAELIALTKALELSKGKKANIYTDSRYAFATAHTHGSIYERRGWLTSEGKEIKNKAEIIALLKALFLPQEVAIIHCPGHQKGQDPVAVGNRQADRVARQAAMAEVLTLATEPDNTSHITAGKRTADGSEFEKRTADGSEFESPKKKAKVE

SEQ ID NO: 6747 - protein, 2082 aa, synthetic construct
MPAAKRVKLDGGDKKYSIGLDIGTNSVGWAVITDEYKVPSKKFKVLGNTDRHSIKKNLIGALLFDSGETAEATRLKRTARRRYTRRKNRICYLQEIFSNEMAKVDDSFFHRLEESFLVEEDKKHERHPIFGNIVDEVAYHEKYPTIYHLRKKLVDSTDKADLRLIYLALAHMIKFRGHFLIEGDLNPDNSDVDKLFIQLVQTYNQLFEENPINASGVDAKAILSARLSKSRRLENLIAQLPGEKKNGLFGNLIALSLGLTPNFKSNFDLAEDAKLQLSKDTYDDDLDNLLAQIGDQYADLFLAAKNLSDAILLSDILRVNTEITKAPLSASMIKRYDEHHQDLTLLKALVRQQLPEKYKEIFFDQSKNGYAGYIDGGASQEEFYKFIKPILEKMDGTEELLVKLNREDLLRKQRTFDNGSIPHQIHLGELHAILRRQEDFYPFLKDNREKIEKILTFRIPYYVGPLARGNSRFAWMTRKSEETITPWNFEEVVDKGASAQSFIERMTNFDKNLPNEKVLPKHSLLYEYFTVYNELTKVKYVTEGMRKPAFLSGEQKKAIVDLLFKTNRKVTVKQLKEDYFKKIECFDSVEISGVEDRFNASLGTYHDLLKIIKDKDFLDNEENEDILEDIVLTLTLFEDREMIEERLKTYAHLFDDKVMKQLKRRRYTGWGRLSRKLINGIRDKQSGKTILDFLKSDGFANRNFMQLIHDDSLTFKEDIQKAQVSGQGDSLHEHIANLAGSPAIKKGILQTVKVVDELVKVMGRHKPENIVIEMARENQTTQKGQKNSRERMKRIEEGIKELGSQILKEHPVENTQLQNEKLYLYYLQNGRDMYVDQELDINRLSDYDVDHIVPQSFLKDDSIDNKVLTRSDKARGKSDNVPSEEVVKKMKNYWRQLLNAKLITQRKFDNLTKAERGGLSELDKAGFIKRQLVETRQITKHVAQILDSRMNTKYDENDKLIREVKVITLKSKLVSDFRKDFQFYKVREINNYHHAHDAYLNAVVGTALIKKYPKLESEFVYGDYKVYDVRKMIAKSEQEIGKATAKYFFYSNIMNFFKTEITLANGEIRKRPLIETNGETGEIVWDKGRDFATVRKVLSMPQVNIVKKTEVQTGGFSKESILPKRNSDKLIARKKDWDPKKYGGFDSPTVAYSVLVVAKVEKGKSKKLKSVKELLGITIMERSSFEKNPIDFLEAKGYKEVKKDLIIKLPKYSLFELENGRKRMLASAGELQKGNELALPSKYVNFLYLASHYEKLKGSPEDNEQKQLFVEQHKHYLDEIIEQISEFSKRVILADANLDKVLSAYNKHRDKPIREQAENIIHLFTLTNLGAPAAFKYFDTTIDRKRYTSTKEVLDATLIHQSITGLYETRIDLSQLGGDGGGSSPAPGGVPWILKKPLELTIKLDLEEQQGTLLNNSILSKKGKEELKQLFEKYSALWQSWENQVGHRRIRPHKIATGTVKPTPQKQYHINPKAKPDIQIVINDLLKQGVLIQKESTMNTPVYPVPKPNGRWRMVLDYRAVNKVTPLIAVQNQHSYGILGSLFKGRYKTTIDLSNGFWAHPIVPEDYWITAFTWQGKQYCWTVLPQGFLNSPGLFTGDVVDLLQGIPNVEVYVDDVYISHDSEKEHLEYLDILFNRLKEAGYIISLKKSNIANSIVDFLGFQITNEGRGLTDTFKEKLENITAPTTLKQLQSILGLLNFARNFIPDFTELIAPLYALIPKSTKNYVPWQIEHSTTLETLITKLNGAEYLQGRKGDKTLIMKVNASYTTGYIRYYNEGEKKPISYVSIVFSKTELKFTELEKLLTTVHKGLLKALDLSMGQNIHVYSPIVSMQNIQKTPQTAKKALASRWLSWLSYLEDPRIRFFYDPQMPALKDLPAVDTGKDNKKHPSNFQHIFYTDGSAITSPTKEGHLNAGMGIVYFINKDGNLQKQQEWSISLGNHTAQFAEIAAFEFALKKCLPLGGNILVVTDSNYVAKAYNEELDVWASNGFVNNRKKPLKHISKWKSVADLKRLRPDVVVTHEPGHQKLDSSPHAYGNNLADQLATQASFKVHAGKRTADGSEFEKRTADGSEFESPKKKAKVE

SEQ ID NO: 6748 - protein, 2090 aa, synthetic construct
MPAAKRVKLDGGDKKYSIGLDIGTNSVGWAVITDEYKVPSKKFKVLGNTDRHSIKKNLIGALLFDSGETAEATRLKRTARRRYTRRKNRICYLQEIFSNEMAKVDDSFFHRLEESFLVEEDKKHERHPIFGNIVDEVAYHEKYPTIYHLRKKLVDSTDKADLRLIYLALAHMIKFRGHFLIEGDLNPDNSDVDKLFIQLVQTYNQLFEENPINASGVDAKAILSARLSKSRRLENLIAQLPGEKKNGLFGNLIALSLGLTPNFKSNFDLAEDAKLQLSKDTYDDDLDNLLAQIGDQYADLFLAAKNLSDAILLSDILRVNTEITKAPLSASMIKRYDEHHQDLTLLKALVRQQLPEKYKEIFFDQSKNGYAGYIDGGASQEEFYKFIKPILEKMDGTEELLVKLNREDLLRKQRTFDNGSIPHQIHLGELHAILRRQEDFYPFLKDNREKIEKILTFRIPYYVGPLARGNSRFAWMTRKSEETITPWNFEEVVDKGASAQSFIERMTNFDKNLPNEKVLPKHSLLYEYFTVYNELTKVKYVTEGMRKPAFLSGEQKKAIVDLLFKTNRKVTVKQLKEDYFKKIECFDSVEISGVEDRFNASLGTYHDLLKIIKDKDFLDNEENEDILEDIVLTLTLFEDREMIEERLKTYAHLFDDKVMKQLKRRRYTGWGRLSRKLINGIRDKQSGKTILDFLKSDGFANRNFMQLIHDDSLTFKEDIQKAQVSGQGDSLHEHIANLAGSPAIKKGILQTVKVVDELVKVMGRHKPENIVIEMARENQTTQKGQKNSRERMKRIEEGIKELGSQILKEHPVENTQLQNEKLYLYYLQNGRDMYVDQELDINRLSDYDVDHIVPQSFLKDDSIDNKVLTRSDKARGKSDNVPSEEVVKKMKNYWRQLLNAKLITQRKFDNLTKAERGGLSELDKAGFIKRQLVETRQITKHVAQILDSRMNTKYDENDKLIREVKVITLKSKLVSDFRKDFQFYKVREINNYHHAHDAYLNAVVGTALIKKYPKLESEFVYGDYKVYDVRKMIAKSEQEIGKATAKYFFYSNIMNFFKTEITLANGEIRKRPLIETNGETGEIVWDKGRDFATVRKVLSMPQVNIVKKTEVQTGGFSKESILPKRNSDKLIARKKDWDPKKYGGFDSPTVAYSVLVVAKVEKGKSKKLKSVKELLGITIMERSSFEKNPIDFLEAKGYKEVKKDLIIKLPKYSLFELENGRKRMLASAGELQKGNELALPSKYVNFLYLASHYEKLKGSPEDNEQKQLFVEQHKHYLDEIIEQISEFSKRVILADANLDKVLSAYNKHRDKPIREQAENIIHLFTLTNLGAPAAFKYFDTTIDRKRYTSTKEVLDATLIHQSITGLYETRIDLSQLGGDGGGSSPAPGGTLQLEEEYRLFEPESTQKQEMDIWLKNFPQAWAETGGMGTAHCQAPVLIQLKATATPISIRQYPMPHEAYQGIKPHIRRMLDQGILKPCQSPWNTPLLPVKKPGTEDYRPVQDLREVNKRVEDIHPTVPNPYNLLSTLPPSHPWYTVLDLKDAFFCLRLHSESQLLFAFEWRDPEIGLSGQLTWTRLPQGFKNSPTLFNEALHSDLADFRVRYPALVLLQYVDDLLLAAATRTECLEGTKALLETLGNKGYRASAKKAQICLQEVTYLGYSLKDGQRWLTKARKEAILSIPVPKNSRQVREFLGTAGYCRLWIPGFAELAAPLYPLTRPGTLFQWGTEQQLAFEDIKKALLSSPALGLPDITKPFELFIDENSGFAKGVLVQKLGPWKRPVAYLSKKLDTVASGWPPCLRMVAAIAILVKDAGKLTLGQPLTILTSHPVEALVRQPPNKWLSNARMTHYQAMLLDAERVHFGPTVSLNPATLLPLPSGGNHHDCLQILAETHGTRPDLTDQPLPDADLTWYTDGSSFIRNGEREAGAAVTTESEVIWAAPLPPGTSAQRAELIALTQALKMAEGKKLTVYTDSRYAFATTHVHGEIYRRRGWLTSEGKEIKNKNEILALLEALFLPKRLSIIHCPGHQKGDSPQAKGNRLADDTAKKAATETHSSLTVLPAGKRTADGSEFEKRTADGSEFESPKKKAKVE

SEQ ID NO: 6749 - protein, 2213 aa, synthetic construct
MPAAKRVKLDGGDKKYSIGLDIGTNSVGWAVITDEYKVPSKKFKVLGNTDRHSIKKNLIGALLFDSGETAEATRLKRTARRRYTRRKNRICYLQEIFSNEMAKVDDSFFHRLEESFLVEEDKKHERHPIFGNIVDEVAYHEKYPTIYHLRKKLVDSTDKADLRLIYLALAHMIKFRGHFLIEGDLNPDNSDVDKLFIQLVQTYNQLFEENPINASGVDAKAILSARLSKSRRLENLIAQLPGEKKNGLFGNLIALSLGLTPNFKSNFDLAEDAKLQLSKDTYDDDLDNLLAQIGDQYADLFLAAKNLSDAILLSDILRVNTEITKAPLSASMIKRYDEHHQDLTLLKALVRQQLPEKYKEIFFDQSKNGYAGYIDGGASQEEFYKFIKPILEKMDGTEELLVKLNREDLLRKQRTFDNGSIPHQIHLGELHAILRRQEDFYPFLKDNREKIEKILTFRIPYYVGPLARGNSRFAWMTRKSEETITPWNFEEVVDKGASAQSFIERMTNFDKNLPNEKVLPKHSLLYEYFTVYNELTKVKYVTEGMRKPAFLSGEQKKAIVDLLFKTNRKVTVKQLKEDYFKKIECFDSVEISGVEDRFNASLGTYHDLLKIIKDKDFLDNEENEDILEDIVLTLTLFEDREMIEERLKTYAHLFDDKVMKQLKRRRYTGWGRLSRKLINGIRDKQSGKTILDFLKSDGFANRNFMQLIHDDSLTFKEDIQKAQVSGQGDSLHEHIANLAGSPAIKKGILQTVKVVDELVKVMGRHKPENIVIEMARENQTTQKGQKNSRERMKRIEEGIKELGSQILKEHPVENTQLQNEKLYLYYLQNGRDMYVDQELDINRLSDYDVDHIVPQSFLKDDSIDNKVLTRSDKARGKSDNVPSEEVVKKMKNYWRQLLNAKLITQRKFDNLTKAERGGLSELDKAGFIKRQLVETRQITKHVAQILDSRMNTKYDENDKLIREVKVITLKSKLVSDFRKDFQFYKVREINNYHHAHDAYLNAVVGTALIKKYPKLESEFVYGDYKVYDVRKMIAKSEQEIGKATAKYFFYSNIMNFFKTEITLANGEIRKRPLIETNGETGEIVWDKGRDFATVRKVLSMPQVNIVKKTEVQTGGFSKESILPKRNSDKLIARKKDWDPKKYGGFDSPTVAYSVLVVAKVEKGKSKKLKSVKELLGITIMERSSFEKNPIDFLEAKGYKEVKKDLIIKLPKYSLFELENGRKRMLASAGELQKGNELALPSKYVNFLYLASHYEKLKGSPEDNEQKQLFVEQHKHYLDEIIEQISEFSKRVILADANLDKVLSAYNKHRDKPIREQAENIIHLFTLTNLGAPAAFKYFDTTIDRKRYTSTKEVLDATLIHQSITGLYETRIDLSQLGGDGGGSSPAPGGTLGDQGSRGSDPLPEPRVTLTVEGIPTEFLVNTGAEHSVLTKPMGKMGSKRTVVAGATGSKVYPWTTKRLLKIGQKQVTHSFLVIPECPAPLLGRDLLTKLKAQIQFSTEGPQVTWEDRPAMCLVLNLEEEYRLHEKPVPPSIDPSWLQLFPMVWAEKAGMGLANQVPPVVVELKSDASPVAVRQYPMSKEAREGIRPHIQRFLDLGILVPCQSPWNTPLLPVKKPGTNDYRPVQDLREVNKRVQDIHPTVPNPYNLLSSLPPSHTWYSVLDLKDAFFCLKLHPNSQPLFAFEWRDPEKGNTGQLTWTRLPQGFKNSPTLFNEALHRDLASFRALNPQVVMLQYVDDLLVAAPTYRDCKEGTRRLLQELSKLGYRVSAKKAQLCREEVTYLGYLLKGGKRWLTPARKATVMKIPTPTTPRQVREFLGTAGFCRLWIPGFASLAAPLYPLTRPKVPFTWTEAHQEAFGRIKEALLSAPALALPDLTKPFALYVDEKEGVARGVLTQTLGPWRRPVAYLSKKLDPVASGWPTCLKAIAAVALLLKDADKLTLGQNVLVIAPHNLESIVRQPPDRWMTNARMTHYQSLLLNERVSFAPPAILNPATLLPVESDDTPIHICSEILAEETGTRPDLRDQPLPGVPAWYTDGSSFIMDGRRQAGAAIVDNKRTVWASNLPEGTSAQKAELIALTQALRLAEGKSINIYTDSRYAFATAHVHGAIYKQRGWLTSAGKDIKNKEEILALLEAIHLPKRVAIIHCPGHQRGTDPVATGNRKADEAAKQAAQSTRILTETTKNAGKRTADGSEFEKRTADGSEFESPKKKAKVE

SEQ ID NO: 6750 - protein, 2091 aa, synthetic construct
MPAAKRVKLDGGDKKYSIGLDIGTNSVGWAVITDEYKVPSKKFKVLGNTDRHSIKKNLIGALLFDSGETAEATRLKRTARRRYTRRKNRICYLQEIFSNEMAKVDDSFFHRLEESFLVEEDKKHERHPIFGNIVDEVAYHEKYPTIYHLRKKLVDSTDKADLRLIYLALAHMIKFRGHFLIEGDLNPDNSDVDKLFIQLVQTYNQLFEENPINASGVDAKAILSARLSKSRRLENLIAQLPGEKKNGLFGNLIALSLGLTPNFKSNFDLAEDAKLQLSKDTYDDDLDNLLAQIGDQYADLFLAAKNLSDAILLSDILRVNTEITKAPLSASMIKRYDEHHQDLTLLKALVRQQLPEKYKEIFFDQSKNGYAGYIDGGASQEEFYKFIKPILEKMDGTEELLVKLNREDLLRKQRTFDNGSIPHQIHLGELHAILRRQEDFYPFLKDNREKIEKILTFRIPYYVGPLARGNSRFAWMTRKSEETITPWNFEEVVDKGASAQSFIERMTNFDKNLPNEKVLPKHSLLYEYFTVYNELTKVKYVTEGMRKPAFLSGEQKKAIVDLLFKTNRKVTVKQLKEDYFKKIECFDSVEISGVEDRFNASLGTYHDLLKIIKDKDFLDNEENEDILEDIVLTLTLFEDREMIEERLKTYAHLFDDKVMKQLKRRRYTGWGRLSRKLINGIRDKQSGKTILDFLKSDGFANRNFMQLIHDDSLTFKEDIQKAQVSGQGDSLHEHIANLAGSPAIKKGILQTVKVVDELVKVMGRHKPENIVIEMARENQTTQKGQKNSRERMKRIEEGIKELGSQILKEHPVENTQLQNEKLYLYYLQNGRDMYVDQELDINRLSDYDVDHIVPQSFLKDDSIDNKVLTRSDKARGKSDNVPSEEVVKKMKNYWRQLLNAKLITQRKFDNLTKAERGGLSELDKAGFIKRQLVETRQITKHVAQILDSRMNTKYDENDKLIREVKVITLKSKLVSDFRKDFQFYKVREINNYHHAHDAYLNAVVGTALIKKYPKLESEFVYGDYKVYDVRKMIAKSEQEIGKATAKYFFYSNIMNFFKTEITLANGEIRKRPLIETNGETGEIVWDKGRDFATVRKVLSMPQVNIVKKTEVQTGGFSKESILPKRNSDKLIARKKDWDPKKYGGFDSPTVAYSVLVVAKVEKGKSKKLKSVKELLGITIMERSSFEKNPIDFLEAKGYKEVKKDLIIKLPKYSLFELENGRKRMLASAGELQKGNELALPSKYVNFLYLASHYEKLKGSPEDNEQKQLFVEQHKHYLDEIIEQISEFSKRVILADANLDKVLSAYNKHRDKPIREQAENIIHLFTLTNLGAPAAFKYFDTTIDRKRYTSTKEVLDATLIHQSITGLYETRIDLSQLGGDGGGSSPAPGGTLGIEDEYRLHETSTEPDVSLGSTWLSDFPQAWAETGGMGLAVRQAPLIIPLKATSTPVSIQQYPMSHEARLGIKPHIQRLLDQGILVPCQSPWNTPLLPVKKPGTNDYRPVQDLREVNKRVEDIHPTVPNPYNLLSGLPPSHQWYTVLDLKDAFFCLRLHPTSQPLFAFEWRDPGMGISGQLTWTRLPQGFKNSPTLFNEALHRDLADFRIQHPDLILLQYVDDILLAATSELDCQQGTRALLQTLGDLGYRASAKKAQICQKQVKYLGYLLREGQRWLTEARKETVMGQPVPKTPRQLREFLGTAGFCRLWIPGFAEMAAPLYPLTKPGTLFSWGPDQQKAYQEIKQALLTAPALGLPDLTKPFELFVDEKQGYAKGVLTQKLGPWRRPVAYLSKKLDPVAAGWPPCLRMVAAIAVLTKDAGKLTMGQPLVILAPHAVEALVKQPPDRWLSNARMTHYQAMLLDTDRVQFGPVVALNPATLLPLPEEGAPHDCLEILAETHGTRPDLTDQPIPDADHTWYTDGSSFLQEGQRKAGAAVTTETEVIWAGALPAGTSAQRAELIALTQALKMAEGKRLNVYTDSRYAFATAHIHGEIYRRRGWLTSEGREIKNKSEILALLKALFLPKRLSIIHCLGHQKGDSAEARGNRLADQAAREAAIKTPPDTSTLLAGKRTADGSEFEKRTADGSEFESPKKKAKVE

SEQ ID NO: 6751 - protein, 2111 aa, synthetic construct
MPAAKRVKLDGGDKKYSIGLDIGTNSVGWAVITDEYKVPSKKFKVLGNTDRHSIKKNLIGALLFDSGETAEATRLKRTARRRYTRRKNRICYLQEIFSNEMAKVDDSFFHRLEESFLVEEDKKHERHPIFGNIVDEVAYHEKYPTIYHLRKKLVDSTDKADLRLIYLALAHMIKFRGHFLIEGDLNPDNSDVDKLFIQLVQTYNQLFEENPINASGVDAKAILSARLSKSRRLENLIAQLPGEKKNGLFGNLIALSLGLTPNFKSNFDLAEDAKLQLSKDTYDDDLDNLLAQIGDQYADLFLAAKNLSDAILLSDILRVNTEITKAPLSASMIKRYDEHHQDLTLLKALVRQQLPEKYKEIFFDQSKNGYAGYIDGGASQEEFYKFIKPILEKMDGTEELLVKLNREDLLRKQRTFDNGSIPHQIHLGELHAILRRQEDFYPFLKDNREKIEKILTFRIPYYVGPLARGNSRFAWMTRKSEETITPWNFEEVVDKGASAQSFIERMTNFDKNLPNEKVLPKHSLLYEYFTVYNELTKVKYVTEGMRKPAFLSGEQKKAIVDLLFKTNRKVTVKQLKEDYFKKIECFDSVEISGVEDRFNASLGTYHDLLKIIKDKDFLDNEENEDILEDIVLTLTLFEDREMIEERLKTYAHLFDDKVMKQLKRRRYTGWGRLSRKLINGIRDKQSGKTILDFLKSDGFANRNFMQLIHDDSLTFKEDIQKAQVSGQGDSLHEHIANLAGSPAIKKGILQTVKVVDELVKVMGRHKPENIVIEMARENQTTQKGQKNSRERMKRIEEGIKELGSQILKEHPVENTQLQNEKLYLYYLQNGRDMYVDQELDINRLSDYDVDHIVPQSFLKDDSIDNKVLTRSDKARGKSDNVPSEEVVKKMKNYWRQLLNAKLITQRKFDNLTKAERGGLSELDKAGFIKRQLVETRQITKHVAQILDSRMNTKYDENDKLIREVKVITLKSKLVSDFRKDFQFYKVREINNYHHAHDAYLNAVVGTALIKKYPKLESEFVYGDYKVYDVRKMIAKSEQEIGKATAKYFFYSNIMNFFKTEITLANGEIRKRPLIETNGETGEIVWDKGRDFATVRKVLSMPQVNIVKKTEVQTGGFSKESILPKRNSDKLIARKKDWDPKKYGGFDSPTVAYSVLVVAKVEKGKSKKLKSVKELLGITIMERSSFEKNPIDFLEAKGYKEVKKDLIIKLPKYSLFELENGRKRMLASAGELQKGNELALPSKYVNFLYLASHYEKLKGSPEDNEQKQLFVEQHKHYLDEIIEQISEFSKRVILADANLDKVLSAYNKHRDKPIREQAENIIHLFTLTNLGAPAAFKYFDTTIDRKRYTSTKEVLDATLIHQSITGLYETRIDLSQLGGDGGGSSPAPGGTLNIEDEYRLHETSKEPDVSLGSTWLSDFPQAWAETGGMGLAVRQAPLIIPLKATSTPVSIKQYPMSQEARLGIKPHIQRLLDQGILVPCQSPWNTPLLPVKKPGTNDYRPVQDLREVNKRVEDIHPTVPNPYNLLSGLPPSHQWYTVLDLKDAFFCLRLHPTSQPLFAFEWRDPEMGISGQLTWTRLPQGFKNSPTLFNEALHRDLADFRIQHPDLILLQYVDDLLLAATSELDCQQGTRALLQTLGNLGYRASAKKAQICQKQVKYLGYLLKEGQRWLTEARKETVMGQPTPKTPRQLREFLGKAGFCRLFIPGFAEMAAPLYPLTKPGTLFNWGPDQQKAYQEIKQALLTAPALGLPDLTKPFELFVDEKQGYAKGVLTQKLGPWRRPVAYLSKKLDPVAAGWPPCLRMVAAIAVLTKDAGKLTMGQPLVILAPHAVEALVKQPPDRWLSNARMTHYQALLLDTDRVQFGPVVALNPATLLPLPEEGLQHNCLDILAEAHGTRPDLTDQPLPDADHTWYTDGSSLLQEGQRKAGAAVTTETEVIWAKALPAGTSAQRAELIALTQALKMAEGKKLNVYTDSRYAFATAHIHGEIYRRRGWLTSEGKEIKNKDEILALLKALFLPKRLSIIHCPGHQKGHSAEARGNRMADQAARKAAITETPDTSTLLIENSSPSGGSKRTADGSEFEAGKRTADGSEFEKRTADGSEFESPKKKAKVE

SEQ ID NO: 6752 - protein, 2111 aa, synthetic construct; identical to SEQ ID NO: 6751

SEQ ID NO: 6753 - protein, 2082 aa, synthetic construct
MPAAKRVKLDGGDKKYSIGLDIGTNSVGWAVITDEYKVPSKKFKVLGNTDRHSIKKNLIGALLFDSGETAEATRLKRTARRRYTRRKNRICYLQEIFSNEMAKVDDSFFHRLEESFLVEEDKKHERHPIFGNIVDEVAYHEKYPTIYHLRKKLVDSTDKADLRLIYLALAHMIKFRGHFLIEGDLNPDNSDVDKLFIQLVQTYNQLFEENPINASGVDAKAILSARLSKSRRLENLIAQLPGEKKNGLFGNLIALSLGLTPNFKSNFDLAEDAKLQLSKDTYDDDLDNLLAQIGDQYADLFLAAKNLSDAILLSDILRVNTEITKAPLSASMIKRYDEHHQDLTLLKALVRQQLPEKYKEIFFDQSKNGYAGYIDGGASQEEFYKFIKPILEKMDGTEELLVKLNREDLLRKQRTFDNGSIPHQIHLGELHAILRRQEDFYPFLKDNREKIEKILTFRIPYYVGPLARGNSRFAWMTRKSEETITPWNFEEVVDKGASAQSFIERMTNFDKNLPNEKVLPKHSLLYEYFTVYNELTKVKYVTEGMRKPAFLSGEQKKAIVDLLFKTNRKVTVKQLKEDYFKKIECFDSVEISGVEDRFNASLGTYHDLLKIIKDKDFLDNEENEDILEDIVLTLTLFEDREMIEERLKTYAHLFDDKVMKQLKRRRYTGWGRLSRKLINGIRDKQSGKTILDFLKSDGFANRNFMQLIHDDSLTFKEDIQKAQVSGQGDSLHEHIANLAGSPAIKKGILQTVKVVDELVKVMGRHKPENIVIEMARENQTTQKGQKNSRERMKRIEEGIKELGSQILKEHPVENTQLQNEKLYLYYLQNGRDMYVDQELDINRLSDYDVDHIVPQSFLKDDSIDNKVLTRSDKARGKSDNVPSEEVVKKMKNYWRQLLNAKLITQRKFDNLTKAERGGLSELDKAGFIKRQLVETRQITKHVAQILDSRMNTKYDENDKLIREVKVITLKSKLVSDFRKDFQFYKVREINNYHHAHDAYLNAVVGTALIKKYPKLESEFVYGDYKVYDVRKMIAKSEQEIGKATAKYFFYSNIMNFFKTEITLANGEIRKRPLIETNGETGEIVWDKGRDFATVRKVLSMPQVNIVKKTEVQTGGFSKESILPKRNSDKLIARKKDWDPKKYGGFDSPTVAYSVLVVAKVEKGKSKKLKSVKELLGITIMERSSFEKNPIDFLEAKGYKEVKKDLIIKLPKYSLFELENGRKRMLASAGELQKGNELALPSKYVNFLYLASHYEKLKGSPEDNEQKQLFVEQHKHYLDEIIEQISEFSKRVILADANLDKVLSAYNKHRDKPIREQAENIIHLFTLTNLGAPAAFKYFDTTIDRKRYTSTKEVLDATLIHQSITGLYETRIDLSQLGGDGGGSSPAPGGIPWLMKKPLQLTTLVPLQEYEERLLKQTMLTGSYKEKLQSLFLKYDALWQHWENQVGHRRIKPHHIATGTVNPRPQKQYPINPKAKASIQTVINDLLKQGVLIQQNSIMNTPVYPVPKPDGKWRMVLDYREVNKTIPLIAAQNQHSAGILSSIFRGKYKTTLDLSNGFWAHSITPESYWLTAFTWLGQQYCWTRLPQGFLNSPALFNADVVDLLKEVPNVQVYVDDIYISHDDPREHLEQLEKVFSLLLNAGYVVSLKKSEIAQHEVEFLGFNITKEGRGLTETFKQKLLNITPPRDLKQLQSILGLLNFARNFIPNFSELVKPLYNIIATAPGKYITWTTDNSQQLQNIISMLNSAENLEERNPEVRLIMKVNTSPSAGYIRFYNEFAKRPIMYLNYVYTKAEVKFTNTEKLLTTIHKGLIKALDLGMGQEILVYSPIVSMTKIQKTPLPERKALPIRWITWMSYLEDPRIQFHYDKTLPELQQVPTVTDDIIAKIKHPSEFSMVFYTDGSAIKHPNVNKSHNAGMGIAQVQFKPEFTVINTWSIPLGDHTAQLAEVAAVEFACKKALKIDGPVLIVTDSFYVAESVNKELPYWQSNGFFNNKKKPLKHVSKWKSIADCIQLKPDIIIIHEKGHQPTASTFHTEGNNLADKLATQGSYVVNAGKRTADGSEFEKRTADGSEFESPKKKAKVE

SEQ ID NO: 6754 - protein, 2091 aa, synthetic construct
MPAAKRVKLDGGDKKYSIGLDIGTNSVGWAVITDEYKVPSKKFKVLGNTDRHSIKKNLIGALLFDSGETAEATRLKRTARRRYTRRKNRICYLQEIFSNEMAKVDDSFFHRLEESFLVEEDKKHERHPIFGNIVDEVAYHEKYPTIYHLRKKLVDSTDKADLRLIYLALAHMIKFRGHFLIEGDLNPDNSDVDKLFIQLVQTYNQLFEENPINASGVDAKAILSARLSKSRRLENLIAQLPGEKKNGLFGNLIALSLGLTPNFKSNFDLAEDAKLQLSKDTYDDDLDNLLAQIGDQYADLFLAAKNLSDAILLSDILRVNTEITKAPLSASMIKRYDEHHQDLTLLKALVRQQLPEKYKEIFFDQSKNGYAGYIDGGASQEEFYKFIKPILEKMDGTEELLVKLNREDLLRKQRTFDNGSIPHQIHLGELHAILRRQEDFYPFLKDNREKIEKILTFRIPYYVGPLARGNSRFAWMTRKSEETITPWNFEEVVDKGASAQSFIERMTNFDKNLPNEKVLPKHSLLYEYFTVYNELTKVKYVTEGMRKPAFLSGEQKKAIVDLLFKTNRKVTVKQLKEDYFKKIECFDSVEISGVEDRFNASLGTYHDLLKIIKDKDFLDNEENEDILEDIVLTLTLFEDREMIEERLKTYAHLFDDKVMKQLKRRRYTGWGRLSRKLINGIRDKQSGKTILDFLKSDGFANRNFMQLIHDDSLTFKEDIQKAQVSGQGDSLHEHIANLAGSPAIKKGILQTVKVVDELVKVMGRHKPENIVIEMARENQTTQKGQKNSRERMKRIEEGIKELGSQILKEHPVENTQLQNEKLYLYYLQNGRDMYVDQELDINRLSDYDVDHIVPQSFLKDDSIDNKVLTRSDKARGKSDNVPSEEVVKKMKNYWRQLLNAKLITQRKFDNLTKAERGGLSELDKAGFIKRQLVETRQITKHVAQILDSRMNTKYDENDKLIREVKVITLKSKLVSDFRKDFQFYKVREINNYHHAHDAYLNAVVGTALIKKYPKLESEFVYGDYKVYDVRKMIAKSEQEIGKATAKYFFYSNIMNFFKTEITLANGEIRKRPLIETNGETGEIVWDKGRDFATVRKVLSMPQVNIVKKTEVQTGGFSKESILPKRNSDKLIARKKDWDPKKYGGFDSPTVAYSVLVVAKVEKGKSKKLKSVKELLGITIMERSSFEKNPIDFLEAKGYKEVKKDLIIKLPKYSLFELENGRKRMLASAGELQKGNELALPSKYVNFLYLASHYEKLKGSPEDNEQKQLFVEQHKHYLDEIIEQISEFSKRVILADANLDKVLSAYNKHRDKPIREQAENIIHLFTLTNLGAPAAFKYFDTTIDRKRYTSTKEVLDATLIHQSITGLYETRIDLSQLGGDGGGSSPAPGGTLNIEDEYRLHETSKEPDVPLGSTWLSDFPQAWAETGGMGLAVRQAPLIIPLKATSTPVSIKQYPMSQEARLGIKPHIQRLLDQGILVPCQSPWNTPLLPVKKPGTNDYRPVQDLREVNKRVEDIHPTVPNPYNLLSGLPPSHQWYTVLDLKDAFFCLRLHPTSQPLFAFEWRDPEMGISGQLTWTRLPQGFKNSPTLFNEALHRDLADFRIQHPDLILLQYVDDLLLAATSEQDCQRGTRALLQTLGNLGYRASAKKAQICQKQVKYLGYLLKEGQRWLTEARKETVMGQPTPKTPRQLREFLGTAGFCRLWIPGFAEMAAPLYPLTKPGTLFNWGPDQQKAYQEIKQALLTAPALGLPDLTKPFELFVDEKQGYAKGVLTQKLGPWRRPVAYLSKKLDPVAAGWPPCLRMVAAIAVLTKDAGKLTMGQPLVILAPHAVEALVKQPPDRWLSNARMTHYQAMLLDTDRVQFGPVVALNPATLLPLPEKEAPHDCLEILAETHGTRPDLTDQPIPDADYTWYTDGSSFLQEGQRRAGAAVTTETEVIWARALPAGTSAQRAELIALTQALKMAEGKKLNVYTDSRYAFATAHVHGEIYRRRGWLTSEGREIKNKNEILALLKALFLPKRLSIIHCPGHQKGNSAEARGNRMADQAAREAAMKAVLETSTLLAGKRTADGSEFEKRTADGSEFESPKKKAKVE

SEQ ID NO: 6755 - protein, 2093 aa, synthetic construct
MPAAKRVKLDGGDKKYSIGLDIGTNSVGWAVITDEYKVPSKKFKVLGNTDRHSIKKNLIGALLFDSGETAEATRLKRTARRRYTRRKNRICYLQEIFSNEMAKVDDSFFHRLEESFLVEEDKKHERHPIFGNIVDEVAYHEKYPTIYHLRKKLVDSTDKADLRLIYLALAHMIKFRGHFLIEGDLNPDNSDVDKLFIQLVQTYNQLFEENPINASGVDAKAILSARLSKSRRLENLIAQLPGEKKNGLFGNLIALSLGLTPNFKSNFDLAEDAKLQLSKDTYDDDLDNLLAQIGDQYADLFLAAKNLSDAILLSDILRVNTEITKAPLSASMIKRYDEHHQDLTLLKALVRQQLPEKYKEIFFDQSKNGYAGYIDGGASQEEFYKFIKPILEKMDGTEELLVKLNREDLLRKQRTFDNGSIPHQIHLGELHAILRRQEDFYPFLKDNREKIEKILTFRIPYYVGPLARGNSRFAWMTRKSEETITPWNFEEVVDKGASAQSFIERMTNFDKNLPNEKVLPKHSLLYEYFTVYNELTKVKYVTEGMRKPAFLSGEQKKAIVDLLFKTNRKVTVKQLKEDYFKKIECFDSVEISGVEDRFNASLGTYHDLLKIIKDKDFLDNEENEDILEDIVLTLTLFEDREMIEERLKTYAHLFDDKVMKQLKRRRYTGWGRLSRKLINGIRDKQSGKTILDFLKSDGFANRNFMQLIHDDSLTFKEDIQKAQVSGQGDSLHEHIANLAGSPAIKKGILQTVKVVDELVKVMGRHKPENIVIEMARENQTTQKGQKNSRERMKRIEEGIKELGSQILKEHPVENTQLQNEKLYLYYLQNGRDMYVDQELDINRLSDYDVDHIVPQSFLKDDSIDNKVLTRSDKARGKSDNVPSEEVVKKMKNYWRQLLNAKLITQRKFDNLTKAERGGLSELDKAGFIKRQLVETRQITKHVAQILDSRMNTKYDENDKLIREVKVITLKSKLVSDFRKDFQFYKVREINNYHHAHDAYLNAVVGTALIKKYPKLESEFVYGDYKVYDVRKMIAKSEQEIGKATAKYFFYSNIMNFFKTEITLANGEIRKRPLIETNGETGEIVWDKGRDFATVRKVLSMPQVNIVKKTEVQTGGFSKESILPKRNSDKLIARKKDWDPKKYGGFDSPTVAYSVLVVAKVEKGKSKKLKSVKELLGITIMERSSFEKNPIDFLEAKGYKEVKKDLIIKLPKYSLFELENGRKRMLASAGELQKGNELALPSKYVNFLYLASHYEKLKGSPEDNEQKQLFVEQHKHYLDEIIEQISEFSKRVILADANLDKVLSAYNKHRDKPIREQAENIIHLFTLTNLGAPAAFKYFDTTIDRKRYTSTKEVLDATLIHQSITGLYETRIDLSQLGGDGGPAPGSSGGTAPLEEEYRLFLEAPIQNVTLLEQWKREIPKVWAEINPPGLASTQAPIHVQLLSTALPVRVRQYPITLEAKRSLRETIRKFRAAGILRPVHSPWNTPLLPVRKSGTSEYRMVQDLREVNKRVETIHPTVPNPYTLLSLLPPDRIWYSVLDLKDAFFCIPLAPESQLIFAFEWADAEEGESGQLTWTRLPQGFKNSPTLFNEALNRDLQGFRLDHPSVSLLQYVDDLLIAADTQAACLSATRDLLMTLAELGYRVSGKKAQLCQEEVTYLGFKIHKGSRSLSNSRTQAILQIPVPKTKRQVREFLGTIGYCRLWIPGFAELAQPLYAATRPGNDPLVWGEKEEEAFQSLKLALTQPPALALPSLDKPFQLFVEETSGAAKGVLTQALGPWKRPVAYLSKRLDPVAAGWPRCLRAIAAAALLTREASKLTFGQDIEITSSHNLESLLRSPPDKWLTNARITQYQVLLLDPPRVRFKQTAALNPATLLPETDDTLPIHHCLDTLDSLTSTRPDLTDQPLAQAEATLFTDGSSYIRDGKRYAGAAVVTLDSVIWAEPLPIGTSAQKAELIALTKALEWSKDKSVNIYTDSRYAFATLHVHGMIYRERGWLTAGGKAIKNAPEILALLTAVWLPKRVAVMHCKGHQKDDAPTSTGNRRADEVAREVAIRPLSTQATISAGKRTADGSEFEKRTADGSEFESPKKKAKVE

SEQ ID NO: 6756 - protein, 2093 aa, synthetic construct
MPAAKRVKLDGGDKKYSIGLDIGTNSVGWAVITDEYKVPSKKFKVLGNTDRHSIKKNLIGALLFDSGETAEATRLKRTARRRYTRRKNRICYLQEIFSNEMAKVDDSFFHRLEESFLVEEDKKHERHPIFGNIVDEVAYHEKYPTIYHLRKKLVDSTDKADLRLIYLALAHMIKFRGHFLIEGDLNPDNSDVDKLFIQLVQTYNQLFEENPINASGVDAKAILSARLSKSRRLENLIAQLPGEKKNGLFGNLIALSLGLTPNFKSNFDLAEDAKLQLSKDTYDDDLDNLLAQIGDQYADLFLAAKNLSDAILLSDILRVNTEITKAPLSASMIKRYDEHHQDLTLLKALVRQQLPEKYKEIFFDQSKNGYAGYIDGGASQEEFYKFIKPILEKMDGTEELLVKLNREDLLRKQRTFDNGSIPHQIHLGELHAILRRQEDFYPFLKDNREKIEKILTFRIPYYVGPLARGNSRFAWMTRKSEETITPWNFEEVVDKGASAQSFIERMTNFDKNLPNEKVLPKHSLLYEYFTVYNELTKVKYVTEGMRKPAFLSGEQKKAIVDLLFKTNRKVTVKQLKEDYFKKIECFDSVEISGVEDRFNASLGTYHDLLKIIKDKDFLDNEENEDILEDIVLTLTLFEDREMIEERLKTYAHLFDDKVMKQLKRRRYTGWGRLSRKLINGIRDKQSGKTILDFLKSDGFANRNFMQLIHDDSLTFKEDIQKAQVSGQGDSLHEHIANLAGSPAIKKGILQTVKVVDELVKVMGRHKPENIVIEMARENQTTQKGQKNSRERMKRIEEGIKELGSQILKEHPVENTQLQNEKLYLYYLQNGRDMYVDQELDINRLSDYDVDHIVPQSFLKDDSIDNKVLTRSDKARGKSDNVPSEEVVKKMKNYWRQLLNAKLITQRKFDNLTKAERGGLSELDKAGFIKRQLVETRQITKHVAQILDSRMNTKYDENDKLIREVKVITLKSKLVSDFRKDFQFYKVREINNYHHAHDAYLNAVVGTALIKKYPKLESEFVYGDYKVYDVRKMIAKSEQEIGKATAKYFFYSNIMNFFKTEITLANGEIRKRPLIETNGETGEIVWDKGRDFATVRKVLSMPQVNIVKKTEVQTGGFSKESILPKRNSDKLIARKKDWDPKKYGGFDSPTVAYSVLVVAKVEKGKSKKLKSVKELLGITIMERSSFEKNPIDFLEAKGYKEVKKDLIIKLPKYSLFELENGRKRMLASAGELQKGNELALPSKYVNFLYLASHYEKLKGSPEDNEQKQLFVEQHKHYLDEIIEQISEFSKRVILADANLDKVLSAYNKHRDKPIREQAENIIHLFTLTNLGAPAAFKYFDTTIDRKRYTSTKEVLDATLIHQSITGLYETRIDLSQLGGDGGPAPGSSGGTAPLEEEYRLFLEAPIQNVTLLEQWKREIPKVWAEINPPGLASTQAPIHVQLLSTALPVRVRQYPITLEAKRSLRETIRKFRAAGILRPVHSPWNTPLLPVRKSGTSEYRMVQDLREVNKRVETIHPTVPNPYTLLSLLPPDRIWYSVLDLKDAFFCIPLAPESQLIFAFEWADAEEGESGQLTWTRLPQGFKNSPTLFNEALNRDLQGFRLDHPSVSLLQYVDDLLIAADTQAACLSATRDLLMTLAELGYRVSGKKAQLCQEEVTYLGFKIHKGSRSLSNSRTQAILQIPVPKTKRQVREFLGKIGYCRLFIPGFAELAQPLYAATRPGNDPLVWGEKEEEAFQSLKLALTQPPALALPSLDKPFQLFVEETSGAAKGVLTQALGPWKRPVAYLSKRLDPVAAGWPRCLRAIAAAALLTREASKLTFGQDIEITSSHNLESLLRSPPDKWLTNARITQYQVLLLDPPRVRFKQTAALNPATLLPETDDTLPIHHCLDTLDSLTSTRPDLTDQPLAQAEATLFTDGSSYIRDGKRYAGAAVVTLDSVIWAEPLPIGTSAQKAELIALTKALEWSKDKSVNIYTDSRYAFATLHVHGMIYRERGWLTAGGKAIKNAPEILALLTAVWLPKRVAVMHCKGHQKDDAPTSTGNRRADEVAREVAIRPLSTQATISAGKRTADGSEFEKRTADGSEFESPKKKAKVE

SEQ ID NO: 6757 - protein, 2090 aa, synthetic construct
MPAAKRVKLDGGDKKYSIGLDIGTNSVGWAVITDEYKVPSKKFKVLGNTDRHSIKKNLIGALLFDSGETAEATRLKRTARRRYTRRKNRICYLQEIFSNEMAKVDDSFFHRLEESFLVEEDKKHERHPIFGNIVDEVAYHEKYPTIYHLRKKLVDSTDKADLRLIYLALAHMIKFRGHFLIEGDLNPDNSDVDKLFIQLVQTYNQLFEENPINASGVDAKAILSARLSKSRRLENLIAQLPGEKKNGLFGNLIALSLGLTPNFKSNFDLAEDAKLQLSKDTYDDDLDNLLAQIGDQYADLFLAAKNLSDAILLSDILRVNTEITKAPLSASMIKRYDEHHQDLTLLKALVRQQLPEKYKEIFFDQSKNGYAGYIDGGASQEEFYKFIKPILEKMDGTEELLVKLNREDLLRKQRTFDNGSIPHQIHLGELHAILRRQEDFYPFLKDNREKIEKILTFRIPYYVGPLARGNSRFAWMTRKSEETITPWNFEEVVDKGASAQSFIERMTNFDKNLPNEKVLPKHSLLYEYFTVYNELTKVKYVTEGMRKPAFLSGEQKKAIVDLLFKTNRKVTVKQLKEDYFKKIECFDSVEISGVEDRFNASLGTYHDLLKIIKDKDFLDNEENEDILEDIVLTLTLFEDREMIEERLKTYAHLFDDKVMKQLKRRRYTGWGRLSRKLINGIRDKQSGKTILDFLKSDGFANRNFMQLIHDDSLTFKEDIQKAQVSGQGDSLHEHIANLAGSPAIKKGILQTVKVVDELVKVMGRHKPENIVIEMARENQTTQKGQKNSRERMKRIEEGIKELGSQILKEHPVENTQLQNEKLYLYYLQNGRDMYVDQELDINRLSDYDVDHIVPQSFLKDDSIDNKVLTRSDKARGKSDNVPSEEVVKKMKNYWRQLLNAKLITQRKFDNLTKAERGGLSELDKAGFIKRQLVETRQITKHVAQILDSRMNTKYDENDKLIREVKVITLKSKLVSDFRKDFQFYKVREINNYHHAHDAYLNAVVGTALIKKYPKLESEFVYGDYKVYDVRKMIAKSEQEIGKATAKYFFYSNIMNFFKTEITLANGEIRKRPLIETNGETGEIVWDKGRDFATVRKVLSMPQVNIVKKTEVQTGGFSKESILPKRNSDKLIARKKDWDPKKYGGFDSPTVAYSVLVVAKVEKGKSKKLKSVKELLGITIMERSSFEKNPIDFLEAKGYKEVKKDLIIKLPKYSLFELENGRKRMLASAGELQKGNELALPSKYVNFLYLASHYEKLKGSPEDNEQKQLFVEQHKHYLDEIIEQISEFSKRVILADANLDKVLSAYNKHRDKPIREQAENIIHLFTLTNLGAPAAFKYFDTTIDRKRYTSTKEVLDATLIHQSITGLYETRIDLSQLGGDGGPAPGSSGGTLQLEEEYRLFEPESTQKQEMDIWLKNFPQAWAETGGMGTAHCQAPVLIQLKATATPISIRQYPMPHEAYQGIKPHIRRMLDQGILKPCQSPWNTPLLPVKKPGTEDYRPVQDLREVNKRVEDIHPTVPNPYNLLSTLPPSHPWYTVLDLKDAFFCLRLHSESQLLFAFEWRDPEIGLSGQLTWTRLPQGFKNSPTLFNEALHSDLADFRVRYPALVLLQYVDDLLLAAATRTECLEGTKALLETLGNKGYRASAKKAQICLQEVTYLGYSLKDGQRWLTKARKEAILSIPVPKNSRQVREFLGTAGYCRLWIPGFAELAAPLYPLTRPGTLFQWGTEQQLAFEDIKKALLSSPALGLPDITKPFELFIDENSGFAKGVLVQKLGPWKRPVAYLSKKLDTVASGWPPCLRMVAAIAILVKDAGKLTLGQPLTILTSHPVEALVRQPPNKWLSNARMTHYQAMLLDAERVHFGPTVSLNPATLLPLPSGGNHHDCLQILAETHGTRPDLTDQPLPDADLTWYTDGSSFIRNGEREAGAAVTTESEVIWAAPLPPGTSAQRAELIALTQALKMAEGKKLTVYTDSRYAFATTHVHGEIYRRRGWLTSEGKEIKNKNEILALLEALFLPKRLSIIHCPGHQKGDSPQAKGNRLADDTAKKAATETHSSLTVLPAGKRTADGSEFEKRTADGSEFESPKKKAKVE

SEQ ID NO: 6758 - protein, 2213 aa, synthetic construct
MPAAKRVKLDGGDKKYSIGLDIGTNSVGWAVITDEYKVPSKKFKVLGNTDRHSIKKNLIGALLFDSGETAEATRLKRTARRRYTRRKNRICYLQEIFSNEMAKVDDSFFHRLEESFLVEEDKKHERHPIFGNIVDEVAYHEKYPTIYHLRKKLVDSTDKADLRLIYLALAHMIKFRGHFLIEGDLNPDNSDVDKLFIQLVQTYNQLFEENPINASGVDAKAILSARLSKSRRLENLIAQLPGEKKNGLFGNLIALSLGLTPNFKSNFDLAEDAKLQLSKDTYDDDLDNLLAQIGDQYADLFLAAKNLSDAILLSDILRVNTEITKAPLSASMIKRYDEHHQDLTLLKALVRQQLPEKYKEIFFDQSKNGYAGYIDGGASQEEFYKFIKPILEKMDGTEELLVKLNREDLLRKQRTFDNGSIPHQIHLGELHAILRRQEDFYPFLKDNREKIEKILTFRIPYYVGPLARGNSRFAWMTRKSEETITPWNFEEVVDKGASAQSFIERMTNFDKNLPNEKVLPKHSLLYEYFTVYNELTKVKYVTEGMRKPAFLSGEQKKAIVDLLFKTNRKVTVKQLKEDYFKKIECFDSVEISGVEDRFNASLGTYHDLLKIIKDKDFLDNEENEDILEDIVLTLTLFEDREMIEERLKTYAHLFDDKVMKQLKRRRYTGWGRLSRKLINGIRDKQSGKTILDFLKSDGFANRNFMQLIHDDSLTFKEDIQKAQVSGQGDSLHEHIANLAGSPAIKKGILQTVKVVDELVKVMGRHKPENIVIEMARENQTTQKGQKNSRERMKRIEEGIKELGSQILKEHPVENTQLQNEKLYLYYLQNGRDMYVDQELDINRLSDYDVDHIVPQSFLKDDSIDNKVLTRSDKARGKSDNVPSEEVVKKMKNYWRQLLNAKLITQRKFDNLTKAERGGLSELDKAGFIKRQLVETRQITKHVAQILDSRMNTKYDENDKLIREVKVITLKSKLVSDFRKDFQFYKVREINNYHHAHDAYLNAVVGTALIKKYPKLESEFVYGDYKVYDVRKMIAKSEQEIGKATAKYFFYSNIMNFFKTEITLANGEIRKRPLIETNGETGEIVWDKGRDFATVRKVLSMPQVNIVKKTEVQTGGFSKESILPKRNSDKLIARKKDWDPKKYGGFDSPTVAYSVLVVAKVEKGKSKKLKSVKELLGITIMERSSFEKNPIDFLEAKGYKEVKKDLIIKLPKYSLFELENGRKRMLASAGELQKGNELALPSKYVNFLYLASHYEKLKGSPEDNEQKQLFVEQHKHYLDEIIEQISEFSKRVILADANLDKVLSAYNKHRDKPIREQAENIIHLFTLTNLGAPAAFKYFDTTIDRKRYTSTKEVLDATLIHQSITGLYETRIDLSQLGGDGGPAPGSSGGTLGDQGSRGSDPLPEPRVTLTVEGIPTEFLVNTGAEHSVLTKPMGKMGSKRTVVAGATGSKVYPWTTKRLLKIGQKQVTHSFLVIPECPAPLLGRDLLTKLKAQIQFSTEGPQVTWEDRPAMCLVLNLEEEYRLHEKPVPPSIDPSWLQLFPMVWAEKAGMGLANQVPPVVVELKSDASPVAVRQYPMSKEAREGIRPHIQRFLDLGILVPCQSPWNTPLLPVKKPGTNDYRPVQDLREVNKRVQDIHPTVPNPYNLLSSLPPSHTWYSVLDLKDAFFCLKLHPNSQPLFAFEWRDPEKGNTGQLTWTRLPQGFKNSPTLFNEALHRDLASFRALNPQVVMLQYVDDLLVAAPTYRDCKEGTRRLLQELSKLGYRVSAKKAQLCREEVTYLGYLLKGGKRWLTPARKATVMKIPTPTTPRQVREFLGTAGFCRLWIPGFASLAAPLYPLTRPKVPFTWTEAHQEAFGRIKEALLSAPALALPDLTKPFALYVDEKEGVARGVLTQTLGPWRRPVAYLSKKLDPVASGWPTCLKAIAAVALLLKDADKLTLGQNVLVIAPHNLESIVRQPPDRWMTNARMTHYQSLLLNERVSFAPPAILNPATLLPVESDDTPIHICSEILAEETGTRPDLRDQPLPGVPAWYTDGSSFIMDGRRQAGAAIVDNKRTVWASNLPEGTSAQKAELIALTQALRLAEGKSINIYTDSRYAFATAHVHGAIYKQRGWLTSAGKDIKNKEEILALLEAIHLPKRVAIIHCPGHQRGTDPVATGNRKADEAAKQAAQSTRILTETTKNAGKRTADGSEFEKRTADGSEFESPKKKAKVE

SEQ ID NO: 6759 - protein, 2091 aa, synthetic construct
MPAAKRVKLDGGDKKYSIGLDIGTNSVGWAVITDEYKVPSKKFKVLGNTDRHSIKKNLIGALLFDSGETAEATRLKRTARRRYTRRKNRICYLQEIFSNEMAKVDDSFFHRLEESFLVEEDKKHERHPIFGNIVDEVAYHEKYPTIYHLRKKLVDSTDKADLRLIYLALAHMIKFRGHFLIEGDLNPDNSDVDKLFIQLVQTYNQLFEENPINASGVDAKAILSARLSKSRRLENLIAQLPGEKKNGLFGNLIALSLGLTPNFKSNFDLAEDAKLQLSKDTYDDDLDNLLAQIGDQYADLFLAAKNLSDAILLSDILRVNTEITKAPLSASMIKRYDEHHQDLTLLKALVRQQLPEKYKEIFFDQSKNGYAGYIDGGASQEEFYKFIKPILEKMDGTEELLVKLNREDLLRKQRTFDNGSIPHQIHLGELHAILRRQEDFYPFLKDNREKIEKILTFRIPYYVGPLARGNSRFAWMTRKSEETITPWNFEEVVDKGASAQSFIERMTNFDKNLPNEKVLPKHSLLYEYFTVYNELTKVKYVTEGMRKPAFLSGEQKKAIVDLLFKTNRKVTVKQLKEDYFKKIECFDSVEISGVEDRFNASLGTYHDLLKIIKDKDFLDNEENEDILEDIVLTLTLFEDREMIEERLKTYAHLFDDKVMKQLKRRRYTGWGRLSRKLINGIRDKQSGKTILDFLKSDGFANRNFMQLIHDDSLTFKEDIQKAQVSGQGDSLHEHIANLAGSPAIKKGILQTVKVVDELVKVMGRHKPENIVIEMARENQTTQKGQKNSRERMKRIEEGIKELGSQILKEHPVENTQLQNEKLYLYYLQNGRDMYVDQELDINRLSDYDVDHIVPQSFLKDDSIDNKVLTRSDKARGKSDNVPSEEVVKKMKNYWRQLLNAKLITQRKFDNLTKAERGGLSELDKAGFIKRQLVETRQITKHVAQILDSRMNTKYDENDKLIREVKVITLKSKLVSDFRKDFQFYKVREINNYHHAHDAYLNAVVGTALIKKYPKLESEFVYGDYKVYDVRKMIAKSEQEIGKATAKYFFYSNIMNFFKTEITLANGEIRKRPLIETNGETGEIVWDKGRDFATVRKVLSMPQVNIVKKTEVQTGGFSKESILPKRNSDKLIARKKDWDPKKYGGFDSPTVAYSVLVVAKVEKGKSKKLKSVKELLGITIMERSSFEKNPIDFLEAKGYKEVKKDLIIKLPKYSLFELENGRKRMLASAGELQKGNELALPSKYVNFLYLASHYEKLKGSPEDNEQKQLFVEQHKHYLDEIIEQISEFSKRVILADANLDKVLSAYNKHRDKPIREQAENIIHLFTLTNLGAPAAFKYFDTTIDRKRYTSTKEVLDATLIHQSITGLYETRIDLSQLGGDGGPAPGSSGGTLNLEDEYRLYETSAEPEVSPGSTWLSDFPQAWAETGGMGLAVRQAPLIIPLKATSTPVSIKQYPMSQEAKLGIKPHIQRLLDQGILVPCQSPWNTPLLPVKKPGTNDYRPVQDLREVNKRVEDIHPTVPNPYNLLSGLPPSHRWYTVLDLKDAFFCLRLHPTSQPLFAFEWRDPGMGISGQLTWTRLPQGFKNSPTLFNEALHRDLADFRIQHPDLILLQYVDDILLAATSELDCQQGTRALLLTLGNLGYRASAKKAQLCQKQVKYLGYLLKEGQRWLTEARKETVMGQPTPKTPRQLREFLGTAGFCRLWIPGFAEMAAPLYPLTKPGTLFNWGPDQQKAYQEIKQALLTAPALGLPDLTKPFELFVDEKQGYAKGVLTQKLGPWRRPVAYLSKKLDPVAAGWPPCLRMVAAIAVLRKDAGKLTMGQPLVILAPHAVEALVKQPPDRWLSNARMTHYQAMLLDTDRVQFGPVVALNPATLLPLPEEGAPHDCLEILAETHGTRPDLTDQPIPDADHTWYTDGSSFLQEGQRKAGAAVTTETEVIWARALPAGTSAQRAELIALTQALKMAEGKRLNVYTDSRYAFATAHIHGEIYRRRGWLTSEGREIKNKSEILALLKALFLPKRLSIIHCLGHQKGDSAEARGNRLADQAAREAAIKTPPDTSTLLAGKRTADGSEFEKRTADGSEFESPKKKAKVE

SEQ ID NO: 6760 - protein, 2091 aa, synthetic construct; identical to SEQ ID NO: 4513

SEQ ID NO: 6761 - protein, 2091 aa, synthetic construct; identical to SEQ ID NO: 4513

SEQ ID NO: 6762 - protein, 2082 aa, synthetic construct
MPAAKRVKLDGGDKKYSIGLDIGTNSVGWAVITDEYKVPSKKFKVLGNTDRHSIKKNLIGALLFDSGETAEATRLKRTARRRYTRRKNRICYLQEIFSNEMAKVDDSFFHRLEESFLVEEDKKHERHPIFGNIVDEVAYHEKYPTIYHLRKKLVDSTDKADLRLIYLALAHMIKFRGHFLIEGDLNPDNSDVDKLFIQLVQTYNQLFEENPINASGVDAKAILSARLSKSRRLENLIAQLPGEKKNGLFGNLIALSLGLTPNFKSNFDLAEDAKLQLSKDTYDDDLDNLLAQIGDQYADLFLAAKNLSDAILLSDILRVNTEITKAPLSASMIKRYDEHHQDLTLLKALVRQQLPEKYKEIFFDQSKNGYAGYIDGGASQEEFYKFIKPILEKMDGTEELLVKLNREDLLRKQRTFDNGSIPHQIHLGELHAILRRQEDFYPFLKDNREKIEKILTFRIPYYVGPLARGNSRFAWMTRKSEETITPWNFEEVVDKGASAQSFIERMTNFDKNLPNEKVLPKHSLLYEYFTVYNELTKVKYVTEGMRKPAFLSGEQKKAIVDLLFKTNRKVTVKQLKEDYFKKIECFDSVEISGVEDRFNASLGTYHDLLKIIKDKDFLDNEENEDILEDIVLTLTLFEDREMIEERLKTYAHLFDDKVMKQLKRRRYTGWGRLSRKLINGIRDKQSGKTILDFLKSDGFANRNFMQLIHDDSLTFKEDIQKAQVSGQGDSLHEHIANLAGSPAIKKGILQTVKVVDELVKVMGRHKPENIVIEMARENQTTQKGQKNSRERMKRIEEGIKELGSQILKEHPVENTQLQNEKLYLYYLQNGRDMYVDQELDINRLSDYDVDHIVPQSFLKDDSIDNKVLTRSDKARGKSDNVPSEEVVKKMKNYWRQLLNAKLITQRKFDNLTKAERGGLSELDKAGFIKRQLVETRQITKHVAQILDSRMNTKYDENDKLIREVKVITLKSKLVSDFRKDFQFYKVREINNYHHAHDAYLNAVVGTALIKKYPKLESEFVYGDYKVYDVRKMIAKSEQEIGKATAKYFFYSNIMNFFKTEITLANGEIRKRPLIETNGETGEIVWDKGRDFATVRKVLSMPQVNIVKKTEVQTGGFSKESILPKRNSDKLIARKKDWDPKKYGGFDSPTVAYSVLVVAKVEKGKSKKLKSVKELLGITIMERSSFEKNPIDFLEAKGYKEVKKDLIIKLPKYSLFELENGRKRMLASAGELQKGNELALPSKYVNFLYLASHYEKLKGSPEDNEQKQLFVEQHKHYLDEIIEQISEFSKRVILADANLDKVLSAYNKHRDKPIREQAENIIHLFTLTNLGAPAAFKYFDTTIDRKRYTSTKEVLDATLIHQSITGLYETRIDLSQLGGDGGPAPGSSGGIPWLMKKPLQLTTLVPLQEYEERLLKQTMLTGSYKEKLQSLFLKYDALWQHWENQVGHRRIKPHHIATGTVNPRPQKQYPINPKAKASIQTVINDLLKQGVLIQQNSIMNTPVYPVPKPDGKWRMVLDYREVNKTIPLIAAQNQHSAGILSSIFRGKYKTTLDLSNGFWAHSITPESYWLTAFTWLGQQYCWTRLPQGFLNSPALFNADVVDLLKEVPNVQVYVDDIYISHDDPREHLEQLEKVFSLLLNAGYVVSLKKSEIAQHEVEFLGFNITKEGRGLTETFKQKLLNITPPRDLKQLQSILGKLNFARNFIPNFSELVKPLYNIIATAPGKYITWTTDNSQQLQNIISMLNSAENLEERNPEVRLIMKVNTSPSAGYIRFYNEFAKRPIMYLNYVYTKAEVKFTNTEKLLTTIHKGLIKALDLGMGQEILVYSPIVSMTKIQKTPLPERKALPIRWITWMSYLEDPRIQFHYDKTLPELQQVPTVTDDIIAKIKHPSEFSMVFYTDGSAIKHPNVNKSHNAGMGIAQVQFKPEFTVINTWSIPLGDHTAQLAEVAAVEFACKKALKIDGPVLIVTDSFYVAESVNKELPYWQSNGFFNNKKKPLKHVSKWKSIADCIQLKPDIIIIHEKGHQPTASTFHTEGNNLADKLATQGSYVVNAGKRTADGSEFEKRTADGSEFESPKKKAKVE

SEQ ID NO: 6763 - protein, 2012 aa, synthetic construct
MPAAKRVKLDGGDKKYSIGLDIGTNSVGWAVITDEYKVPSKKFKVLGNTDRHSIKKNLIGALLFDSGETAEATRLKRTARRRYTRRKNRICYLQEIFSNEMAKVDDSFFHRLEESFLVEEDKKHERHPIFGNIVDEVAYHEKYPTIYHLRKKLVDSTDKADLRLIYLALAHMIKFRGHFLIEGDLNPDNSDVDKLFIQLVQTYNQLFEENPINASGVDAKAILSARLSKSRRLENLIAQLPGEKKNGLFGNLIALSLGLTPNFKSNFDLAEDAKLQLSKDTYDDDLDNLLAQIGDQYADLFLAAKNLSDAILLSDILRVNTEITKAPLSASMIKRYDEHHQDLTLLKALVRQQLPEKYKEIFFDQSKNGYAGYIDGGASQEEFYKFIKPILEKMDGTEELLVKLNREDLLRKQRTFDNGSIPHQIHLGELHAILRRQEDFYPFLKDNREKIEKILTFRIPYYVGPLARGNSRFAWMTRKSEETITPWNFEEVVDKGASAQSFIERMTNFDKNLPNEKVLPKHSLLYEYFTVYNELTKVKYVTEGMRKPAFLSGEQKKAIVDLLFKTNRKVTVKQLKEDYFKKIECFDSVEISGVEDRFNASLGTYHDLLKIIKDKDFLDNEENEDILEDIVLTLTLFEDREMIEERLKTYAHLFDDKVMKQLKRRRYTGWGRLSRKLINGIRDKQSGKTILDFLKSDGFANRNFMQLIHDDSLTFKEDIQKAQVSGQGDSLHEHIANLAGSPAIKKGILQTVKVVDELVKVMGRHKPENIVIEMARENQTTQKGQKNSRERMKRIEEGIKELGSQILKEHPVENTQLQNEKLYLYYLQNGRDMYVDQELDINRLSDYDVDHIVPQSFLKDDSIDNKVLTRSDKARGKSDNVPSEEVVKKMKNYWRQLLNAKLITQRKFDNLTKAERGGLSELDKAGFIKRQLVETRQITKHVAQILDSRMNTKYDENDKLIREVKVITLKSKLVSDFRKDFQFYKVREINNYHHAHDAYLNAVVGTALIKKYPKLESEFVYGDYKVYDVRKMIAKSEQEIGKATAKYFFYSNIMNFFKTEITLANGEIRKRPLIETNGETGEIVWDKGRDFATVRKVLSMPQVNIVKKTEVQTGGFSKESILPKRNSDKLIARKKDWDPKKYGGFDSPTVAYSVLVVAKVEKGKSKKLKSVKELLGITIMERSSFEKNPIDFLEAKGYKEVKKDLIIKLPKYSLFELENGRKRMLASAGELQKGNELALPSKYVNFLYLASHYEKLKGSPEDNEQKQLFVEQHKHYLDEIIEQISEFSKRVILADANLDKVLSAYNKHRDKPIREQAENIIHLFTLTNLGAPAAFKYFDTTIDRKRYTSTKEVLDATLIHQSITGLYETRIDLSQLGGDGGPAPGSSGGPRSRAIDIPVPHADKISWKITDPVWVDQWPLTYEKTLAAIALVQEQLAAGHIEPTNSPWNTPIFIIKKKSGSWRLLQDLRAVNKVMVPMGALQPGLPSPVAIPLNYHKIVIDLKDCFFTIPLHPEDRPYFAFSVPQINFQSPMPRYQWKVLPQGMANSPTLCQKFVAAAIAPVRSQWPEAYILHYMDDILLACDSAEAAKACYAHIISCLTSYGLKIAPDKVQVSEPFSYLGFELHHQQVFTPRVCLKTDHLKTLNDFQKLLGDIQWLRPYLKLPTSALVPLNNILKPDPNPLSVRALTPEAKQSLALINKAIQNQSVQQISYNLPLVLLLLPTPHTPTAVFWQPNGTDPTKNGSPLLWLHLPASPSKVLLTYPSLLAMLIIKGRYTGRQLFGRDPHSIIIPYTQDQLTWLLQTSDEWAIALSSFTGDIDNHYPSDPVIQFAKLHQFIFPKITKCAPIPQATLVFTDGSSNGIAAYVIDNQPISIKSPYLSAQLVELYAILQVFTVLAHQPFNLYTDSAYIAQSVPLLETVPFIKSSTNATPLFSKLQQLILNRQHPFFIGHLRAHLNLPGPLAEGNALADAATQIFPIISDAGKRTADGSEFEKRTADGSEFESPKKKAKVE

SEQ ID NO: 6764 - protein, 2091 aa, synthetic construct
MPAAKRVKLDGGDKKYSIGLDIGTNSVGWAVITDEYKVPSKKFKVLGNTDRHSIKKNLIGALLFDSGETAEATRLKRTARRRYTRRKNRICYLQEIFSNEMAKVDDSFFHRLEESFLVEEDKKHERHPIFGNIVDEVAYHEKYPTIYHLRKKLVDSTDKADLRLIYLALAHMIKFRGHFLIEGDLNPDNSDVDKLFIQLVQTYNQLFEENPINASGVDAKAILSARLSKSRRLENLIAQLPGEKKNGLFGNLIALSLGLTPNFKSNFDLAEDAKLQLSKDTYDDDLDNLLAQIGDQYADLFLAAKNLSDAILLSDILRVNTEITKAPLSASMIKRYDEHHQDLTLLKALVRQQLPEKYKEIFFDQSKNGYAGYIDGGASQEEFYKFIKPILEKMDGTEELLVKLNREDLLRKQRTFDNGSIPHQIHLGELHAILRRQEDFYPFLKDNREKIEKILTFRIPYYVGPLARGNSRFAWMTRKSEETITPWNFEEVVDKGASAQSFIERMTNFDKNLPNEKVLPKHSLLYEYFTVYNELTKVKYVTEGMRKPAFLSGEQKKAIVDLLFKTNRKVTVKQLKEDYFKKIECFDSVEISGVEDRFNASLGTYHDLLKIIKDKDFLDNEENEDILEDIVLTLTLFEDREMIEERLKTYAHLFDDKVMKQLKRRRYTGWGRLSRKLINGIRDKQSGKTILDFLKSDGFANRNFMQLIHDDSLTFKEDIQKAQVSGQGDSLHEHIANLAGSPAIKKGILQTVKVVDELVKVMGRHKPENIVIEMARENQTTQKGQKNSRERMKRIEEGIKELGSQILKEHPVENTQLQNEKLYLYYLQNGRDMYVDQELDINRLSDYDVDHIVPQSFLKDDSIDNKVLTRSDKARGKSDNVPSEEVVKKMKNYWRQLLNAKLITQRKFDNLTKAERGGLSELDKAGFIKRQLVETRQITKHVAQILDSRMNTKYDENDKLIREVKVITLKSKLVSDFRKDFQFYKVREINNYHHAHDAYLNAVVGTALIKKYPKLESEFVYGDYKVYDVRKMIAKSEQEIGKATAKYFFYSNIMNFFKTEITLANGEIRKRPLIETNGETGEIVWDKGRDFATVRKVLSMPQVNIVKKTEVQTGGFSKESILPKRNSDKLIARKKDWDPKKYGGFDSPTVAYSVLVVAKVEKGKSKKLKSVKELLGITIMERSSFEKNPIDFLEAKGYKEVKKDLIIKLPKYSLFELENGRKRMLASAGELQKGNELALPSKYVNFLYLASHYEKLKGSPEDNEQKQLFVEQHKHYLDEIIEQISEFSKRVILADANLDKVLSAYNKHRDKPIREQAENIIHLFTLTNLGAPAAFKYFDTTIDRKRYTSTKEVLDATLIHQSITGLYETRIDLSQLGGDGGPAPGSSGGTLNIEDEYRLHETSKEPDVPLGSTWLSDFPQAWAETGGMGLAVRQAPLIIPLKATSTPVSIKQYPMSQEARLGIKPHIQRLLDQGILVPCQSPWNTPLLPVKKPGTNDYRPVQDLREVNKRVEDIHPTVPNPYNLLSGLPPSHQWYTVLDLKDAFFCLRLHPTSQPLFAFEWRDPEMGISGQLTWTRLPQGFKNSPTLFNEALHRDLADFRIQHPDLILLQYVDDLLLAATSEQDCQRGTRALLQTLGNLGYRASAKKAQICQKQVKYLGYLLKEGQRWLTEARKETVMGQPTPKTPRQLREFLGKAGFCRLFIPGFAEMAAPLYPLTKPGTLFNWGPDQQKAYQEIKQALLTAPALGLPDLTKPFELFVDEKQGYAKGVLTQKLGPWRRPVAYLSKKLDPVAAGWPPCLRMVAAIAVLTKDAGKLTMGQPLVILAPHAVEALVKQPPDRWLSNARMTHYQAMLLDTDRVQFGPVVALNPATLLPLPEKEAPHDCLEILAETHGTRPDLTDQPIPDADYTWYTDGSSFLQEGQRRAGAAVTTETEVIWARALPAGTSAQRAELIALTQALKMAEGKKLNVYTDSRYAFATAHVHGEIYRRRGWLTSEGREIKNKNEILALLKALFLPKRLSIIHCPGHQKGNSAEARGNRMADQAAREAAMKAVLETSTLLAGKRTADGSEFEKRTADGSEFESPKKKAKVE

SEQ ID NO: 6765 - protein, 2095 aa, synthetic construct
MPAAKRVKLDGGDKKYSIGLDIGTNSVGWAVITDEYKVPSKKFKVLGNTDRHSIKKNLIGALLFDSGETAEATRLKRTARRRYTRRKNRICYLQEIFSNEMAKVDDSFFHRLEESFLVEEDKKHERHPIFGNIVDEVAYHEKYPTIYHLRKKLVDSTDKADLRLIYLALAHMIKFRGHFLIEGDLNPDNSDVDKLFIQLVQTYNQLFEENPINASGVDAKAILSARLSKSRRLENLIAQLPGEKKNGLFGNLIALSLGLTPNFKSNFDLAEDAKLQLSKDTYDDDLDNLLAQIGDQYADLFLAAKNLSDAILLSDILRVNTEITKAPLSASMIKRYDEHHQDLTLLKALVRQQLPEKYKEIFFDQSKNGYAGYIDGGASQEEFYKFIKPILEKMDGTEELLVKLNREDLLRKQRTFDNGSIPHQIHLGELHAILRRQEDFYPFLKDNREKIEKILTFRIPYYVGPLARGNSRFAWMTRKSEETITPWNFEEVVDKGASAQSFIERMTNFDKNLPNEKVLPKHSLLYEYFTVYNELTKVKYVTEGMRKPAFLSGEQKKAIVDLLFKTNRKVTVKQLKEDYFKKIECFDSVEISGVEDRFNASLGTYHDLLKIIKDKDFLDNEENEDILEDIVLTLTLFEDREMIEERLKTYAHLFDDKVMKQLKRRRYTGWGRLSRKLINGIRDKQSGKTILDFLKSDGFANRNFMQLIHDDSLTFKEDIQKAQVSGQGDSLHEHIANLAGSPAIKKGILQTVKVVDELVKVMGRHKPENIVIEMARENQTTQKGQKNSRERMKRIEEGIKELGSQILKEHPVENTQLQNEKLYLYYLQNGRDMYVDQELDINRLSDYDVDHIVPQSFLKDDSIDNKVLTRSDKARGKSDNVPSEEVVKKMKNYWRQLLNAKLITQRKFDNLTKAERGGLSELDKAGFIKRQLVETRQITKHVAQILDSRMNTKYDENDKLIREVKVITLKSKLVSDFRKDFQFYKVREINNYHHAHDAYLNAVVGTALIKKYPKLESEFVYGDYKVYDVRKMIAKSEQEIGKATAKYFFYSNIMNFFKTEITLANGEIRKRPLIETNGETGEIVWDKGRDFATVRKVLSMPQVNIVKKTEVQTGGFSKESILPKRNSDKLIARKKDWDPKKYGGFDSPTVAYSVLVVAKVEKGKSKKLKSVKELLGITIMERSSFEKNPIDFLEAKGYKEVKKDLIIKLPKYSLFELENGRKRMLASAGELQKGNELALPSKYVNFLYLASHYEKLKGSPEDNEQKQLFVEQHKHYLDEIIEQISEFSKRVILADANLDKVLSAYNKHRDKPIREQAENIIHLFTLTNLGAPAAFKYFDTTIDRKRYTSTKEVLDATLIHQSITGLYETRIDLSQLGGDGGEAAAKPAPGGTAPLEEEYRLFLEAPIQNVTLLEQWKREIPKVWAEINPPGLASTQAPIHVQLLSTALPVRVRQYPITLEAKRSLRETIRKFRAAGILRPVHSPWNTPLLPVRKSGTSEYRMVQDLREVNKRVETIHPTVPNPYTLLSLLPPDRIWYSVLDLKDAFFCIPLAPESQLIFAFEWADAEEGESGQLTWTRLPQGFKNSPTLFNEALNRDLQGFRLDHPSVSLLQYVDDLLIAADTQAACLSATRDLLMTLAELGYRVSGKKAQLCQEEVTYLGFKIHKGSRSLSNSRTQAILQIPVPKTKRQVREFLGKIGYCRLFIPGFAELAQPLYAATRPGNDPLVWGEKEEEAFQSLKLALTQPPALALPSLDKPFQLFVEETSGAAKGVLTQALGPWKRPVAYLSKRLDPVAAGWPRCLRAIAAAALLTREASKLTFGQDIEITSSHNLESLLRSPPDKWLTNARITQYQVLLLDPPRVRFKQTAALNPATLLPETDDTLPIHHCLDTLDSLTSTRPDLTDQPLAQAEATLFTDGSSYIRDGKRYAGAAVVTLDSVIWAEPLPIGTSAQKAELIALTKALEWSKDKSVNIYTDSRYAFATLHVHGMIYRERGWLTAGGKAIKNAPEILALLTAVWLPKRVAVMHCKGHQKDDAPTSTGNRRADEVAREVAIRPLSTQATISAGKRTADGSEFEKRTADGSEFESPKKKAKVE

SEQ ID NO: 6766 - protein, 2084 aa, synthetic construct
MPAAKRVKLDGGDKKYSIGLDIGTNSVGWAVITDEYKVPSKKFKVLGNTDRHSIKKNLIGALLFDSGETAEATRLKRTARRRYTRRKNRICYLQEIFSNEMAKVDDSFFHRLEESFLVEEDKKHERHPIFGNIVDEVAYHEKYPTIYHLRKKLVDSTDKADLRLIYLALAHMIKFRGHFLIEGDLNPDNSDVDKLFIQLVQTYNQLFEENPINASGVDAKAILSARLSKSRRLENLIAQLPGEKKNGLFGNLIALSLGLTPNFKSNFDLAEDAKLQLSKDTYDDDLDNLLAQIGDQYADLFLAAKNLSDAILLSDILRVNTEITKAPLSASMIKRYDEHHQDLTLLKALVRQQLPEKYKEIFFDQSKNGYAGYIDGGASQEEFYKFIKPILEKMDGTEELLVKLNREDLLRKQRTFDNGSIPHQIHLGELHAILRRQEDFYPFLKDNREKIEKILTFRIPYYVGPLARGNSRFAWMTRKSEETITPWNFEEVVDKGASAQSFIERMTNFDKNLPNEKVLPKHSLLYEYFTVYNELTKVKYVTEGMRKPAFLSGEQKKAIVDLLFKTNRKVTVKQLKEDYFKKIECFDSVEISGVEDRFNASLGTYHDLLKIIKDKDFLDNEENEDILEDIVLTLTLFEDREMIEERLKTYAHLFDDKVMKQLKRRRYTGWGRLSRKLINGIRDKQSGKTILDFLKSDGFANRNFMQLIHDDSLTFKEDIQKAQVSGQGDSLHEHIANLAGSPAIKKGILQTVKVVDELVKVMGRHKPENIVIEMARENQTTQKGQKNSRERMKRIEEGIKELGSQILKEHPVENTQLQNEKLYLYYLQNGRDMYVDQELDINRLSDYDVDHIVPQSFLKDDSIDNKVLTRSDKARGKSDNVPSEEVVKKMKNYWRQLLNAKLITQRKFDNLTKAERGGLSELDKAGFIKRQLVETRQITKHVAQILDSRMNTKYDENDKLIREVKVITLKSKLVSDFRKDFQFYKVREINNYHHAHDAYLNAVVGTALIKKYPKLESEFVYGDYKVYDVRKMIAKSEQEIGKATAKYFFYSNIMNFFKTEITLANGEIRKRPLIETNGETGEIVWDKGRDFATVRKVLSMPQVNIVKKTEVQTGGFSKESILPKRNSDKLIARKKDWDPKKYGGFDSPTVAYSVLVVAKVEKGKSKKLKSVKELLGITIMERSSFEKNPIDFLEAKGYKEVKKDLIIKLPKYSLFELENGRKRMLASAGELQKGNELALPSKYVNFLYLASHYEKLKGSPEDNEQKQLFVEQHKHYLDEIIEQISEFSKRVILADANLDKVLSAYNKHRDKPIREQAENIIHLFTLTNLGAPAAFKYFDTTIDRKRYTSTKEVLDATLIHQSITGLYETRIDLSQLGGDGGEAAAKPAPGGVPWILKKPLELTIKLDLEEQQGTLLNNSILSKKGKEELKQLFEKYSALWQSWENQVGHRRIRPHKIATGTVKPTPQKQYHINPKAKPDIQIVINDLLKQGVLIQKESTMNTPVYPVPKPNGRWRMVLDYRAVNKVTPLIAVQNQHSYGILGSLFKGRYKTTIDLSNGFWAHPIVPEDYWITAFTWQGKQYCWTVLPQGFLNSPGLFNGDVVDLLQGIPNVEVYVDDVYISHDSEKEHLEYLDILFNRLKEAGYIISLKKSNIANSIVDFLGFQITNEGRGLTDTFKEKLENITAPTTLKQLQSILGLLNFARNFIPDFTELIAPLYALIPKSPKNYVPWQIEHSTTLETLITKLNGAEYLQGRKGDKTLIMKVNASYTTGYIRYYNEGEKKPISYVSIVFSKTELKFTELEKLLTTVHKGLLKALDLSMGQNIHVYSPIVSMQNIQKTPQTAKKALASRWLSWLSYLEDPRIRFFYDPQMPALKDLPAVDTGKDNKKHPSNFQHIFYTDGSAITSPTKEGHLNAGMGIVYFINKDGNLQKQQEWSISLGNHTAQFAEIAAFEFALKKCLPLGGNILVVTDSNYVAKAYNEELDVWASNGFVNNRKKPLKHISKWKSVADLKRLRPDVVVTHEPGHQKLDSSPHAYGNNLADQLATQASFKVHAGKRTADGSEFEKRTADGSEFESPKKKAKVE

SEQ ID NO: 6767 - protein, 2084 aa, synthetic construct
MPAAKRVKLDGGDKKYSIGLDIGTNSVGWAVITDEYKVPSKKFKVLGNTDRHSIKKNLIGALLFDSGETAEATRLKRTARRRYTRRKNRICYLQEIFSNEMAKVDDSFFHRLEESFLVEEDKKHERHPIFGNIVDEVAYHEKYPTIYHLRKKLVDSTDKADLRLIYLALAHMIKFRGHFLIEGDLNPDNSDVDKLFIQLVQTYNQLFEENPINASGVDAKAILSARLSKSRRLENLIAQLPGEKKNGLFGNLIALSLGLTPNFKSNFDLAEDAKLQLSKDTYDDDLDNLLAQIGDQYADLFLAAKNLSDAILLSDILRVNTEITKAPLSASMIKRYDEHHQDLTLLKALVRQQLPEKYKEIFFDQSKNGYAGYIDGGASQEEFYKFIKPILEKMDGTEELLVKLNREDLLRKQRTFDNGSIPHQIHLGELHAILRRQEDFYPFLKDNREKIEKILTFRIPYYVGPLARGNSRFAWMTRKSEETITPWNFEEVVDKGASAQSFIERMTNFDKNLPNEKVLPKHSLLYEYFTVYNELTKVKYVTEGMRKPAFLSGEQKKAIVDLLFKTNRKVTVKQLKEDYFKKIECFDSVEISGVEDRFNASLGTYHDLLKIIKDKDFLDNEENEDILEDIVLTLTLFEDREMIEERLKTYAHLFDDKVMKQLKRRRYTGWGRLSRKLINGIRDKQSGKTILDFLKSDGFANRNFMQLIHDDSLTFKEDIQKAQVSGQGDSLHEHIANLAGSPAIKKGILQTVKVVDELVKVMGRHKPENIVIEMARENQTTQKGQKNSRERMKRIEEGIKELGSQILKEHPVENTQLQNEKLYLYYLQNGRDMYVDQELDINRLSDYDVDHIVPQSFLKDDSIDNKVLTRSDKARGKSDNVPSEEVVKKMKNYWRQLLNAKLITQRKFDNLTKAERGGLSELDKAGFIKRQLVETRQITKHVAQILDSRMNTKYDENDKLIREVKVITLKSKLVSDFRKDFQFYKVREINNYHHAHDAYLNAVVGTALIKKYPKLESEFVYGDYKVYDVRKMIAKSEQEIGKATAKYFFYSNIMNFFKTEITLANGEIRKRPLIETNGETGEIVWDKGRDFATVRKVLSMPQVNIVKKTEVQTGGFSKESILPKRNSDKLIARKKDWDPKKYGGFDSPTVAYSVLVVAKVEKGKSKKLKSVKELLGITIMERSSFEKNPIDFLEAKGYKEVKKDLIIKLPKYSLFELENGRKRMLASAGELQKGNELALPSKYVNFLYLASHYEKLKGSPEDNEQKQLFVEQHKHYLDEIIEQISEFSKRVILADANLDKVLSAYNKHRDKPIREQAENIIHLFTLTNLGAPAAFKYFDTTIDRKRYTSTKEVLDATLIHQSITGLYETRIDLSQLGGDGGEAAAKPAPGGVPWLTQQPLQLTILVPLQEYQEKILSKTALPEDQKQQLKTLFVKYDNLWQHWENQVGHRKIRPHNIATGDYPPRPQKQYPINPKAKPSIQIVIDDLLKQGVLTPQNSTMNTPVYPVPKPDGRWRMVLDYREVNKTIPLTAAQNQHSAGILATIVRQKYKTTLDLANGFWAHPITPESYWLTAFTWQGKQYCWTRLPQGFLNSPALFNADVVDLLKEIPNVQVYVDDIYLSHDDPKEHVQQLEKVFQILLQAGYVVSLKKSEIGQKTVEFLGFNITKEGRGLTDTFKTKLLNITPPKDLKQLQSILGKLNFARNFIPNFAELVQPLYNLIAPAKGKYIEWSEENTKQLNMVIEALNTASNLEERLPEQRLVIKVNTSPSAGYVRYYNETGKKPIMYLNYVFSKAELKFSMLEKLLTTMHKALIKAMDLAMGQEILVYSPIVSMTKIQKTPLPERKALPIRWITWMTYLEDPRIQFHYDKTLPELKHIPDVYTSSQSPVKHPSQYEGVFYTDGSAIKSPDPTKSNNAGMGIVHATYKPEYQVLNQWSIPLGNHTAQMAEIAAVEFACKKALKIPGPVLVITDSFYVAESANKELPYWKSNGFVNNKKKPLKHISKWKSIAECLSMKPDITIQHEKGISLQIPVFILKGNALADKLATQGSYVVNAGKRTADGSEFEKRTADGSEFESPKKKAKVE

SEQ ID NO: 6768 - protein, 2173 aa, synthetic construct
MPAAKRVKLDGGDKKYSIGLDIGTNSVGWAVITDEYKVPSKKFKVLGNTDRHSIKKNLIGALLFDSGETAEATRLKRTARRRYTRRKNRICYLQEIFSNEMAKVDDSFFHRLEESFLVEEDKKHERHPIFGNIVDEVAYHEKYPTIYHLRKKLVDSTDKADLRLIYLALAHMIKFRGHFLIEGDLNPDNSDVDKLFIQLVQTYNQLFEENPINASGVDAKAILSARLSKSRRLENLIAQLPGEKKNGLFGNLIALSLGLTPNFKSNFDLAEDAKLQLSKDTYDDDLDNLLAQIGDQYADLFLAAKNLSDAILLSDILRVNTEITKAPLSASMIKRYDEHHQDLTLLKALVRQQLPEKYKEIFFDQSKNGYAGYIDGGASQEEFYKFIKPILEKMDGTEELLVKLNREDLLRKQRTFDNGSIPHQIHLGELHAILRRQEDFYPFLKDNREKIEKILTFRIPYYVGPLARGNSRFAWMTRKSEETITPWNFEEVVDKGASAQSFIERMTNFDKNLPNEKVLPKHSLLYEYFTVYNELTKVKYVTEGMRKPAFLSGEQKKAIVDLLFKTNRKVTVKQLKEDYFKKIECFDSVEISGVEDRFNASLGTYHDLLKIIKDKDFLDNEENEDILEDIVLTLTLFEDREMIEERLKTYAHLFDDKVMKQLKRRRYTGWGRLSRKLINGIRDKQSGKTILDFLKSDGFANRNFMQLIHDDSLTFKEDIQKAQVSGQGDSLHEHIANLAGSPAIKKGILQTVKVVDELVKVMGRHKPENIVIEMARENQTTQKGQKNSRERMKRIEEGIKELGSQILKEHPVENTQLQNEKLYLYYLQNGRDMYVDQELDINRLSDYDVDHIVPQSFLKDDSIDNKVLTRSDKARGKSDNVPSEEVVKKMKNYWRQLLNAKLITQRKFDNLTKAERGGLSELDKAGFIKRQLVETRQITKHVAQILDSRMNTKYDENDKLIREVKVITLKSKLVSDFRKDFQFYKVREINNYHHAHDAYLNAVVGTALIKKYPKLESEFVYGDYKVYDVRKMIAKSEQEIGKATAKYFFYSNIMNFFKTEITLANGEIRKRPLIETNGETGEIVWDKGRDFATVRKVLSMPQVNIVKKTEVQTGGFSKESILPKRNSDKLIARKKDWDPKKYGGFDSPTVAYSVLVVAKVEKGKSKKLKSVKELLGITIMERSSFEKNPIDFLEAKGYKEVKKDLIIKLPKYSLFELENGRKRMLASAGELQKGNELALPSKYVNFLYLASHYEKLKGSPEDNEQKQLFVEQHKHYLDEIIEQISEFSKRVILADANLDKVLSAYNKHRDKPIREQAENIIHLFTLTNLGAPAAFKYFDTTIDRKRYTSTKEVLDATLIHQSITGLYETRIDLSQLGGDGGEAAAKPAPGGMNPLQLLQPLPAEIKGTKLLAHWNSGATITCIPESFLEDEQPIKKTLIKTIHGEKQQNVYYVTFKVKGRKVEAEVIASPYEYILLSPTDVPWLTQQPLQLTILVPLQEYQEKILSKTALPEDQKQQLKTLFVKYDNLWQHWENQVGHRKIRPHNIATGDYPPRPQKQYPINPKAKPSIQIVIDDLLKQGVLTPQNSTMNTPVYPVPKPDGRWRMVLDYREVNKTIPLTAAQNQHSAGILATIVRQKYKTTLDLANGFWAHPITPESYWLTAFTWQGKQYCWTRLPQGFLNSPALFNADVVDLLKEIPNVQVYVDDIYLSHDDPKEHVQQLEKVFQILLQAGYVVSLKKSEIGQKTVEFLGFNITKEGRGLTDTFKTKLLNITPPKDLKQLQSILGKLNFARNFIPNFAELVQPLYNLIAPAKGKYIEWSEENTKQLNMVIEALNTASNLEERLPEQRLVIKVNTSPSAGYVRYYNETGKKPIMYLNYVFSKAELKFSMLEKLLTTMHKALIKAMDLAMGQEILVYSPIVSMTKIQKTPLPERKALPIRWITWMTYLEDPRIQFHYDKTLPELKHIPDVYTSSQSPVKHPSQYEGVFYTDGSAIKSPDPTKSNNAGMGIVHATYKPEYQVLNQWSIPLGNHTAQMAEIAAVEFACKKALKIPGPVLVITDSFYVAESANKELPYWKSNGFVNNKKKPLKHISKWKSIAECLSMKPDITIQHEKGISLQIPVFILKGNALADKLATQGSYVVNAGKRTADGSEFEKRTADGSEFESPKKKAKVE

SEQ ID NO: 6769 - protein, 2091 aa, synthetic construct
MPAAKRVKLDGGDKKYSIGLDIGTNSVGWAVITDEYKVPSKKFKVLGNTDRHSIKKNLIGALLFDSGETAEATRLKRTARRRYTRRKNRICYLQEIFSNEMAKVDDSFFHRLEESFLVEEDKKHERHPIFGNIVDEVAYHEKYPTIYHLRKKLVDSTDKADLRLIYLALAHMIKFRGHFLIEGDLNPDNSDVDKLFIQLVQTYNQLFEENPINASGVDAKAILSARLSKSRRLENLIAQLPGEKKNGLFGNLIALSLGLTPNFKSNFDLAEDAKLQLSKDTYDDDLDNLLAQIGDQYADLFLAAKNLSDAILLSDILRVNTEITKAPLSASMIKRYDEHHQDLTLLKALVRQQLPEKYKEIFFDQSKNGYAGYIDGGASQEEFYKFIKPILEKMDGTEELLVKLNREDLLRKQRTFDNGSIPHQIHLGELHAILRRQEDFYPFLKDNREKIEKILTFRIPYYVGPLARGNSRFAWMTRKSEETITPWNFEEVVDKGASAQSFIERMTNFDKNLPNEKVLPKHSLLYEYFTVYNELTKVKYVTEGMRKPAFLSGEQKKAIVDLLFKTNRKVTVKQLKEDYFKKIECFDSVEISGVEDRFNASLGTYHDLLKIIKDKDFLDNEENEDILEDIVLTLTLFEDREMIEERLKTYAHLFDDKVMKQLKRRRYTGWGRLSRKLINGIRDKQSGKTILDFLKSDGFANRNFMQLIHDDSLTFKEDIQKAQVSGQGDSLHEHIANLAGSPAIKKGILQTVKVVDELVKVMGRHKPENIVIEMARENQTTQKGQKNSRERMKRIEEGIKELGSQILKEHPVENTQLQNEKLYLYYLQNGRDMYVDQELDINRLSDYDVDHIVPQSFLKDDSIDNKVLTRSDKARGKSDNVPSEEVVKKMKNYWRQLLNAKLITQRKFDNLTKAERGGLSELDKAGFIKRQLVETRQITKHVAQILDSRMNTKYDENDKLIREVKVITLKSKLVSDFRKDFQFYKVREINNYHHAHDAYLNAVVGTALIKKYPKLESEFVYGDYKVYDVRKMIAKSEQEIGKATAKYFFYSNIMNFFKTEITLANGEIRKRPLIETNGETGEIVWDKGRDFATVRKVLSMPQVNIVKKTEVQTGGFSKESILPKRNSDKLIARKKDWDPKKYGGFDSPTVAYSVLVVAKVEKGKSKKLKSVKELLGITIMERSSFEKNPIDFLEAKGYKEVKKDLIIKLPKYSLFELENGRKRMLASAGELQKGNELALPSKYVNFLYLASHYEKLKGSPEDNEQKQLFVEQHKHYLDEIIEQISEFSKRVILADANLDKVLSAYNKHRDKPIREQAENIIHLFTLTNLGAPAAFKYFDTTIDRKRYTSTKEVLDATLIHQSITGLYETRIDLSQLGGDGGEAAAKPAPGGVLNLEEEYRLHEKPVPSSIDPSWLQLFPTVWAERAGMGLANQVPPVVVELRSGASPVAVRQYPMSKEAREGIRPHIQKFLDLGVLVPCRSPWNTPLLPVKKPGTNDYRPVQDLREINKRVQDIHPTVPNPYNLLSSLPPSYTWYSVLDLKDAFFCLRLHPNSQPLFAFEWKDPEKGNTGQLTWTRLPQGFKNSPTLFNEALHRDLAPFRALNPQVVLLQYVDDLLVAAPTYEDCKKGTQKLLQELSKLGYRVSAKKAQLCQREVTYLGYLLKEGKRWLTPARKATVMKIPVPTTPRQVREFLGKAGFCRLFIPGFASLAAPLYPLTKPSIPFIWTEEHQQAFDHIKKALLSAPALALPDLTKPFTLYIDERAGVARGVLTQTLGPWRRPVAYLSKKLDPVASGWPTCLKAVAAVALLLKDADKLTLGQNVTVIASHSLESIVRQPPDRWMTNARMTHYQSLLLNERVSFAPPAVLNPATLLPVESEATPVHRCSEILAEETGTRRDLEDQPLPGVPTWYTDGSSFITEGKRRAGAPIVDGKRTVWASSLPEGTSAQKAELVALTQALRLAEGKNINIYTDSRYAFATAHIHGAIYKQRGWLTSAGKDIKNKEEILALLEAIHLPRRVAIIHCPGHQRGSNPVATGNRRADEAAKQAALSTRVLAGTTKPAGKRTADGSEFEKRTADGSEFESPKKKAKVE

SEQ ID NO: 6770 - protein, 2124 aa, synthetic construct
MPAAKRVKLDGGDKKYSIGLDIGTNSVGWAVITDEYKVPSKKFKVLGNTDRHSIKKNLIGALLFDSGETAEATRLKRTARRRYTRRKNRICYLQEIFSNEMAKVDDSFFHRLEESFLVEEDKKHERHPIFGNIVDEVAYHEKYPTIYHLRKKLVDSTDKADLRLIYLALAHMIKFRGHFLIEGDLNPDNSDVDKLFIQLVQTYNQLFEENPINASGVDAKAILSARLSKSRRLENLIAQLPGEKKNGLFGNLIALSLGLTPNFKSNFDLAEDAKLQLSKDTYDDDLDNLLAQIGDQYADLFLAAKNLSDAILLSDILRVNTEITKAPLSASMIKRYDEHHQDLTLLKALVRQQLPEKYKEIFFDQSKNGYAGYIDGGASQEEFYKFIKPILEKMDGTEELLVKLNREDLLRKQRTFDNGSIPHQIHLGELHAILRRQEDFYPFLKDNREKIEKILTFRIPYYVGPLARGNSRFAWMTRKSEETITPWNFEEVVDKGASAQSFIERMTNFDKNLPNEKVLPKHSLLYEYFTVYNELTKVKYVTEGMRKPAFLSGEQKKAIVDLLFKTNRKVTVKQLKEDYFKKIECFDSVEISGVEDRFNASLGTYHDLLKIIKDKDFLDNEENEDILEDIVLTLTLFEDREMIEERLKTYAHLFDDKVMKQLKRRRYTGWGRLSRKLINGIRDKQSGKTILDFLKSDGFANRNFMQLIHDDSLTFKEDIQKAQVSGQGDSLHEHIANLAGSPAIKKGILQTVKVVDELVKVMGRHKPENIVIEMARENQTTQKGQKNSRERMKRIEEGIKELGSQILKEHPVENTQLQNEKLYLYYLQNGRDMYVDQELDINRLSDYDVDHIVPQSFLKDDSIDNKVLTRSDKARGKSDNVPSEEVVKKMKNYWRQLLNAKLITQRKFDNLTKAERGGLSELDKAGFIKRQLVETRQITKHVAQILDSRMNTKYDENDKLIREVKVITLKSKLVSDFRKDFQFYKVREINNYHHAHDAYLNAVVGTALIKKYPKLESEFVYGDYKVYDVRKMIAKSEQEIGKATAKYFFYSNIMNFFKTEITLANGEIRKRPLIETNGETGEIVWDKGRDFATVRKVLSMPQVNIVKKTEVQTGGFSKESILPKRNSDKLIARKKDWDPKKYGGFDSPTVAYSVLVVAKVEKGKSKKLKSVKELLGITIMERSSFEKNPIDFLEAKGYKEVKKDLIIKLPKYSLFELENGRKRMLASAGELQKGNELALPSKYVNFLYLASHYEKLKGSPEDNEQKQLFVEQHKHYLDEIIEQISEFSKRVILADANLDKVLSAYNKHRDKPIREQAENIIHLFTLTNLGAPAAFKYFDTTIDRKRYTSTKEVLDATLIHQSITGLYETRIDLSQLGGDGGEAAAKPAPGGLLGRDLLTKLKAQIQFSTEGPQVTWEDRPAMCLVLNLEEEYRLHEKPVPPSIDPSWLQLFPMVWAEKAGMGLANQVPPVVVELKSDASPVAVRQYPMSKEAREGIRPHIQRFLDLGILVPCQSPWNTPLLPVKKPGTNDYRPVQDLREVNKRVQDIHPTVPNPYNLLSSLPPSHTWYSVLDLKDAFFCLKLHPNSQPLFAFEWRDPEKGNTGQLTWTRLPQGFKNSPTLFNEALHRDLASFRALNPQVVMLQYVDDLLVAAPTYRDCKEGTRRLLQELSKLGYRVSAKKAQLCREEVTYLGYLLKGGKRWLTPARKATVMKIPTPTTPRQVREFLGTAGFCRLWIPGFASLAAPLYPLTRPKVPFTWTEAHQEAFGRIKEALLSAPALALPDLTKPFALYVDEKEGVARGVLTQTLGPWRRPVAYLSKKLDPVASGWPTCLKAIAAVALLLKDADKLTLGQNVLVIAPHNLESIVRQPPDRWMTNARMTHYQSLLLNERVSFAPPAILNPATLLPVESDDTPIHICSEILAEETGTRPDLRDQPLPGVPAWYTDGSSFIMDGRRQAGAAIVDNKRTVWASNLPEGTSAQKAELIALTQALRLAEGKSINIYTDSRYAFATAHVHGAIYKQRGWLTSAGKDIKNKEEILALLEAIHLPKRVAIIHCPGHQRGTDPVATGNRKADEAAKQAAQSTRILTETTKNAGKRTADGSEFEKRTADGSEFESPKKKAKVE

SEQ ID NO: 6771 - protein, 2124 aa, synthetic construct
MPAAKRVKLDGGDKKYSIGLDIGTNSVGWAVITDEYKVPSKKFKVLGNTDRHSIKKNLIGALLFDSGETAEATRLKRTARRRYTRRKNRICYLQEIFSNEMAKVDDSFFHRLEESFLVEEDKKHERHPIFGNIVDEVAYHEKYPTIYHLRKKLVDSTDKADLRLIYLALAHMIKFRGHFLIEGDLNPDNSDVDKLFIQLVQTYNQLFEENPINASGVDAKAILSARLSKSRRLENLIAQLPGEKKNGLFGNLIALSLGLTPNFKSNFDLAEDAKLQLSKDTYDDDLDNLLAQIGDQYADLFLAAKNLSDAILLSDILRVNTEITKAPLSASMIKRYDEHHQDLTLLKALVRQQLPEKYKEIFFDQSKNGYAGYIDGGASQEEFYKFIKPILEKMDGTEELLVKLNREDLLRKQRTFDNGSIPHQIHLGELHAILRRQEDFYPFLKDNREKIEKILTFRIPYYVGPLARGNSRFAWMTRKSEETITPWNFEEVVDKGASAQSFIERMTNFDKNLPNEKVLPKHSLLYEYFTVYNELTKVKYVTEGMRKPAFLSGEQKKAIVDLLFKTNRKVTVKQLKEDYFKKIECFDSVEISGVEDRFNASLGTYHDLLKIIKDKDFLDNEENEDILEDIVLTLTLFEDREMIEERLKTYAHLFDDKVMKQLKRRRYTGWGRLSRKLINGIRDKQSGKTILDFLKSDGFANRNFMQLIHDDSLTFKEDIQKAQVSGQGDSLHEHIANLAGSPAIKKGILQTVKVVDELVKVMGRHKPENIVIEMARENQTTQKGQKNSRERMKRIEEGIKELGSQILKEHPVENTQLQNEKLYLYYLQNGRDMYVDQELDINRLSDYDVDHIVPQSFLKDDSIDNKVLTRSDKARGKSDNVPSEEVVKKMKNYWRQLLNAKLITQRKFDNLTKAERGGLSELDKAGFIKRQLVETRQITKHVAQILDSRMNTKYDENDKLIREVKVITLKSKLVSDFRKDFQFYKVREINNYHHAHDAYLNAVVGTALIKKYPKLESEFVYGDYKVYDVRKMIAKSEQEIGKATAKYFFYSNIMNFFKTEITLANGEIRKRPLIETNGETGEIVWDKGRDFATVRKVLSMPQVNIVKKTEVQTGGFSKESILPKRNSDKLIARKKDWDPKKYGGFDSPTVAYSVLVVAKVEKGKSKKLKSVKELLGITIMERSSFEKNPIDFLEAKGYKEVKKDLIIKLPKYSLFELENGRKRMLASAGELQKGNELALPSKYVNFLYLASHYEKLKGSPEDNEQKQLFVEQHKHYLDEIIEQISEFSKRVILADANLDKVLSAYNKHRDKPIREQAENIIHLFTLTNLGAPAAFKYFDTTIDRKRYTSTKEVLDATLIHQSITGLYETRIDLSQLGGDGGEAAAKPAPGGLLGRDLLTKLKAQIQFSTEGPQVTWEDRPAMCLVLNLEEEYRLHEKPVPPSIDPSWLQLFPMVWAEKAGMGLANQVPPVVVELKSDASPVAVRQYPMSKEAREGIRPHIQRFLDLGILVPCQSPWNTPLLPVKKPGTNDYRPVQDLREVNKRVQDIHPTVPNPYNLLSSLPPSHTWYSVLDLKDAFFCLKLHPNSQPLFAFEWRDPEKGNTGQLTWTRLPQGFKNSPTLFNEALHRDLASFRALNPQVVMLQYVDDLLVAAPTYRDCKEGTRRLLQELSKLGYRVSAKKAQLCREEVTYLGYLLKGGKRWLTPARKATVMKIPTPTTPRQVREFLGKAGFCRLFIPGFASLAAPLYPLTRPKVPFTWTEAHQEAFGRIKEALLSAPALALPDLTKPFALYVDEKEGVARGVLTQTLGPWRRPVAYLSKKLDPVASGWPTCLKAIAAVALLLKDADKLTLGQNVLVIAPHNLESIVRQPPDRWMTNARMTHYQSLLLNERVSFAPPAILNPATLLPVESDDTPIHICSEILAEETGTRPDLRDQPLPGVPAWYTDGSSFIMDGRRQAGAAIVDNKRTVWASNLPEGTSAQKAELIALTQALRLAEGKSINIYTDSRYAFATAHVHGAIYKQRGWLTSAGKDIKNKEEILALLEAIHLPKRVAIIHCPGHQRGTDPVATGNRKADEAAKQAAQSTRILTETTKNAGKRTADGSEFEKRTADGSEFESPKKKAKVE

SEQ ID NO: 6772 - protein, 2215 aa, synthetic construct
MPAAKRVKLDGGDKKYSIGLDIGTNSVGWAVITDEYKVPSKKFKVLGNTDRHSIKKNLIGALLFDSGETAEATRLKRTARRRYTRRKNRICYLQEIFSNEMAKVDDSFFHRLEESFLVEEDKKHERHPIFGNIVDEVAYHEKYPTIYHLRKKLVDSTDKADLRLIYLALAHMIKFRGHFLIEGDLNPDNSDVDKLFIQLVQTYNQLFEENPINASGVDAKAILSARLSKSRRLENLIAQLPGEKKNGLFGNLIALSLGLTPNFKSNFDLAEDAKLQLSKDTYDDDLDNLLAQIGDQYADLFLAAKNLSDAILLSDILRVNTEITKAPLSASMIKRYDEHHQDLTLLKALVRQQLPEKYKEIFFDQSKNGYAGYIDGGASQEEFYKFIKPILEKMDGTEELLVKLNREDLLRKQRTFDNGSIPHQIHLGELHAILRRQEDFYPFLKDNREKIEKILTFRIPYYVGPLARGNSRFAWMTRKSEETITPWNFEEVVDKGASAQSFIERMTNFDKNLPNEKVLPKHSLLYEYFTVYNELTKVKYVTEGMRKPAFLSGEQKKAIVDLLFKTNRKVTVKQLKEDYFKKIECFDSVEISGVEDRFNASLGTYHDLLKIIKDKDFLDNEENEDILEDIVLTLTLFEDREMIEERLKTYAHLFDDKVMKQLKRRRYTGWGRLSRKLINGIRDKQSGKTILDFLKSDGFANRNFMQLIHDDSLTFKEDIQKAQVSGQGDSLHEHIANLAGSPAIKKGILQTVKVVDELVKVMGRHKPENIVIEMARENQTTQKGQKNSRERMKRIEEGIKELGSQILKEHPVENTQLQNEKLYLYYLQNGRDMYVDQELDINRLSDYDVDHIVPQSFLKDDSIDNKVLTRSDKARGKSDNVPSEEVVKKMKNYWRQLLNAKLITQRKFDNLTKAERGGLSELDKAGFIKRQLVETRQITKHVAQILDSRMNTKYDENDKLIREVKVITLKSKLVSDFRKDFQFYKVREINNYHHAHDAYLNAVVGTALIKKYPKLESEFVYGDYKVYDVRKMIAKSEQEIGKATAKYFFYSNIMNFFKTEITLANGEIRKRPLIETNGETGEIVWDKGRDFATVRKVLSMPQVNIVKKTEVQTGGFSKESILPKRNSDKLIARKKDWDPKKYGGFDSPTVAYSVLVVAKVEKGKSKKLKSVKELLGITIMERSSFEKNPIDFLEAKGYKEVKKDLIIKLPKYSLFELENGRKRMLASAGELQKGNELALPSKYVNFLYLASHYEKLKGSPEDNEQKQLFVEQHKHYLDEIIEQISEFSKRVILADANLDKVLSAYNKHRDKPIREQAENIIHLFTLTNLGAPAAFKYFDTTIDRKRYTSTKEVLDATLIHQSITGLYETRIDLSQLGGDGGEAAAKPAPGGTLGDQGSRGSDPLPEPRVTLTVEGIPTEFLVNTGAEHSVLTKPMGKMGSKRTVVAGATGSKVYPWTTKRLLKIGQKQVTHSFLVIPECPAPLLGRDLLTKLKAQIQFSTEGPQVTWEDRPAMCLVLNLEEEYRLHEKPVPPSIDPSWLQLFPMVWAEKAGMGLANQVPPVVVELKSDASPVAVRQYPMSKEAREGIRPHIQRFLDLGILVPCQSPWNTPLLPVKKPGTNDYRPVQDLREVNKRVQDIHPTVPNPYNLLSSLPPSHTWYSVLDLKDAFFCLKLHPNSQPLFAFEWRDPEKGNTGQLTWTRLPQGFKNSPTLFNEALHRDLASFRALNPQVVMLQYVDDLLVAAPTYRDCKEGTRRLLQELSKLGYRVSAKKAQLCREEVTYLGYLLKGGKRWLTPARKATVMKIPTPTTPRQVREFLGTAGFCRLWIPGFASLAAPLYPLTRPKVPFTWTEAHQEAFGRIKEALLSAPALALPDLTKPFALYVDEKEGVARGVLTQTLGPWRRPVAYLSKKLDPVASGWPTCLKAIAAVALLLKDADKLTLGQNVLVIAPHNLESIVRQPPDRWMTNARMTHYQSLLLNERVSFAPPAILNPATLLPVESDDTPIHICSEILAEETGTRPDLRDQPLPGVPAWYTDGSSFIMDGRRQAGAAIVDNKRTVWASNLPEGTSAQKAELIALTQALRLAEGKSINIYTDSRYAFATAHVHGAIYKQRGWLTSAGKDIKNKEEILALLEAIHLPKRVAIIHCPGHQRGTDPVATGNRKADEAAKQAAQSTRILTETTKNAGKRTADGSEFEKRTADGSEFESPKKKAKVE

SEQ ID NO: 6773 - protein, 2093 aa, synthetic construct
MPAAKRVKLDGGDKKYSIGLDIGTNSVGWAVITDEYKVPSKKFKVLGNTDRHSIKKNLIGALLFDSGETAEATRLKRTARRRYTRRKNRICYLQEIFSNEMAKVDDSFFHRLEESFLVEEDKKHERHPIFGNIVDEVAYHEKYPTIYHLRKKLVDSTDKADLRLIYLALAHMIKFRGHFLIEGDLNPDNSDVDKLFIQLVQTYNQLFEENPINASGVDAKAILSARLSKSRRLENLIAQLPGEKKNGLFGNLIALSLGLTPNFKSNFDLAEDAKLQLSKDTYDDDLDNLLAQIGDQYADLFLAAKNLSDAILLSDILRVNTEITKAPLSASMIKRYDEHHQDLTLLKALVRQQLPEKYKEIFFDQSKNGYAGYIDGGASQEEFYKFIKPILEKMDGTEELLVKLNREDLLRKQRTFDNGSIPHQIHLGELHAILRRQEDFYPFLKDNREKIEKILTFRIPYYVGPLARGNSRFAWMTRKSEETITPWNFEEVVDKGASAQSFIERMTNFDKNLPNEKVLPKHSLLYEYFTVYNELTKVKYVTEGMRKPAFLSGEQKKAIVDLLFKTNRKVTVKQLKEDYFKKIECFDSVEISGVEDRFNASLGTYHDLLKIIKDKDFLDNEENEDILEDIVLTLTLFEDREMIEERLKTYAHLFDDKVMKQLKRRRYTGWGRLSRKLINGIRDKQSGKTILDFLKSDGFANRNFMQLIHDDSLTFKEDIQKAQVSGQGDSLHEHIANLAGSPAIKKGILQTVKVVDELVKVMGRHKPENIVIEMARENQTTQKGQKNSRERMKRIEEGIKELGSQILKEHPVENTQLQNEKLYLYYLQNGRDMYVDQELDINRLSDYDVDHIVPQSFLKDDSIDNKVLTRSDKARGKSDNVPSEEVVKKMKNYWRQLLNAKLITQRKFDNLTKAERGGLSELDKAGFIKRQLVETRQITKHVAQILDSRMNTKYDENDKLIREVKVITLKSKLVSDFRKDFQFYKVREINNYHHAHDAYLNAVVGTALIKKYPKLESEFVYGDYKVYDVRKMIAKSEQEIGKATAKYFFYSNIMNFFKTEITLANGEIRKRPLIETNGETGEIVWDKGRDFATVRKVLSMPQVNIVKKTEVQTGGFSKESILPKRNSDKLIARKKDWDPKKYGGFDSPTVAYSVLVVAKVEKGKSKKLKSVKELLGITIMERSSFEKNPIDFLEAKGYKEVKKDLIIKLPKYSLFELENGRKRMLASAGELQKGNELALPSKYVNFLYLASHYEKLKGSPEDNEQKQLFVEQHKHYLDEIIEQISEFSKRVILADANLDKVLSAYNKHRDKPIREQAENIIHLFTLTNLGAPAAFKYFDTTIDRKRYTSTKEVLDATLIHQSITGLYETRIDLSQLGGDGGEAAAKPAPGGTLNLEDEYRLYETSAEPEVSPGSTWLSDFPQAWAETGGMGLAVRQAPLIIPLKATSTPVSIKQYPMSQEAKLGIKPHIQRLLDQGILVPCQSPWNTPLLPVKKPGTNDYRPVQDLREVNKRVEDIHPTVPNPYNLLSGLPPSHRWYTVLDLKDAFFCLRLHPTSQPLFAFEWRDPGMGISGQLTWTRLPQGFKNSPTLFNEALHRDLADFRIQHPDLILLQYVDDILLAATSELDCQQGTRALLLTLGNLGYRASAKKAQLCQKQVKYLGYLLKEGQRWLTEARKETVMGQPTPKTPRQLREFLGKAGFCRLFIPGFAEMAAPLYPLTKPGTLFNWGPDQQKAYQEIKQALLTAPALGLPDLTKPFELFVDEKQGYAKGVLTQKLGPWRRPVAYLSKKLDPVAAGWPPCLRMVAAIAVLRKDAGKLTMGQPLVILAPHAVEALVKQPPDRWLSNARMTHYQAMLLDTDRVQFGPVVALNPATLLPLPEEGAPHDCLEILAETHGTRPDLTDQPIPDADHTWYTDGSSFLQEGQRKAGAAVTTETEVIWARALPAGTSAQRAELIALTQALKMAEGKRLNVYTDSRYAFATAHIHGEIYRRRGWLTSEGREIKNKSEILALLKALFLPKRLSIIHCLGHQKGDSAEARGNRLADQAAREAAIKTPPDTSTLLAGKRTADGSEFEKRTADGSEFESPKKKAKVE

SEQ ID NO: 6774 - protein, 2093 aa, synthetic construct
MPAAKRVKLDGGDKKYSIGLDIGTNSVGWAVITDEYKVPSKKFKVLGNTDRHSIKKNLIGALLFDSGETAEATRLKRTARRRYTRRKNRICYLQEIFSNEMAKVDDSFFHRLEESFLVEEDKKHERHPIFGNIVDEVAYHEKYPTIYHLRKKLVDSTDKADLRLIYLALAHMIKFRGHFLIEGDLNPDNSDVDKLFIQLVQTYNQLFEENPINASGVDAKAILSARLSKSRRLENLIAQLPGEKKNGLFGNLIALSLGLTPNFKSNFDLAEDAKLQLSKDTYDDDLDNLLAQIGDQYADLFLAAKNLSDAILLSDILRVNTEITKAPLSASMIKRYDEHHQDLTLLKALVRQQLPEKYKEIFFDQSKNGYAGYIDGGASQEEFYKFIKPILEKMDGTEELLVKLNREDLLRKQRTFDNGSIPHQIHLGELHAILRRQEDFYPFLKDNREKIEKILTFRIPYYVGPLARGNSRFAWMTRKSEETITPWNFEEVVDKGASAQSFIERMTNFDKNLPNEKVLPKHSLLYEYFTVYNELTKVKYVTEGMRKPAFLSGEQKKAIVDLLFKTNRKVTVKQLKEDYFKKIECFDSVEISGVEDRFNASLGTYHDLLKIIKDKDFLDNEENEDILEDIVLTLTLFEDREMIEERLKTYAHLFDDKVMKQLKRRRYTGWGRLSRKLINGIRDKQSGKTILDFLKSDGFANRNFMQLIHDDSLTFKEDIQKAQVSGQGDSLHEHIANLAGSPAIKKGILQTVKVVDELVKVMGRHKPENIVIEMARENQTTQKGQKNSRERMKRIEEGIKELGSQILKEHPVENTQLQNEKLYLYYLQNGRDMYVDQELDINRLSDYDVDHIVPQSFLKDDSIDNKVLTRSDKARGKSDNVPSEEVVKKMKNYWRQLLNAKLITQRKFDNLTKAERGGLSELDKAGFIKRQLVETRQITKHVAQILDSRMNTKYDENDKLIREVKVITLKSKLVSDFRKDFQFYKVREINNYHHAHDAYLNAVVGTALIKKYPKLESEFVYGDYKVYDVRKMIAKSEQEIGKATAKYFFYSNIMNFFKTEITLANGEIRKRPLIETNGETGEIVWDKGRDFATVRKVLSMPQVNIVKKTEVQTGGFSKESILPKRNSDKLIARKKDWDPKKYGGFDSPTVAYSVLVVAKVEKGKSKKLKSVKELLGITIMERSSFEKNPIDFLEAKGYKEVKKDLIIKLPKYSLFELENGRKRMLASAGELQKGNELALPSKYVNFLYLASHYEKLKGSPEDNEQKQLFVEQHKHYLDEIIEQISEFSKRVILADANLDKVLSAYNKHRDKPIREQAENIIHLFTLTNLGAPAAFKYFDTTIDRKRYTSTKEVLDATLIHQSITGLYETRIDLSQLGGDGGEAAAKPAPGGTLGIEDEYRLHETSTEPDVSLGSTWLSDFPQAWAETGGMGLAVRQAPLIIPLKATSTPVSIQQYPMSHEARLGIKPHIQRLLDQGILVPCQSPWNTPLLPVKKPGTNDYRPVQDLREVNKRVEDIHPTVPNPYNLLSGLPPSHQWYTVLDLKDAFFCLRLHPTSQPLFAFEWRDPGMGISGQLTWTRLPQGFKNSPTLFNEALHRDLADFRIQHPDLILLQYVDDILLAATSELDCQQGTRALLQTLGDLGYRASAKKAQICQKQVKYLGYLLREGQRWLTEARKETVMGQPVPKTPRQLREFLGTAGFCRLWIPGFAEMAAPLYPLTKPGTLFSWGPDQQKAYQEIKQALLTAPALGLPDLTKPFELFVDEKQGYAKGVLTQKLGPWRRPVAYLSKKLDPVAAGWPPCLRMVAAIAVLTKDAGKLTMGQPLVILAPHAVEALVKQPPDRWLSNARMTHYQAMLLDTDRVQFGPVVALNPATLLPLPEEGAPHDCLEILAETHGTRPDLTDQPIPDADHTWYTDGSSFLQEGQRKAGAAVTTETEVIWAGALPAGTSAQRAELIALTQALKMAEGKRLNVYTDSRYAFATAHIHGEIYRRRGWLTSEGREIKNKSEILALLKALFLPKRLSIIHCLGHQKGDSAEARGNRLADQAAREAAIKTPPDTSTLLAGKRTADGSEFEKRTADGSEFESPKKKAKVE

SEQ ID NO: 6775 - protein, 2093 aa, synthetic construct
MPAAKRVKLDGGDKKYSIGLDIGTNSVGWAVITDEYKVPSKKFKVLGNTDRHSIKKNLIGALLFDSGETAEATRLKRTARRRYTRRKNRICYLQEIFSNEMAKVDDSFFHRLEESFLVEEDKKHERHPIFGNIVDEVAYHEKYPTIYHLRKKLVDSTDKADLRLIYLALAHMIKFRGHFLIEGDLNPDNSDVDKLFIQLVQTYNQLFEENPINASGVDAKAILSARLSKSRRLENLIAQLPGEKKNGLFGNLIALSLGLTPNFKSNFDLAEDAKLQLSKDTYDDDLDNLLAQIGDQYADLFLAAKNLSDAILLSDILRVNTEITKAPLSASMIKRYDEHHQDLTLLKALVRQQLPEKYKEIFFDQSKNGYAGYIDGGASQEEFYKFIKPILEKMDGTEELLVKLNREDLLRKQRTFDNGSIPHQIHLGELHAILRRQEDFYPFLKDNREKIEKILTFRIPYYVGPLARGNSRFAWMTRKSEETITPWNFEEVVDKGASAQSFIERMTNFDKNLPNEKVLPKHSLLYEYFTVYNELTKVKYVTEGMRKPAFLSGEQKKAIVDLLFKTNRKVTVKQLKEDYFKKIECFDSVEISGVEDRFNASLGTYHDLLKIIKDKDFLDNEENEDILEDIVLTLTLFEDREMIEERLKTYAHLFDDKVMKQLKRRRYTGWGRLSRKLINGIRDKQSGKTILDFLKSDGFANRNFMQLIHDDSLTFKEDIQKAQVSGQGDSLHEHIANLAGSPAIKKGILQTVKVVDELVKVMGRHKPENIVIEMARENQTTQKGQKNSRERMKRIEEGIKELGSQILKEHPVENTQLQNEKLYLYYLQNGRDMYVDQELDINRLSDYDVDHIVPQSFLKDDSIDNKVLTRSDKARGKSDNVPSEEVVKKMKNYWRQLLNAKLITQRKFDNLTKAERGGLSELDKAGFIKRQLVETRQITKHVAQILDSRMNTKYDENDKLIREVKVITLKSKLVSDFRKDFQFYKVREINNYHHAHDAYLNAVVGTALIKKYPKLESEFVYGDYKVYDVRKMIAKSEQEIGKATAKYFFYSNIMNFFKTEITLANGEIRKRPLIETNGETGEIVWDKGRDFATVRKVLSMPQVNIVKKTEVQTGGFSKESILPKRNSDKLIARKKDWDPKKYGGFDSPTVAYSVLVVAKVEKGKSKKLKSVKELLGITIMERSSFEKNPIDFLEAKGYKEVKKDLIIKLPKYSLFELENGRKRMLASAGELQKGNELALPSKYVNFLYLASHYEKLKGSPEDNEQKQLFVEQHKHYLDEIIEQISEFSKRVILADANLDKVLSAYNKHRDKPIREQAENIIHLFTLTNLGAPAAFKYFDTTIDRKRYTSTKEVLDATLIHQSITGLYETRIDLSQLGGDGGEAAAKPAPGGTLNIEDEYRLHETSKEPDVSLGSTWLSDFPQAWAETGGMGLAVRQAPLIIPLKATSTPVSIKQYPMSQEARLGIKPHIQRLLDQGILVPCQSPWNTPLLPVKKPGTNDYRPVQDLREVNKRVEDIHPTVPNPYNLLSGLPPSHQWYTVLDLKDAFFCLRLHPTSQPLFAFEWRDPEMGISGQLTWTRLPQGFKNSPTLFNEALHRDLAGFRIQHPDLILLQYVDDLLLAATSELDCQQGTRALLQTLGDLGYRASAKKAQICQKQVKYLGYLLKEGQRWLTEARKETVMGQPIPKTPRQLREFLGTAGFCRLWIPGFAEMAAPLYPLTKPGTLFNWGPDQQKAFQEIKQALLTAPALGLPDLTKPFELFVDEKQGYAKGVLTQKLGPWRRPVAYLSKKLDPVAAGWPPCLRMVAAIAVLTKDAGKLTMGQPLVILAPHAVEALVKQPPDRWLSNARMTHYQALLLDTDRVQFGPVVALNPATLLPLPEEGLQHDCLDILAEAHGTRSDLMDQPLPDADHTWYTDGSSFLQEGQRKAGAAVTTETEVIWARALPAGTSAQRAELIALTQALKMAEGKKLNVYTDSRYAFATAHIHGEIYRRRGWLTSEGKEIKNKDEILALLKALFLPKRLSIIHCPGHQKGNSAEARGNRMADQAAREVATRETPETSTLLAGKRTADGSEFEKRTADGSEFESPKKKAKVE

SEQ ID NO: 6776 - protein, 2093 aa, synthetic construct
MPAAKRVKLDGGDKKYSIGLDIGTNSVGWAVITDEYKVPSKKFKVLGNTDRHSIKKNLIGALLFDSGETAEATRLKRTARRRYTRRKNRICYLQEIFSNEMAKVDDSFFHRLEESFLVEEDKKHERHPIFGNIVDEVAYHEKYPTIYHLRKKLVDSTDKADLRLIYLALAHMIKFRGHFLIEGDLNPDNSDVDKLFIQLVQTYNQLFEENPINASGVDAKAILSARLSKSRRLENLIAQLPGEKKNGLFGNLIALSLGLTPNFKSNFDLAEDAKLQLSKDTYDDDLDNLLAQIGDQYADLFLAAKNLSDAILLSDILRVNTEITKAPLSASMIKRYDEHHQDLTLLKALVRQQLPEKYKEIFFDQSKNGYAGYIDGGASQEEFYKFIKPILEKMDGTEELLVKLNREDLLRKQRTFDNGSIPHQIHLGELHAILRRQEDFYPFLKDNREKIEKILTFRIPYYVGPLARGNSRFAWMTRKSEETITPWNFEEVVDKGASAQSFIERMTNFDKNLPNEKVLPKHSLLYEYFTVYNELTKVKYVTEGMRKPAFLSGEQKKAIVDLLFKTNRKVTVKQLKEDYFKKIECFDSVEISGVEDRFNASLGTYHDLLKIIKDKDFLDNEENEDILEDIVLTLTLFEDREMIEERLKTYAHLFDDKVMKQLKRRRYTGWGRLSRKLINGIRDKQSGKTILDFLKSDGFANRNFMQLIHDDSLTFKEDIQKAQVSGQGDSLHEHIANLAGSPAIKKGILQTVKVVDELVKVMGRHKPENIVIEMARENQTTQKGQKNSRERMKRIEEGIKELGSQILKEHPVENTQLQNEKLYLYYLQNGRDMYVDQELDINRLSDYDVDHIVPQSFLKDDSIDNKVLTRSDKARGKSDNVPSEEVVKKMKNYWRQLLNAKLITQRKFDNLTKAERGGLSELDKAGFIKRQLVETRQITKHVAQILDSRMNTKYDENDKLIREVKVITLKSKLVSDFRKDFQFYKVREINNYHHAHDAYLNAVVGTALIKKYPKLESEFVYGDYKVYDVRKMIAKSEQEIGKATAKYFFYSNIMNFFKTEITLANGEIRKRPLIETNGETGEIVWDKGRDFATVRKVLSMPQVNIVKKTEVQTGGFSKESILPKRNSDKLIARKKDWDPKKYGGFDSPTVAYSVLVVAKVEKGKSKKLKSVKELLGITIMERSSFEKNPIDFLEAKGYKEVKKDLIIKLPKYSLFELENGRKRMLASAGELQKGNELALPSKYVNFLYLASHYEKLKGSPEDNEQKQLFVEQHKHYLDEIIEQISEFSKRVILADANLDKVLSAYNKHRDKPIREQAENIIHLFTLTNLGAPAAFKYFDTTIDRKRYTSTKEVLDATLIHQSITGLYETRIDLSQLGGDGGEAAAKPAPGGTLNIEDEYRLHETSKGPDVPLGSTWLSDFPQAWAETGGMGLAVRQAPLIIPLKATSTPVSIKQYPMSQEARLGIKPHIQRLLDQGILVPCQSPWNTPLLPVKKPGTNDYRPVQDLREVNKRVEDIHPTVPNPYNLLSGLPPSHQWYTVLDLKDAFFCLRLHPTSQSLFAFEWRDPEMGISGQLTWTRLPQGFKNSPTLFNEALHRDLADFRIQHPDLILLQYVDDLLLAATSELDCQQGTRALLQTLGDLGYRASAKKAQICQKQVKYLGYLLKEGQRWLTEARKETVMGQPTPKTPRQLREFLGTAGFCRLWIPGFAEMAAPLYPLTKPGTLFEWGPDQQKAYQEIKQALLTAPALGLPDLTKPFELFVDEKQGYAKGVLTQKLGPWRRPVAYLSKKLDPVAAGWPPCLRMVAAIAVLTKDAGKLTMGQPLVILAPHAVEALVKQPPDRWLSNARMTHYQALLLDTDRVQFGPIVALNPATLLPLPEEGLQHDCLDILAEAHGTRPDLTDQPLPDADHTWYTDGSSFLQEGQRKAGAAVTTETEVVWAKALPAGTSAQRAELIALTQALKMAEGKKLNVYTDSRYAFATAHIHGEIYRRRGWLTSEGKEIKNKDEILALLKALFLPKRLSIIHCPGHQKGNRAEARGNRMADQAAREVATRETPETSTLLAGKRTADGSEFEKRTADGSEFESPKKKAKVE

SEQ ID NO: 6777 - protein, 2113 aa, synthetic construct
MPAAKRVKLDGGDKKYSIGLDIGTNSVGWAVITDEYKVPSKKFKVLGNTDRHSIKKNLIGALLFDSGETAEATRLKRTARRRYTRRKNRICYLQEIFSNEMAKVDDSFFHRLEESFLVEEDKKHERHPIFGNIVDEVAYHEKYPTIYHLRKKLVDSTDKADLRLIYLALAHMIKFRGHFLIEGDLNPDNSDVDKLFIQLVQTYNQLFEENPINASGVDAKAILSARLSKSRRLENLIAQLPGEKKNGLFGNLIALSLGLTPNFKSNFDLAEDAKLQLSKDTYDDDLDNLLAQIGDQYADLFLAAKNLSDAILLSDILRVNTEITKAPLSASMIKRYDEHHQDLTLLKALVRQQLPEKYKEIFFDQSKNGYAGYIDGGASQEEFYKFIKPILEKMDGTEELLVKLNREDLLRKQRTFDNGSIPHQIHLGELHAILRRQEDFYPFLKDNREKIEKILTFRIPYYVGPLARGNSRFAWMTRKSEETITPWNFEEVVDKGASAQSFIERMTNFDKNLPNEKVLPKHSLLYEYFTVYNELTKVKYVTEGMRKPAFLSGEQKKAIVDLLFKTNRKVTVKQLKEDYFKKIECFDSVEISGVEDRFNASLGTYHDLLKIIKDKDFLDNEENEDILEDIVLTLTLFEDREMIEERLKTYAHLFDDKVMKQLKRRRYTGWGRLSRKLINGIRDKQSGKTILDFLKSDGFANRNFMQLIHDDSLTFKEDIQKAQVSGQGDSLHEHIANLAGSPAIKKGILQTVKVVDELVKVMGRHKPENIVIEMARENQTTQKGQKNSRERMKRIEEGIKELGSQILKEHPVENTQLQNEKLYLYYLQNGRDMYVDQELDINRLSDYDVDHIVPQSFLKDDSIDNKVLTRSDKARGKSDNVPSEEVVKKMKNYWRQLLNAKLITQRKFDNLTKAERGGLSELDKAGFIKRQLVETRQITKHVAQILDSRMNTKYDENDKLIREVKVITLKSKLVSDFRKDFQFYKVREINNYHHAHDAYLNAVVGTALIKKYPKLESEFVYGDYKVYDVRKMIAKSEQEIGKATAKYFFYSNIMNFFKTEITLANGEIRKRPLIETNGETGEIVWDKGRDFATVRKVLSMPQVNIVKKTEVQTGGFSKESILPKRNSDKLIARKKDWDPKKYGGFDSPTVAYSVLVVAKVEKGKSKKLKSVKELLGITIMERSSFEKNPIDFLEAKGYKEVKKDLIIKLPKYSLFELENGRKRMLASAGELQKGNELALPSKYVNFLYLASHYEKLKGSPEDNEQKQLFVEQHKHYLDEIIEQISEFSKRVILADANLDKVLSAYNKHRDKPIREQAENIIHLFTLTNLGAPAAFKYFDTTIDRKRYTSTKEVLDATLIHQSITGLYETRIDLSQLGGDGGEAAAKPAPGGTLNIEDEYRLHETSKEPDVSLGSTWLSDFPQAWAETGGMGLAVRQAPLIIPLKATSTPVSIKQYPMSQEARLGIKPHIQRLLDQGILVPCQSPWNTPLLPVKKPGTNDYRPVQDLREVNKRVEDIHPTVPNPYNLLSGLPPSHQWYTVLDLKDAFFCLRLHPTSQPLFAFEWRDPEMGISGQLTWTRLPQGFKNSPTLFNEALHRDLADFRIQHPDLILLQYVDDLLLAATSELDCQQGTRALLQTLGNLGYRASAKKAQICQKQVKYLGYLLKEGQRWLTEARKETVMGQPTPKTPRQLREFLGKAGFCRLFIPGFAEMAAPLYPLTKPGTLFNWGPDQQKAYQEIKQALLTAPALGLPDLTKPFELFVDEKQGYAKGVLTQKLGPWRRPVAYLSKKLDPVAAGWPPCLRMVAAIAVLTKDAGKLTMGQPLVILAPHAVEALVKQPPDRWLSNARMTHYQALLLDTDRVQFGPVVALNPATLLPLPEEGLQHNCLDILAEAHGTRPDLTDQPLPDADHTWYTDGSSLLQEGQRKAGAAVTTETEVIWAKALPAGTSAQRAELIALTQALKMAEGKKLNVYTDSRYAFATAHIHGEIYRRRGWLTSEGKEIKNKDEILALLKALFLPKRLSIIHCPGHQKGHSAEARGNRMADQAARKAAITETPDTSTLLIENSSPSGGSKRTADGSEFEAGKRTADGSEFEKRTADGSEFESPKKKAKVE

SEQ ID NO: 6778 - protein, 2113 aa, synthetic construct; identical to SEQ ID NO: 6777

SEQ ID NO: 6779 - protein, 2021 aa, synthetic construct
MPAAKRVKLDGGDKKYSIGLDIGTNSVGWAVITDEYKVPSKKFKVLGNTDRHSIKKNLIGALLFDSGETAEATRLKRTARRRYTRRKNRICYLQEIFSNEMAKVDDSFFHRLEESFLVEEDKKHERHPIFGNIVDEVAYHEKYPTIYHLRKKLVDSTDKADLRLIYLALAHMIKFRGHFLIEGDLNPDNSDVDKLFIQLVQTYNQLFEENPINASGVDAKAILSARLSKSRRLENLIAQLPGEKKNGLFGNLIALSLGLTPNFKSNFDLAEDAKLQLSKDTYDDDLDNLLAQIGDQYADLFLAAKNLSDAILLSDILRVNTEITKAPLSASMIKRYDEHHQDLTLLKALVRQQLPEKYKEIFFDQSKNGYAGYIDGGASQEEFYKFIKPILEKMDGTEELLVKLNREDLLRKQRTFDNGSIPHQIHLGELHAILRRQEDFYPFLKDNREKIEKILTFRIPYYVGPLARGNSRFAWMTRKSEETITPWNFEEVVDKGASAQSFIERMTNFDKNLPNEKVLPKHSLLYEYFTVYNELTKVKYVTEGMRKPAFLSGEQKKAIVDLLFKTNRKVTVKQLKEDYFKKIECFDSVEISGVEDRFNASLGTYHDLLKIIKDKDFLDNEENEDILEDIVLTLTLFEDREMIEERLKTYAHLFDDKVMKQLKRRRYTGWGRLSRKLINGIRDKQSGKTILDFLKSDGFANRNFMQLIHDDSLTFKEDIQKAQVSGQGDSLHEHIANLAGSPAIKKGILQTVKVVDELVKVMGRHKPENIVIEMARENQTTQKGQKNSRERMKRIEEGIKELGSQILKEHPVENTQLQNEKLYLYYLQNGRDMYVDQELDINRLSDYDVDHIVPQSFLKDDSIDNKVLTRSDKARGKSDNVPSEEVVKKMKNYWRQLLNAKLITQRKFDNLTKAERGGLSELDKAGFIKRQLVETRQITKHVAQILDSRMNTKYDENDKLIREVKVITLKSKLVSDFRKDFQFYKVREINNYHHAHDAYLNAVVGTALIKKYPKLESEFVYGDYKVYDVRKMIAKSEQEIGKATAKYFFYSNIMNFFKTEITLANGEIRKRPLIETNGETGEIVWDKGRDFATVRKVLSMPQVNIVKKTEVQTGGFSKESILPKRNSDKLIARKKDWDPKKYGGFDSPTVAYSVLVVAKVEKGKSKKLKSVKELLGITIMERSSFEKNPIDFLEAKGYKEVKKDLIIKLPKYSLFELENGRKRMLASAGELQKGNELALPSKYVNFLYLASHYEKLKGSPEDNEQKQLFVEQHKHYLDEIIEQISEFSKRVILADANLDKVLSAYNKHRDKPIREQAENIIHLFTLTNLGAPAAFKYFDTTIDRKRYTSTKEVLDATLIHQSITGLYETRIDLSQLGGDGGEAAAKPAPGGGRDIMKDIKVRLMTDSPDDSQDLMIGAIESNLFADQISWKSDQPVWLNQWPLKQEKLQALQQLVTEQLQLGHLEESNSPWNTPVFVIKKKSGKWRLLQDLRAVNATMHDMGALQPGLPSPVAVPKGWEIIIIDLQDCFFNIKLHPEDCKRFAFSVPSPNFKRPYQRFQWKVLPQGMKNSPTLCQKFVDKAILTVRDKYQDSYIVHYMDDILLAHPSRSIVDEILTSMIQALNKHGLVVSTEKIQKYDNLKYLGTHIQGDSVSYQKLQIRTDKLRTLNDFQKLLGNINWIRPFLKLTTGELKPLFEILNGDSNPISTRKLTPEACKALQLMNERLSTARVKRLDLSQPWSLCILKTEYTPTACLWQDGVVEWIHLPHISPKVITPYDIFCTQLIIKGRHRSKELFSKDPDYIVVPYTKVQFDLLLQEKEDWPISLLGFLGEVHFHLPKDPLLTFTLQTAIIFPHMTSTTPLEKGIVIFTDGSANGRSVTYIQGREPIIKENTQNTAQQAEIVAVITAFEEVSQPFNLYTDSKYVTGLFPEIETATLSPRTKIYTELKHLQRLIHKRQEKFYIGHIRGHTGLPGPLAQGNAYADSLTRILTAGKRTADGSEFEKRTADGSEFESPKKKAKVE

SEQ ID NO: 6780 - protein, 2084 aa, synthetic construct
MPAAKRVKLDGGDKKYSIGLDIGTNSVGWAVITDEYKVPSKKFKVLGNTDRHSIKKNLIGALLFDSGETAEATRLKRTARRRYTRRKNRICYLQEIFSNEMAKVDDSFFHRLEESFLVEEDKKHERHPIFGNIVDEVAYHEKYPTIYHLRKKLVDSTDKADLRLIYLALAHMIKFRGHFLIEGDLNPDNSDVDKLFIQLVQTYNQLFEENPINASGVDAKAILSARLSKSRRLENLIAQLPGEKKNGLFGNLIALSLGLTPNFKSNFDLAEDAKLQLSKDTYDDDLDNLLAQIGDQYADLFLAAKNLSDAILLSDILRVNTEITKAPLSASMIKRYDEHHQDLTLLKALVRQQLPEKYKEIFFDQSKNGYAGYIDGGASQEEFYKFIKPILEKMDGTEELLVKLNREDLLRKQRTFDNGSIPHQIHLGELHAILRRQEDFYPFLKDNREKIEKILTFRIPYYVGPLARGNSRFAWMTRKSEETITPWNFEEVVDKGASAQSFIERMTNFDKNLPNEKVLPKHSLLYEYFTVYNELTKVKYVTEGMRKPAFLSGEQKKAIVDLLFKTNRKVTVKQLKEDYFKKIECFDSVEISGVEDRFNASLGTYHDLLKIIKDKDFLDNEENEDILEDIVLTLTLFEDREMIEERLKTYAHLFDDKVMKQLKRRRYTGWGRLSRKLINGIRDKQSGKTILDFLKSDGFANRNFMQLIHDDSLTFKEDIQKAQVSGQGDSLHEHIANLAGSPAIKKGILQTVKVVDELVKVMGRHKPENIVIEMARENQTTQKGQKNSRERMKRIEEGIKELGSQILKEHPVENTQLQNEKLYLYYLQNGRDMYVDQELDINRLSDYDVDHIVPQSFLKDDSIDNKVLTRSDKARGKSDNVPSEEVVKKMKNYWRQLLNAKLITQRKFDNLTKAERGGLSELDKAGFIKRQLVETRQITKHVAQILDSRMNTKYDENDKLIREVKVITLKSKLVSDFRKDFQFYKVREINNYHHAHDAYLNAVVGTALIKKYPKLESEFVYGDYKVYDVRKMIAKSEQEIGKATAKYFFYSNIMNFFKTEITLANGEIRKRPLIETNGETGEIVWDKGRDFATVRKVLSMPQVNIVKKTEVQTGGFSKESILPKRNSDKLIARKKDWDPKKYGGFDSPTVAYSVLVVAKVEKGKSKKLKSVKELLGITIMERSSFEKNPIDFLEAKGYKEVKKDLIIKLPKYSLFELENGRKRMLASAGELQKGNELALPSKYVNFLYLASHYEKLKGSPEDNEQKQLFVEQHKHYLDEIIEQISEFSKRVILADANLDKVLSAYNKHRDKPIREQAENIIHLFTLTNLGAPAAFKYFDTTIDRKRYTSTKEVLDATLIHQSITGLYETRIDLSQLGGDGGEAAAKPAPGGIPWLMKKPLQLTTLVPLQEYEERLLKQTMLTGSYKEKLQSLFLKYDALWQHWENQVGHRRIKPHHIATGTVNPRPQKQYPINPKAKASIQTVINDLLKQGVLIQQNSIMNTPVYPVPKPDGKWRMVLDYREVNKTIPLIAAQNQHSAGILSSIFRGKYKTTLDLSNGFWAHSITPESYWLTAFTWLGQQYCWTRLPQGFLNSPALFNADVVDLLKEVPNVQVYVDDIYISHDDPREHLEQLEKVFSLLLNAGYVVSLKKSEIAQHEVEFLGFNITKEGRGLTETFKQKLLNITPPRDLKQLQSILGKLNFARNFIPNFSELVKPLYNIIATAPGKYITWTTDNSQQLQNIISMLNSAENLEERNPEVRLIMKVNTSPSAGYIRFYNEFAKRPIMYLNYVYTKAEVKFTNTEKLLTTIHKGLIKALDLGMGQEILVYSPIVSMTKIQKTPLPERKALPIRWITWMSYLEDPRIQFHYDKTLPELQQVPTVTDDIIAKIKHPSEFSMVFYTDGSAIKHPNVNKSHNAGMGIAQVQFKPEFTVINTWSIPLGDHTAQLAEVAAVEFACKKALKIDGPVLIVTDSFYVAESVNKELPYWQSNGFFNNKKKPLKHVSKWKSIADCIQLKPDIIIIHEKGHQPTASTFHTEGNNLADKLATQGSYVVNAGKRTADGSEFEKRTADGSEFESPKKKAKVE

SEQ ID NO: 6781 - protein, 2173 aa, synthetic construct
MPAAKRVKLDGGDKKYSIGLDIGTNSVGWAVITDEYKVPSKKFKVLGNTDRHSIKKNLIGALLFDSGETAEATRLKRTARRRYTRRKNRICYLQEIFSNEMAKVDDSFFHRLEESFLVEEDKKHERHPIFGNIVDEVAYHEKYPTIYHLRKKLVDSTDKADLRLIYLALAHMIKFRGHFLIEGDLNPDNSDVDKLFIQLVQTYNQLFEENPINASGVDAKAILSARLSKSRRLENLIAQLPGEKKNGLFGNLIALSLGLTPNFKSNFDLAEDAKLQLSKDTYDDDLDNLLAQIGDQYADLFLAAKNLSDAILLSDILRVNTEITKAPLSASMIKRYDEHHQDLTLLKALVRQQLPEKYKEIFFDQSKNGYAGYIDGGASQEEFYKFIKPILEKMDGTEELLVKLNREDLLRKQRTFDNGSIPHQIHLGELHAILRRQEDFYPFLKDNREKIEKILTFRIPYYVGPLARGNSRFAWMTRKSEETITPWNFEEVVDKGASAQSFIERMTNFDKNLPNEKVLPKHSLLYEYFTVYNELTKVKYVTEGMRKPAFLSGEQKKAIVDLLFKTNRKVTVKQLKEDYFKKIECFDSVEISGVEDRFNASLGTYHDLLKIIKDKDFLDNEENEDILEDIVLTLTLFEDREMIEERLKTYAHLFDDKVMKQLKRRRYTGWGRLSRKLINGIRDKQSGKTILDFLKSDGFANRNFMQLIHDDSLTFKEDIQKAQVSGQGDSLHEHIANLAGSPAIKKGILQTVKVVDELVKVMGRHKPENIVIEMARENQTTQKGQKNSRERMKRIEEGIKELGSQILKEHPVENTQLQNEKLYLYYLQNGRDMYVDQELDINRLSDYDVDHIVPQSFLKDDSIDNKVLTRSDKARGKSDNVPSEEVVKKMKNYWRQLLNAKLITQRKFDNLTKAERGGLSELDKAGFIKRQLVETRQITKHVAQILDSRMNTKYDENDKLIREVKVITLKSKLVSDFRKDFQFYKVREINNYHHAHDAYLNAVVGTALIKKYPKLESEFVYGDYKVYDVRKMIAKSEQEIGKATAKYFFYSNIMNFFKTEITLANGEIRKRPLIETNGETGEIVWDKGRDFATVRKVLSMPQVNIVKKTEVQTGGFSKESILPKRNSDKLIARKKDWDPKKYGGFDSPTVAYSVLVVAKVEKGKSKKLKSVKELLGITIMERSSFEKNPIDFLEAKGYKEVKKDLIIKLPKYSLFELENGRKRMLASAGELQKGNELALPSKYVNFLYLASHYEKLKGSPEDNEQKQLFVEQHKHYLDEIIEQISEFSKRVILADANLDKVLSAYNKHRDKPIREQAENIIHLFTLTNLGAPAAFKYFDTTIDRKRYTSTKEVLDATLIHQSITGLYETRIDLSQLGGDGGEAAAKPAPGGMDPLQLLQPLEAEIKGTKLKAHWNSGATITCVPQAFLEEEVPIKNIWIKTIHGEKEQPVYYLTFKIQGRKVEAEVISSPYDYILVSPSDIPWLMKKPLQLTTLVPLQEYEERLLKQTMLTGSYKEKLQSLFLKYDALWQHWENQVGHRRIKPHHIATGTVNPRPQKQYPINPKAKASIQTVINDLLKQGVLIQQNSIMNTPVYPVPKPDGKWRMVLDYREVNKTIPLIAAQNQHSAGILSSIFRGKYKTTLDLSNGFWAHSITPESYWLTAFTWLGQQYCWTRLPQGFLNSPALFNADVVDLLKEVPNVQVYVDDIYISHDDPREHLEQLEKVFSLLLNAGYVVSLKKSEIAQHEVEFLGFNITKEGRGLTETFKQKLLNITPPRDLKQLQSILGKLNFARNFIPNFSELVKPLYNIIATAPGKYITWTTDNSQQLQNIISMLNSAENLEERNPEVRLIMKVNTSPSAGYIRFYNEFAKRPIMYLNYVYTKAEVKFTNTEKLLTTIHKGLIKALDLGMGQEILVYSPIVSMTKIQKTPLPERKALPIRWITWMSYLEDPRIQFHYDKTLPELQQVPTVTDDIIAKIKHPSEFSMVFYTDGSAIKHPNVNKSHNAGMGIAQVQFKPEFTVINTWSIPLGDHTAQLAEVAAVEFACKKALKIDGPVLIVTDSFYVAESVNKELPYWQSNGFFNNKKKPLKHVSKWKSIADCIQLKPDIIIIHEKGHQPTASTFHTEGNNLADKLATQGSYVVNAGKRTADGSEFEKRTADGSEFESPKKKAKVE

SEQ ID NO: 6782 - protein, 2091 aa, synthetic construct
MPAAKRVKLDGGDKKYSIGLDIGTNSVGWAVITDEYKVPSKKFKVLGNTDRHSIKKNLIGALLFDSGETAEATRLKRTARRRYTRRKNRICYLQEIFSNEMAKVDDSFFHRLEESFLVEEDKKHERHPIFGNIVDEVAYHEKYPTIYHLRKKLVDSTDKADLRLIYLALAHMIKFRGHFLIEGDLNPDNSDVDKLFIQLVQTYNQLFEENPINASGVDAKAILSARLSKSRRLENLIAQLPGEKKNGLFGNLIALSLGLTPNFKSNFDLAEDAKLQLSKDTYDDDLDNLLAQIGDQYADLFLAAKNLSDAILLSDILRVNTEITKAPLSASMIKRYDEHHQDLTLLKALVRQQLPEKYKEIFFDQSKNGYAGYIDGGASQEEFYKFIKPILEKMDGTEELLVKLNREDLLRKQRTFDNGSIPHQIHLGELHAILRRQEDFYPFLKDNREKIEKILTFRIPYYVGPLARGNSRFAWMTRKSEETITPWNFEEVVDKGASAQSFIERMTNFDKNLPNEKVLPKHSLLYEYFTVYNELTKVKYVTEGMRKPAFLSGEQKKAIVDLLFKTNRKVTVKQLKEDYFKKIECFDSVEISGVEDRFNASLGTYHDLLKIIKDKDFLDNEENEDILEDIVLTLTLFEDREMIEERLKTYAHLFDDKVMKQLKRRRYTGWGRLSRKLINGIRDKQSGKTILDFLKSDGFANRNFMQLIHDDSLTFKEDIQKAQVSGQGDSLHEHIANLAGSPAIKKGILQTVKVVDELVKVMGRHKPENIVIEMARENQTTQKGQKNSRERMKRIEEGIKELGSQILKEHPVENTQLQNEKLYLYYLQNGRDMYVDQELDINRLSDYDVDHIVPQSFLKDDSIDNKVLTRSDKARGKSDNVPSEEVVKKMKNYWRQLLNAKLITQRKFDNLTKAERGGLSELDKAGFIKRQLVETRQITKHVAQILDSRMNTKYDENDKLIREVKVITLKSKLVSDFRKDFQFYKVREINNYHHAHDAYLNAVVGTALIKKYPKLESEFVYGDYKVYDVRKMIAKSEQEIGKATAKYFFYSNIMNFFKTEITLANGEIRKRPLIETNGETGEIVWDKGRDFATVRKVLSMPQVNIVKKTEVQTGGFSKESILPKRNSDKLIARKKDWDPKKYGGFDSPTVAYSVLVVAKVEKGKSKKLKSVKELLGITIMERSSFEKNPIDFLEAKGYKEVKKDLIIKLPKYSLFELENGRKRMLASAGELQKGNELALPSKYVNFLYLASHYEKLKGSPEDNEQKQLFVEQHKHYLDEIIEQISEFSKRVILADANLDKVLSAYNKHRDKPIREQAENIIHLFTLTNLGAPAAFKYFDTTIDRKRYTSTKEVLDATLIHQSITGLYETRIDLSQLGGDGGEAAAKPAPGGVLNLEEEYRLHEKPVPSSIDPSWLQLFPTVWAERAGMGLANQVPPVVVELRSGASPVAVRQYPMSKEAREGIRPHIQRFLDLGVLVPCQSPWNTPLLPVKKPGTNDYRPVQDLREINKRVQDIHPTVPNPYNLLSSLPPSHTWYSVLDLKDAFFCLKLHPNSQPLFAFEWRDPEKGNTGQLTWTRLPQGFKNSPTLFNEALHRDLAPFRALNPQVVLLQYVDDLLVAAPTYRDCKEGTQKLLQELSKLGYRVSAKKAQLCQKEVTYLGYLLKEGKRWLTPARKATVMKIPPPTTPRQVREFLGTAGFCRLWIPGFASLAAPLYPLTKPSIPFIWTEEHQKAFDRIKEALLSAPALALPDLTKPFTLYVDERAGVARGVLTQTLGPWRRPVAYLSKKLDPVASGWPTCLKAVAAVALLLKDADKLTLGQNVTVIASHSLESIVRQPPDRWMTNARMTHYQSLLLNERVSFAPPAVLNPATLLPVESEATPVHRCSEILAEETGTRRDLKDQPLPGVPAWYTDGSSFIAEGKRRAGAAIVDGKRTVWASSLPEGTSAQKAELVALTQALRLAEGKDINIYTDSRYAFATAHIHGAIYKQRGWLTSAGKDIKNKEEILALLEAIHLPKRVAIIHCPGHQKGNDPVATGNRRADEAAKQAALSTRVLAETTKPAGKRTADGSEFEKRTADGSEFESPKKKAKVE

SEQ ID NO: 6783 - protein, 2091 aa, synthetic construct; identical to SEQ ID NO: 4515

SEQ ID NO: 6784 - protein, 2095 aa, synthetic construct
MPAAKRVKLDGGDKKYSIGLDIGTNSVGWAVITDEYKVPSKKFKVLGNTDRHSIKKNLIGALLFDSGETAEATRLKRTARRRYTRRKNRICYLQEIFSNEMAKVDDSFFHRLEESFLVEEDKKHERHPIFGNIVDEVAYHEKYPTIYHLRKKLVDSTDKADLRLIYLALAHMIKFRGHFLIEGDLNPDNSDVDKLFIQLVQTYNQLFEENPINASGVDAKAILSARLSKSRRLENLIAQLPGEKKNGLFGNLIALSLGLTPNFKSNFDLAEDAKLQLSKDTYDDDLDNLLAQIGDQYADLFLAAKNLSDAILLSDILRVNTEITKAPLSASMIKRYDEHHQDLTLLKALVRQQLPEKYKEIFFDQSKNGYAGYIDGGASQEEFYKFIKPILEKMDGTEELLVKLNREDLLRKQRTFDNGSIPHQIHLGELHAILRRQEDFYPFLKDNREKIEKILTFRIPYYVGPLARGNSRFAWMTRKSEETITPWNFEEVVDKGASAQSFIERMTNFDKNLPNEKVLPKHSLLYEYFTVYNELTKVKYVTEGMRKPAFLSGEQKKAIVDLLFKTNRKVTVKQLKEDYFKKIECFDSVEISGVEDRFNASLGTYHDLLKIIKDKDFLDNEENEDILEDIVLTLTLFEDREMIEERLKTYAHLFDDKVMKQLKRRRYTGWGRLSRKLINGIRDKQSGKTILDFLKSDGFANRNFMQLIHDDSLTFKEDIQKAQVSGQGDSLHEHIANLAGSPAIKKGILQTVKVVDELVKVMGRHKPENIVIEMARENQTTQKGQKNSRERMKRIEEGIKELGSQILKEHPVENTQLQNEKLYLYYLQNGRDMYVDQELDINRLSDYDVDHIVPQSFLKDDSIDNKVLTRSDKARGKSDNVPSEEVVKKMKNYWRQLLNAKLITQRKFDNLTKAERGGLSELDKAGFIKRQLVETRQITKHVAQILDSRMNTKYDENDKLIREVKVITLKSKLVSDFRKDFQFYKVREINNYHHAHDAYLNAVVGTALIKKYPKLESEFVYGDYKVYDVRKMIAKSEQEIGKATAKYFFYSNIMNFFKTEITLANGEIRKRPLIETNGETGEIVWDKGRDFATVRKVLSMPQVNIVKKTEVQTGGFSKESILPKRNSDKLIARKKDWDPKKYGGFDSPTVAYSVLVVAKVEKGKSKKLKSVKELLGITIMERSSFEKNPIDFLEAKGYKEVKKDLIIKLPKYSLFELENGRKRMLASAGELQKGNELALPSKYVNFLYLASHYEKLKGSPEDNEQKQLFVEQHKHYLDEIIEQISEFSKRVILADANLDKVLSAYNKHRDKPIREQAENIIHLFTLTNLGAPAAFKYFDTTIDRKRYTSTKEVLDATLIHQSITGLYETRIDLSQLGGDGGPAPEAAAKGGTAPLEEEYRLFLEAPIQNVTLLEQWKREIPKVWAEINPPGLASTQAPIHVQLLSTALPVRVRQYPITLEAKRSLRETIRKFRAAGILRPVHSPWNTPLLPVRKSGTSEYRMVQDLREVNKRVETIHPTVPNPYTLLSLLPPDRIWYSVLDLKDAFFCIPLAPESQLIFAFEWADAEEGESGQLTWTRLPQGFKNSPTLFNEALNRDLQGFRLDHPSVSLLQYVDDLLIAADTQAACLSATRDLLMTLAELGYRVSGKKAQLCQEEVTYLGFKIHKGSRSLSNSRTQAILQIPVPKTKRQVREFLGTIGYCRLWIPGFAELAQPLYAATRPGNDPLVWGEKEEEAFQSLKLALTQPPALALPSLDKPFQLFVEETSGAAKGVLTQALGPWKRPVAYLSKRLDPVAAGWPRCLRAIAAAALLTREASKLTFGQDIEITSSHNLESLLRSPPDKWLTNARITQYQVLLLDPPRVRFKQTAALNPATLLPETDDTLPIHHCLDTLDSLTSTRPDLTDQPLAQAEATLFTDGSSYIRDGKRYAGAAVVTLDSVIWAEPLPIGTSAQKAELIALTKALEWSKDKSVNIYTDSRYAFATLHVHGMIYRERGWLTAGGKAIKNAPEILALLTAVWLPKRVAVMHCKGHQKDDAPTSTGNRRADEVAREVAIRPLSTQATISAGKRTADGSEFEKRTADGSEFESPKKKAKVE

SEQ ID NO: 6785 - protein, 2092 aa, synthetic construct
MPAAKRVKLDGGDKKYSIGLDIGTNSVGWAVITDEYKVPSKKFKVLGNTDRHSIKKNLIGALLFDSGETAEATRLKRTARRRYTRRKNRICYLQEIFSNEMAKVDDSFFHRLEESFLVEEDKKHERHPIFGNIVDEVAYHEKYPTIYHLRKKLVDSTDKADLRLIYLALAHMIKFRGHFLIEGDLNPDNSDVDKLFIQLVQTYNQLFEENPINASGVDAKAILSARLSKSRRLENLIAQLPGEKKNGLFGNLIALSLGLTPNFKSNFDLAEDAKLQLSKDTYDDDLDNLLAQIGDQYADLFLAAKNLSDAILLSDILRVNTEITKAPLSASMIKRYDEHHQDLTLLKALVRQQLPEKYKEIFFDQSKNGYAGYIDGGASQEEFYKFIKPILEKMDGTEELLVKLNREDLLRKQRTFDNGSIPHQIHLGELHAILRRQEDFYPFLKDNREKIEKILTFRIPYYVGPLARGNSRFAWMTRKSEETITPWNFEEVVDKGASAQSFIERMTNFDKNLPNEKVLPKHSLLYEYFTVYNELTKVKYVTEGMRKPAFLSGEQKKAIVDLLFKTNRKVTVKQLKEDYFKKIECFDSVEISGVEDRFNASLGTYHDLLKIIKDKDFLDNEENEDILEDIVLTLTLFEDREMIEERLKTYAHLFDDKVMKQLKRRRYTGWGRLSRKLINGIRDKQSGKTILDFLKSDGFANRNFMQLIHDDSLTFKEDIQKAQVSGQGDSLHEHIANLAGSPAIKKGILQTVKVVDELVKVMGRHKPENIVIEMARENQTTQKGQKNSRERMKRIEEGIKELGSQILKEHPVENTQLQNEKLYLYYLQNGRDMYVDQELDINRLSDYDVDHIVPQSFLKDDSIDNKVLTRSDKARGKSDNVPSEEVVKKMKNYWRQLLNAKLITQRKFDNLTKAERGGLSELDKAGFIKRQLVETRQITKHVAQILDSRMNTKYDENDKLIREVKVITLKSKLVSDFRKDFQFYKVREINNYHHAHDAYLNAVVGTALIKKYPKLESEFVYGDYKVYDVRKMIAKSEQEIGKATAKYFFYSNIMNFFKTEITLANGEIRKRPLIETNGETGEIVWDKGRDFATVRKVLSMPQVNIVKKTEVQTGGFSKESILPKRNSDKLIARKKDWDPKKYGGFDSPTVAYSVLVVAKVEKGKSKKLKSVKELLGITIMERSSFEKNPIDFLEAKGYKEVKKDLIIKLPKYSLFELENGRKRMLASAGELQKGNELALPSKYVNFLYLASHYEKLKGSPEDNEQKQLFVEQHKHYLDEIIEQISEFSKRVILADANLDKVLSAYNKHRDKPIREQAENIIHLFTLTNLGAPAAFKYFDTTIDRKRYTSTKEVLDATLIHQSITGLYETRIDLSQLGGDGGPAPEAAAKGGTLQLEEEYRLFEPESTQKQEMDIWLKNFPQAWAETGGMGTAHCQAPVLIQLKATATPISIRQYPMPHEAYQGIKPHIRRMLDQGILKPCQSPWNTPLLPVKKPGTEDYRPVQDLREVNKRVEDIHPTVPNPYNLLSTLPPSHPWYTVLDLKDAFFCLRLHSESQLLFAFEWRDPEIGLSGQLTWTRLPQGFKNSPTLFNEALHSDLADFRVRYPALVLLQYVDDLLLAAATRTECLEGTKALLETLGNKGYRASAKKAQICLQEVTYLGYSLKDGQRWLTKARKEAILSIPVPKNSRQVREFLGTAGYCRLWIPGFAELAAPLYPLTRPGTLFQWGTEQQLAFEDIKKALLSSPALGLPDITKPFELFIDENSGFAKGVLVQKLGPWKRPVAYLSKKLDTVASGWPPCLRMVAAIAILVKDAGKLTLGQPLTILTSHPVEALVRQPPNKWLSNARMTHYQAMLLDAERVHFGPTVSLNPATLLPLPSGGNHHDCLQILAETHGTRPDLTDQPLPDADLTWYTDGSSFIRNGEREAGAAVTTESEVIWAAPLPPGTSAQRAELIALTQALKMAEGKKLTVYTDSRYAFATTHVHGEIYRRRGWLTSEGKEIKNKNEILALLEALFLPKRLSIIHCPGHQKGDSPQAKGNRLADDTAKKAATETHSSLTVLPAGKRTADGSEFEKRTADGSEFESPKKKAKVE

SEQ ID NO: 6786 - protein, 2124 aa, synthetic construct
MPAAKRVKLDGGDKKYSIGLDIGTNSVGWAVITDEYKVPSKKFKVLGNTDRHSIKKNLIGALLFDSGETAEATRLKRTARRRYTRRKNRICYLQEIFSNEMAKVDDSFFHRLEESFLVEEDKKHERHPIFGNIVDEVAYHEKYPTIYHLRKKLVDSTDKADLRLIYLALAHMIKFRGHFLIEGDLNPDNSDVDKLFIQLVQTYNQLFEENPINASGVDAKAILSARLSKSRRLENLIAQLPGEKKNGLFGNLIALSLGLTPNFKSNFDLAEDAKLQLSKDTYDDDLDNLLAQIGDQYADLFLAAKNLSDAILLSDILRVNTEITKAPLSASMIKRYDEHHQDLTLLKALVRQQLPEKYKEIFFDQSKNGYAGYIDGGASQEEFYKFIKPILEKMDGTEELLVKLNREDLLRKQRTFDNGSIPHQIHLGELHAILRRQEDFYPFLKDNREKIEKILTFRIPYYVGPLARGNSRFAWMTRKSEETITPWNFEEVVDKGASAQSFIERMTNFDKNLPNEKVLPKHSLLYEYFTVYNELTKVKYVTEGMRKPAFLSGEQKKAIVDLLFKTNRKVTVKQLKEDYFKKIECFDSVEISGVEDRFNASLGTYHDLLKIIKDKDFLDNEENEDILEDIVLTLTLFEDREMIEERLKTYAHLFDDKVMKQLKRRRYTGWGRLSRKLINGIRDKQSGKTILDFLKSDGFANRNFMQLIHDDSLTFKEDIQKAQVSGQGDSLHEHIANLAGSPAIKKGILQTVKVVDELVKVMGRHKPENIVIEMARENQTTQKGQKNSRERMKRIEEGIKELGSQILKEHPVENTQLQNEKLYLYYLQNGRDMYVDQELDINRLSDYDVDHIVPQSFLKDDSIDNKVLTRSDKARGKSDNVPSEEVVKKMKNYWRQLLNAKLITQRKFDNLTKAERGGLSELDKAGFIKRQLVETRQITKHVAQILDSRMNTKYDENDKLIREVKVITLKSKLVSDFRKDFQFYKVREINNYHHAHDAYLNAVVGTALIKKYPKLESEFVYGDYKVYDVRKMIAKSEQEIGKATAKYFFYSNIMNFFKTEITLANGEIRKRPLIETNGETGEIVWDKGRDFATVRKVLSMPQVNIVKKTEVQTGGFSKESILPKRNSDKLIARKKDWDPKKYGGFDSPTVAYSVLVVAKVEKGKSKKLKSVKELLGITIMERSSFEKNPIDFLEAKGYKEVKKDLIIKLPKYSLFELENGRKRMLASAGELQKGNELALPSKYVNFLYLASHYEKLKGSPEDNEQKQLFVEQHKHYLDEIIEQISEFSKRVILADANLDKVLSAYNKHRDKPIREQAENIIHLFTLTNLGAPAAFKYFDTTIDRKRYTSTKEVLDATLIHQSITGLYETRIDLSQLGGDGGPAPEAAAKGGLLGRDLLTKLKAQIQFSTEGPQVTWEDRPAMCLVLNLEEEYRLHEKPVPPSIDPSWLQLFPMVWAEKAGMGLANQVPPVVVELKSDASPVAVRQYPMSKEAREGIRPHIQRFLDLGILVPCQSPWNTPLLPVKKPGTNDYRPVQDLREVNKRVQDIHPTVPNPYNLLSSLPPSHTWYSVLDLKDAFFCLKLHPNSQPLFAFEWRDPEKGNTGQLTWTRLPQGFKNSPTLFNEALHRDLASFRALNPQVVMLQYVDDLLVAAPTYRDCKEGTRRLLQELSKLGYRVSAKKAQLCREEVTYLGYLLKGGKRWLTPARKATVMKIPTPTTPRQVREFLGTAGFCRLWIPGFASLAAPLYPLTRPKVPFTWTEAHQEAFGRIKEALLSAPALALPDLTKPFALYVDEKEGVARGVLTQTLGPWRRPVAYLSKKLDPVASGWPTCLKAIAAVALLLKDADKLTLGQNVLVIAPHNLESIVRQPPDRWMTNARMTHYQSLLLNERVSFAPPAILNPATLLPVESDDTPIHICSEILAEETGTRPDLRDQPLPGVPAWYTDGSSFIMDGRRQAGAAIVDNKRTVWASNLPEGTSAQKAELIALTQALRLAEGKSINIYTDSRYAFATAHVHGAIYKQRGWLTSAGKDIKNKEEILALLEAIHLPKRVAIIHCPGHQRGTDPVATGNRKADEAAKQAAQSTRILTETTKNAGKRTADGSEFEKRTADGSEFESPKKKAKVE

SEQ ID NO: 6787 - protein, 2215 aa, synthetic construct
MPAAKRVKLDGGDKKYSIGLDIGTNSVGWAVITDEYKVPSKKFKVLGNTDRHSIKKNLIGALLFDSGETAEATRLKRTARRRYTRRKNRICYLQEIFSNEMAKVDDSFFHRLEESFLVEEDKKHERHPIFGNIVDEVAYHEKYPTIYHLRKKLVDSTDKADLRLIYLALAHMIKFRGHFLIEGDLNPDNSDVDKLFIQLVQTYNQLFEENPINASGVDAKAILSARLSKSRRLENLIAQLPGEKKNGLFGNLIALSLGLTPNFKSNFDLAEDAKLQLSKDTYDDDLDNLLAQIGDQYADLFLAAKNLSDAILLSDILRVNTEITKAPLSASMIKRYDEHHQDLTLLKALVRQQLPEKYKEIFFDQSKNGYAGYIDGGASQEEFYKFIKPILEKMDGTEELLVKLNREDLLRKQRTFDNGSIPHQIHLGELHAILRRQEDFYPFLKDNREKIEKILTFRIPYYVGPLARGNSRFAWMTRKSEETITPWNFEEVVDKGASAQSFIERMTNFDKNLPNEKVLPKHSLLYEYFTVYNELTKVKYVTEGMRKPAFLSGEQKKAIVDLLFKTNRKVTVKQLKEDYFKKIECFDSVEISGVEDRFNASLGTYHDLLKIIKDKDFLDNEENEDILEDIVLTLTLFEDREMIEERLKTYAHLFDDKVMKQLKRRRYTGWGRLSRKLINGIRDKQSGKTILDFLKSDGFANRNFMQLIHDDSLTFKEDIQKAQVSGQGDSLHEHIANLAGSPAIKKGILQTVKVVDELVKVMGRHKPENIVIEMARENQTTQKGQKNSRERMKRIEEGIKELGSQILKEHPVENTQLQNEKLYLYYLQNGRDMYVDQELDINRLSDYDVDHIVPQSFLKDDSIDNKVLTRSDKARGKSDNVPSEEVVKKMKNYWRQLLNAKLITQRKFDNLTKAERGGLSELDKAGFIKRQLVETRQITKHVAQILDSRMNTKYDENDKLIREVKVITLKSKLVSDFRKDFQFYKVREINNYHHAHDAYLNAVVGTALIKKYPKLESEFVYGDYKVYDVRKMIAKSEQEIGKATAKYFFYSNIMNFFKTEITLANGEIRKRPLIETNGETGEIVWDKGRDFATVRKVLSMPQVNIVKKTEVQTGGFSKESILPKRNSDKLIARKKDWDPKKYGGFDSPTVAYSVLVVAKVEKGKSKKLKSVKELLGITIMERSSFEKNPIDFLEAKGYKEVKKDLIIKLPKYSLFELENGRKRMLASAGELQKGNELALPSKYVNFLYLASHYEKLKGSPEDNEQKQLFVEQHKHYLDEIIEQISEFSKRVILADANLDKVLSAYNKHRDKPIREQAENIIHLFTLTNLGAPAAFKYFDTTIDRKRYTSTKEVLDATLIHQSITGLYETRIDLSQLGGDGGPAPEAAAKGGTLGDQGSRGSDPLPEPRVTLTVEGIPTEFLVNTGAEHSVLTKPMGKMGSKRTVVAGATGSKVYPWTTKRLLKIGQKQVTHSFLVIPECPAPLLGRDLLTKLKAQIQFSTEGPQVTWEDRPAMCLVLNLEEEYRLHEKPVPPSIDPSWLQLFPMVWAEKAGMGLANQVPPVVVELKSDASPVAVRQYPMSKEAREGIRPHIQRFLDLGILVPCQSPWNTPLLPVKKPGTNDYRPVQDLREVNKRVQDIHPTVPNPYNLLSSLPPSHTWYSVLDLKDAFFCLKLHPNSQPLFAFEWRDPEKGNTGQLTWTRLPQGFKNSPTLFNEALHRDLASFRALNPQVVMLQYVDDLLVAAPTYRDCKEGTRRLLQELSKLGYRVSAKKAQLCREEVTYLGYLLKGGKRWLTPARKATVMKIPTPTTPRQVREFLGKAGFCRLFIPGFASLAAPLYPLTRPKVPFTWTEAHQEAFGRIKEALLSAPALALPDLTKPFALYVDEKEGVARGVLTQTLGPWRRPVAYLSKKLDPVASGWPTCLKAIAAVALLLKDADKLTLGQNVLVIAPHNLESIVRQPPDRWMTNARMTHYQSLLLNERVSFAPPAILNPATLLPVESDDTPIHICSEILAEETGTRPDLRDQPLPGVPAWYTDGSSFIMDGRRQAGAAIVDNKRTVWASNLPEGTSAQKAELIALTQALRLAEGKSINIYTDSRYAFATAHVHGAIYKQRGWLTSAGKDIKNKEEILALLEAIHLPKRVAIIHCPGHQRGTDPVATGNRKADEAAKQAAQSTRILTETTKNAGKRTADGSEFEKRTADGSEFESPKKKAKVE

SEQ ID NO: 6788 - protein, 2093 aa, synthetic construct; identical to SEQ ID NO: 4516

SEQ ID NO: 6789 - protein, 2093 aa, synthetic construct
MPAAKRVKLDGGDKKYSIGLDIGTNSVGWAVITDEYKVPSKKFKVLGNTDRHSIKKNLIGALLFDSGETAEATRLKRTARRRYTRRKNRICYLQEIFSNEMAKVDDSFFHRLEESFLVEEDKKHERHPIFGNIVDEVAYHEKYPTIYHLRKKLVDSTDKADLRLIYLALAHMIKFRGHFLIEGDLNPDNSDVDKLFIQLVQTYNQLFEENPINASGVDAKAILSARLSKSRRLENLIAQLPGEKKNGLFGNLIALSLGLTPNFKSNFDLAEDAKLQLSKDTYDDDLDNLLAQIGDQYADLFLAAKNLSDAILLSDILRVNTEITKAPLSASMIKRYDEHHQDLTLLKALVRQQLPEKYKEIFFDQSKNGYAGYIDGGASQEEFYKFIKPILEKMDGTEELLVKLNREDLLRKQRTFDNGSIPHQIHLGELHAILRRQEDFYPFLKDNREKIEKILTFRIPYYVGPLARGNSRFAWMTRKSEETITPWNFEEVVDKGASAQSFIERMTNFDKNLPNEKVLPKHSLLYEYFTVYNELTKVKYVTEGMRKPAFLSGEQKKAIVDLLFKTNRKVTVKQLKEDYFKKIECFDSVEISGVEDRFNASLGTYHDLLKIIKDKDFLDNEENEDILEDIVLTLTLFEDREMIEERLKTYAHLFDDKVMKQLKRRRYTGWGRLSRKLINGIRDKQSGKTILDFLKSDGFANRNFMQLIHDDSLTFKEDIQKAQVSGQGDSLHEHIANLAGSPAIKKGILQTVKVVDELVKVMGRHKPENIVIEMARENQTTQKGQKNSRERMKRIEEGIKELGSQILKEHPVENTQLQNEKLYLYYLQNGRDMYVDQELDINRLSDYDVDHIVPQSFLKDDSIDNKVLTRSDKARGKSDNVPSEEVVKKMKNYWRQLLNAKLITQRKFDNLTKAERGGLSELDKAGFIKRQLVETRQITKHVAQILDSRMNTKYDENDKLIREVKVITLKSKLVSDFRKDFQFYKVREINNYHHAHDAYLNAVVGTALIKKYPKLESEFVYGDYKVYDVRKMIAKSEQEIGKATAKYFFYSNIMNFFKTEITLANGEIRKRPLIETNGETGEIVWDKGRDFATVRKVLSMPQVNIVKKTEVQTGGFSKESILPKRNSDKLIARKKDWDPKKYGGFDSPTVAYSVLVVAKVEKGKSKKLKSVKELLGITIMERSSFEKNPIDFLEAKGYKEVKKDLIIKLPKYSLFELENGRKRMLASAGELQKGNELALPSKYVNFLYLASHYEKLKGSPEDNEQKQLFVEQHKHYLDEIIEQISEFSKRVILADANLDKVLSAYNKHRDKPIREQAENIIHLFTLTNLGAPAAFKYFDTTIDRKRYTSTKEVLDATLIHQSITGLYETRIDLSQLGGDGGPAPEAAAKGGTLNIEDEYRLHETSKEPDVSLGSTWLSDFPQAWAETGGMGLAVRQAPLIIPLKATSTPVSIKQYPMSQEARLGIKPHIQRLLDQGILVPCQSPWNTPLLPVKKPGTNDYRPVQDLREVNKRVEDIHPTVPNPYNLLSGLPPSHQWYTVLDLKDAFFCLRLHPTSQPLFAFEWRDPEMGISGQLTWTRLPQGFKNSPTLFNEALHRDLAGFRIQHPDLILLQYVDDLLLAATSELDCQQGTRALLQTLGDLGYRASAKKAQICQKQVKYLGYLLKEGQRWLTEARKETVMGQPIPKTPRQLREFLGTAGFCRLWIPGFAEMAAPLYPLTKPGTLFNWGPDQQKAFQEIKQALLTAPALGLPDLTKPFELFVDEKQGYAKGVLTQKLGPWRRPVAYLSKKLDPVAAGWPPCLRMVAAIAVLTKDAGKLTMGQPLVILAPHAVEALVKQPPDRWLSNARMTHYQALLLDTDRVQFGPVVALNPATLLPLPEEGLQHDCLDILAEAHGTRSDLMDQPLPDADHTWYTDGSSFLQEGQRKAGAAVTTETEVIWARALPAGTSAQRAELIALTQALKMAEGKKLNVYTDSRYAFATAHIHGEIYRRRGWLTSEGKEIKNKDEILALLKALFLPKRLSIIHCPGHQKGNSAEARGNRMADQAAREVATRETPETSTLLAGKRTADGSEFEKRTADGSEFESPKKKAKVE

SEQ ID NO: 6790 - protein, 2113 aa, synthetic construct
MPAAKRVKLDGGDKKYSIGLDIGTNSVGWAVITDEYKVPSKKFKVLGNTDRHSIKKNLIGALLFDSGETAEATRLKRTARRRYTRRKNRICYLQEIFSNEMAKVDDSFFHRLEESFLVEEDKKHERHPIFGNIVDEVAYHEKYPTIYHLRKKLVDSTDKADLRLIYLALAHMIKFRGHFLIEGDLNPDNSDVDKLFIQLVQTYNQLFEENPINASGVDAKAILSARLSKSRRLENLIAQLPGEKKNGLFGNLIALSLGLTPNFKSNFDLAEDAKLQLSKDTYDDDLDNLLAQIGDQYADLFLAAKNLSDAILLSDILRVNTEITKAPLSASMIKRYDEHHQDLTLLKALVRQQLPEKYKEIFFDQSKNGYAGYIDGGASQEEFYKFIKPILEKMDGTEELLVKLNREDLLRKQRTFDNGSIPHQIHLGELHAILRRQEDFYPFLKDNREKIEKILTFRIPYYVGPLARGNSRFAWMTRKSEETITPWNFEEVVDKGASAQSFIERMTNFDKNLPNEKVLPKHSLLYEYFTVYNELTKVKYVTEGMRKPAFLSGEQKKAIVDLLFKTNRKVTVKQLKEDYFKKIECFDSVEISGVEDRFNASLGTYHDLLKIIKDKDFLDNEENEDILEDIVLTLTLFEDREMIEERLKTYAHLFDDKVMKQLKRRRYTGWGRLSRKLINGIRDKQSGKTILDFLKSDGFANRNFMQLIHDDSLTFKEDIQKAQVSGQGDSLHEHIANLAGSPAIKKGILQTVKVVDELVKVMGRHKPENIVIEMARENQTTQKGQKNSRERMKRIEEGIKELGSQILKEHPVENTQLQNEKLYLYYLQNGRDMYVDQELDINRLSDYDVDHIVPQSFLKDDSIDNKVLTRSDKARGKSDNVPSEEVVKKMKNYWRQLLNAKLITQRKFDNLTKAERGGLSELDKAGFIKRQLVETRQITKHVAQILDSRMNTKYDENDKLIREVKVITLKSKLVSDFRKDFQFYKVREINNYHHAHDAYLNAVVGTALIKKYPKLESEFVYGDYKVYDVRKMIAKSEQEIGKATAKYFFYSNIMNFFKTEITLANGEIRKRPLIETNGETGEIVWDKGRDFATVRKVLSMPQVNIVKKTEVQTGGFSKESILPKRNSDKLIARKKDWDPKKYGGFDSPTVAYSVLVVAKVEKGKSKKLKSVKELLGITIMERSSFEKNPIDFLEAKGYKEVKKDLIIKLPKYSLFELENGRKRMLASAGELQKGNELALPSKYVNFLYLASHYEKLKGSPEDNEQKQLFVEQHKHYLDEIIEQISEFSKRVILADANLDKVLSAYNKHRDKPIREQAENIIHLFTLTNLGAPAAFKYFDTTIDRKRYTSTKEVLDATLIHQSITGLYETRIDLSQLGGDGGPAPEAAAKGGVQEISDSRPMLHIYLNGRRFLGLLDTGADKTCIAGRDWPANWPIHQTESSLQGLGMACGVARSSQPLRWQHEDKSGIIHPFVIPTLPFTLWGRDIMKDIKVRLMTDSPDDSQDLMIGAIESNLFADQISWKSDQPVWLNQWPLKQEKLQALQQLVTEQLQLGHLEESNSPWNTPVFVIKKKSGKWRLLQDLRAVNATMHDMGALQPGLPSPVAVPKGWEIIIIDLQDCFFNIKLHPEDCKRFAFSVPSPNFKRPYQRFQWKVLPQGMKNSPTLCQKFVDKAILTVRDKYQDSYIVHYMDDILLAHPSRSIVDEILTSMIQALNKHGLVVSTEKIQKYDNLKYLGTHIQGDSVSYQKLQIRTDKLRTLNDFQKLLGNINWIRPFLKLTTGELKPLFEILNPDSNPISTRKLTPEACKALQLMNERLSTARVKRLDLSQPWSLCILKTEYTPTACLWQDGVVEWIHLPHISPKVITPYDIFCTQLIIKGRHRSKELFSKDPDYIVVPYTKVQFDLLLQEKEDWPISLLGFLGEVHFHLPKDPLLTFTLQTAIIFPHMTSTTPLEKGIVIFTDGSANGRSVTYIQGREPIIKENTQNTAQQAEIVAVITAFEEVSQPFNLYTDSKYVTGLFPEIETATLSPRTKIYTELKHLQRLIHKRQEKFYIGHIRGHTGLPGPLAQGNAYADSLTRILTAAGKRTADGSEFEKRTADGSEFESPKKKAKVE

SEQ ID NO: 6791 - protein, 2085 aa, synthetic construct
MPAAKRVKLDGGDKKYSIGLDIGTNSVGWAVITDEYKVPSKKFKVLGNTDRHSIKKNLIGALLFDSGETAEATRLKRTARRRYTRRKNRICYLQEIFSNEMAKVDDSFFHRLEESFLVEEDKKHERHPIFGNIVDEVAYHEKYPTIYHLRKKLVDSTDKADLRLIYLALAHMIKFRGHFLIEGDLNPDNSDVDKLFIQLVQTYNQLFEENPINASGVDAKAILSARLSKSRRLENLIAQLPGEKKNGLFGNLIALSLGLTPNFKSNFDLAEDAKLQLSKDTYDDDLDNLLAQIGDQYADLFLAAKNLSDAILLSDILRVNTEITKAPLSASMIKRYDEHHQDLTLLKALVRQQLPEKYKEIFFDQSKNGYAGYIDGGASQEEFYKFIKPILEKMDGTEELLVKLNREDLLRKQRTFDNGSIPHQIHLGELHAILRRQEDFYPFLKDNREKIEKILTFRIPYYVGPLARGNSRFAWMTRKSEETITPWNFEEVVDKGASAQSFIERMTNFDKNLPNEKVLPKHSLLYEYFTVYNELTKVKYVTEGMRKPAFLSGEQKKAIVDLLFKTNRKVTVKQLKEDYFKKIECFDSVEISGVEDRFNASLGTYHDLLKIIKDKDFLDNEENEDILEDIVLTLTLFEDREMIEERLKTYAHLFDDKVMKQLKRRRYTGWGRLSRKLINGIRDKQSGKTILDFLKSDGFANRNFMQLIHDDSLTFKEDIQKAQVSGQGDSLHEHIANLAGSPAIKKGILQTVKVVDELVKVMGRHKPENIVIEMARENQTTQKGQKNSRERMKRIEEGIKELGSQILKEHPVENTQLQNEKLYLYYLQNGRDMYVDQELDINRLSDYDVDHIVPQSFLKDDSIDNKVLTRSDKARGKSDNVPSEEVVKKMKNYWRQLLNAKLITQRKFDNLTKAERGGLSELDKAGFIKRQLVETRQITKHVAQILDSRMNTKYDENDKLIREVKVITLKSKLVSDFRKDFQFYKVREINNYHHAHDAYLNAVVGTALIKKYPKLESEFVYGDYKVYDVRKMIAKSEQEIGKATAKYFFYSNIMNFFKTEITLANGEIRKRPLIETNGETGEIVWDKGRDFATVRKVLSMPQVNIVKKTEVQTGGFSKESILPKRNSDKLIARKKDWDPKKYGGFDSPTVAYSVLVVAKVEKGKSKKLKSVKELLGITIMERSSFEKNPIDFLEAKGYKEVKKDLIIKLPKYSLFELENGRKRMLASAGELQKGNELALPSKYVNFLYLASHYEKLKGSPEDNEQKQLFVEQHKHYLDEIIEQISEFSKRVILADANLDKVLSAYNKHRDKPIREQAENIIHLFTLTNLGAPAAFKYFDTTIDRKRYTSTKEVLDATLIHQSITGLYETRIDLSQLGGDGGPAPEAAAKGGLDDEYRLYSPLVKPDQNIQFWLEQFPQAWAETAGMGLAKQVPPQVIQLKASATPVSVRQYPLSKEAQEGIRPHVQRLIQQGILVPVQSPWNTPLLPVRKPGTNDYRPVQDLREVNKRVQDIHPTVPNPYNLLCALPPQRSWYTVLDLKDAFFCLRLHPTSQPLFAFEWRDPGTGRTGQLTWTRLPQGFKNSPTIFNEALHRDLANFRIQHPQVTLLQYVDDLLLAGATKQDCLEGTKALLLELSDLGYRASAKKAQICRREVTYLGYSLRDGQRWLTEARKKTVVQIPAPTTAKQVREFLGKAGFCRLFIPGFATLAAPLYPLTKPKGEFSWAPEHQKAFDAIKKALLSAPALALPDVTKPFTLYVDERKGVARGVLTQTLGPWRRPVAYLSKKLDPVASGWPVCLKAIAAVAILVKDADKLTLGQNITVIAPHALENIVRQPPDRWMTNARMTHYQSLLLTERVTFAPPAALNPATLLPEETDEPVTHDCHQLLIEETGVRKDLTDIPLTGEVLTWFTDGSSYVVEGKRMAGAAVVDGTRTIWASSLPEGTSAQKAELMALTQALRLAEGKSINIYTDSRYAFATAHVHGAIYKQRGWLTSAGREIKNKEEILSLLEALHLPKRLAIIHCPGHQKAKDPISRGNQMADRVAKQAAQGVNLLPAGKRTADGSEFEKRTADGSEFESPKKKAKVE

SEQ ID NO: 6792 - protein, 2087 aa, synthetic construct
MPAAKRVKLDGGDKKYSIGLDIGTNSVGWAVITDEYKVPSKKFKVLGNTDRHSIKKNLIGALLFDSGETAEATRLKRTARRRYTRRKNRICYLQEIFSNEMAKVDDSFFHRLEESFLVEEDKKHERHPIFGNIVDEVAYHEKYPTIYHLRKKLVDSTDKADLRLIYLALAHMIKFRGHFLIEGDLNPDNSDVDKLFIQLVQTYNQLFEENPINASGVDAKAILSARLSKSRRLENLIAQLPGEKKNGLFGNLIALSLGLTPNFKSNFDLAEDAKLQLSKDTYDDDLDNLLAQIGDQYADLFLAAKNLSDAILLSDILRVNTEITKAPLSASMIKRYDEHHQDLTLLKALVRQQLPEKYKEIFFDQSKNGYAGYIDGGASQEEFYKFIKPILEKMDGTEELLVKLNREDLLRKQRTFDNGSIPHQIHLGELHAILRRQEDFYPFLKDNREKIEKILTFRIPYYVGPLARGNSRFAWMTRKSEETITPWNFEEVVDKGASAQSFIERMTNFDKNLPNEKVLPKHSLLYEYFTVYNELTKVKYVTEGMRKPAFLSGEQKKAIVDLLFKTNRKVTVKQLKEDYFKKIECFDSVEISGVEDRFNASLGTYHDLLKIIKDKDFLDNEENEDILEDIVLTLTLFEDREMIEERLKTYAHLFDDKVMKQLKRRRYTGWGRLSRKLINGIRDKQSGKTILDFLKSDGFANRNFMQLIHDDSLTFKEDIQKAQVSGQGDSLHEHIANLAGSPAIKKGILQTVKVVDELVKVMGRHKPENIVIEMARENQTTQKGQKNSRERMKRIEEGIKELGSQILKEHPVENTQLQNEKLYLYYLQNGRDMYVDQELDINRLSDYDVDHIVPQSFLKDDSIDNKVLTRSDKARGKSDNVPSEEVVKKMKNYWRQLLNAKLITQRKFDNLTKAERGGLSELDKAGFIKRQLVETRQITKHVAQILDSRMNTKYDENDKLIREVKVITLKSKLVSDFRKDFQFYKVREINNYHHAHDAYLNAVVGTALIKKYPKLESEFVYGDYKVYDVRKMIAKSEQEIGKATAKYFFYSNIMNFFKTEITLANGEIRKRPLIETNGETGEIVWDKGRDFATVRKVLSMPQVNIVKKTEVQTGGFSKESILPKRNSDKLIARKKDWDPKKYGGFDSPTVAYSVLVVAKVEKGKSKKLKSVKELLGITIMERSSFEKNPIDFLEAKGYKEVKKDLIIKLPKYSLFELENGRKRMLASAGELQKGNELALPSKYVNFLYLASHYEKLKGSPEDNEQKQLFVEQHKHYLDEIIEQISEFSKRVILADANLDKVLSAYNKHRDKPIREQAENIIHLFTLTNLGAPAAFKYFDTTIDRKRYTSTKEVLDATLIHQSITGLYETRIDLSQLGGDGGPAPEAAAKGGTLQLDDEYRLYSPLVKPDQNIQFWLEQFPQAWAETAGMGLAKQVPPQVIQLKASATPVSVRQYPLSKEAQEGIRPHVQRLIQQGILVPVQSPWNTPLLPVRKPGTNDYRPVQDLREVNKRVQDIHPTVPNPYNLLCALPPQRSWYTVLDLKDAFFCLRLHPTSQPLFAFEWRDPGTGRTGQLTWTRLPQGFKNSPTIFDEALHRDLANFRIQHPQVTLLQYVDDLLLAGATKQDCLEGTKALLLELSDLGYRASAKKAQICRREVTYLGYSLRDGQRWLTEARKKTVVQIPAPTTAKQVREFLGTAGFCRLWIPGFATLAAPLYPLTKEKGEFSWAPEHQKAFDAIKKALLSAPALALPDVTKPFTLYVDERKGVARGVLTQTLGPWRRPVAYLSKKLDPVASGWPVCLKAIAAVAILVKDADKLTLGQNITVIAPHALENIVRQPPDRWMTNARMTHYQSLLLTERVTFAPPAALNPATLLPEETDEPVTHDCHQLLIEETGVRKDLTDIPLTGEVLTWFTDGSSYVVEGKRMAGAAVVDGTRTIWASSLPEGTSAQKAELMALTQALRLAEGKSINIYTDSRYAFATAHVHGAIYKQRGLLTSAGREIKNKEEILSLLEALHLPKRLAIIHCPGHQKAKDPISRGNQMADRVAKQAAQGVNLLAGKRTADGSEFEKRTADGSEFESPKKKAKVE

SEQ ID NO: 6793 - protein, 2085 aa, synthetic construct; identical to SEQ ID NO: 6791

SEQ ID NO: 6794 - protein, 2087 aa, synthetic construct; identical to SEQ ID NO: 6792

SEQ ID NO: 6795 - protein, 2091 aa, synthetic construct
MPAAKRVKLDGGDKKYSIGLDIGTNSVGWAVITDEYKVPSKKFKVLGNTDRHSIKKNLIGALLFDSGETAEATRLKRTARRRYTRRKNRICYLQEIFSNEMAKVDDSFFHRLEESFLVEEDKKHERHPIFGNIVDEVAYHEKYPTIYHLRKKLVDSTDKADLRLIYLALAHMIKFRGHFLIEGDLNPDNSDVDKLFIQLVQTYNQLFEENPINASGVDAKAILSARLSKSRRLENLIAQLPGEKKNGLFGNLIALSLGLTPNFKSNFDLAEDAKLQLSKDTYDDDLDNLLAQIGDQYADLFLAAKNLSDAILLSDILRVNTEITKAPLSASMIKRYDEHHQDLTLLKALVRQQLPEKYKEIFFDQSKNGYAGYIDGGASQEEFYKFIKPILEKMDGTEELLVKLNREDLLRKQRTFDNGSIPHQIHLGELHAILRRQEDFYPFLKDNREKIEKILTFRIPYYVGPLARGNSRFAWMTRKSEETITPWNFEEVVDKGASAQSFIERMTNFDKNLPNEKVLPKHSLLYEYFTVYNELTKVKYVTEGMRKPAFLSGEQKKAIVDLLFKTNRKVTVKQLKEDYFKKIECFDSVEISGVEDRFNASLGTYHDLLKIIKDKDFLDNEENEDILEDIVLTLTLFEDREMIEERLKTYAHLFDDKVMKQLKRRRYTGWGRLSRKLINGIRDKQSGKTILDFLKSDGFANRNFMQLIHDDSLTFKEDIQKAQVSGQGDSLHEHIANLAGSPAIKKGILQTVKVVDELVKVMGRHKPENIVIEMARENQTTQKGQKNSRERMKRIEEGIKELGSQILKEHPVENTQLQNEKLYLYYLQNGRDMYVDQELDINRLSDYDVDHIVPQSFLKDDSIDNKVLTRSDKARGKSDNVPSEEVVKKMKNYWRQLLNAKLITQRKFDNLTKAERGGLSELDKAGFIKRQLVETRQITKHVAQILDSRMNTKYDENDKLIREVKVITLKSKLVSDFRKDFQFYKVREINNYHHAHDAYLNAVVGTALIKKYPKLESEFVYGDYKVYDVRKMIAKSEQEIGKATAKYFFYSNIMNFFKTEITLANGEIRKRPLIETNGETGEIVWDKGRDFATVRKVLSMPQVNIVKKTEVQTGGFSKESILPKRNSDKLIARKKDWDPKKYGGFDSPTVAYSVLVVAKVEKGKSKKLKSVKELLGITIMERSSFEKNPIDFLEAKGYKEVKKDLIIKLPKYSLFELENGRKRMLASAGELQKGNELALPSKYVNFLYLASHYEKLKGSPEDNEQKQLFVEQHKHYLDEIIEQISEFSKRVILADANLDKVLSAYNKHRDKPIREQAENIIHLFTLTNLGAPAAFKYFDTTIDRKRYTSTKEVLDATLIHQSITGLYETRIDLSQLGGDGGPAPEAAAKGGVLNLEEEYRLHEKPVPSSIDPSWLQLFPTVWAERAGMGLANQVPPVVVELRSGASPVAVRQYPMSKEAREGIRPHIQRFLDLGVLVPCQSPWNTPLLPVKKPGTNDYRPVQDLREINKRVQDIHPTVPNPYNLLSSLPPSHTWYSVLDLKDAFFCLKLHPNSQPLFAFEWRDPEKGNTGQLTWTRLPQGFKNSPTLFDEALHRDLAPFRALNPQVVLLQYVDDLLVAAPTYRDCKEGTQKLLQELSKLGYRVSAKKAQLCQKEVTYLGYLLKEGKRWLTPARKATVMKIPPPTTPRQVREFLGTAGFCRLWIPGFASLAAPLYPLTKESIPFIWTEEHQKAFDRIKEALLSAPALALPDLTKPFTLYVDERAGVARGVLTQTLGPWRRPVAYLSKKLDPVASGWPTCLKAVAAVALLLKDADKLTLGQNVTVIASHSLESIVRQPPDRWMTNARMTHYQSLLLNERVSFAPPAVLNPATLLPVESEATPVHRCSEILAEETGTRRDLKDQPLPGVPAWYTDGSSFIAEGKRRAGAAIVDGKRTVWASSLPEGTSAQKAELVALTQALRLAEGKDINIYTDSRYAFATAHIHGAIYKQRGLLTSAGKDIKNKEEILALLEAIHLPKRVAIIHCPGHQKGNDPVATGNRRADEAAKQAALSTRVLAETTKPAGKRTADGSEFEKRTADGSEFESPKKKAKVE

SEQ ID NO: 6796 - protein, 2093 aa, synthetic construct
MPAAKRVKLDGGDKKYSIGLDIGTNSVGWAVITDEYKVPSKKFKVLGNTDRHSIKKNLIGALLFDSGETAEATRLKRTARRRYTRRKNRICYLQEIFSNEMAKVDDSFFHRLEESFLVEEDKKHERHPIFGNIVDEVAYHEKYPTIYHLRKKLVDSTDKADLRLIYLALAHMIKFRGHFLIEGDLNPDNSDVDKLFIQLVQTYNQLFEENPINASGVDAKAILSARLSKSRRLENLIAQLPGEKKNGLFGNLIALSLGLTPNFKSNFDLAEDAKLQLSKDTYDDDLDNLLAQIGDQYADLFLAAKNLSDAILLSDILRVNTEITKAPLSASMIKRYDEHHQDLTLLKALVRQQLPEKYKEIFFDQSKNGYAGYIDGGASQEEFYKFIKPILEKMDGTEELLVKLNREDLLRKQRTFDNGSIPHQIHLGELHAILRRQEDFYPFLKDNREKIEKILTFRIPYYVGPLARGNSRFAWMTRKSEETITPWNFEEVVDKGASAQSFIERMTNFDKNLPNEKVLPKHSLLYEYFTVYNELTKVKYVTEGMRKPAFLSGEQKKAIVDLLFKTNRKVTVKQLKEDYFKKIECFDSVEISGVEDRFNASLGTYHDLLKIIKDKDFLDNEENEDILEDIVLTLTLFEDREMIEERLKTYAHLFDDKVMKQLKRRRYTGWGRLSRKLINGIRDKQSGKTILDFLKSDGFANRNFMQLIHDDSLTFKEDIQKAQVSGQGDSLHEHIANLAGSPAIKKGILQTVKVVDELVKVMGRHKPENIVIEMARENQTTQKGQKNSRERMKRIEEGIKELGSQILKEHPVENTQLQNEKLYLYYLQNGRDMYVDQELDINRLSDYDVDHIVPQSFLKDDSIDNKVLTRSDKARGKSDNVPSEEVVKKMKNYWRQLLNAKLITQRKFDNLTKAERGGLSELDKAGFIKRQLVETRQITKHVAQILDSRMNTKYDENDKLIREVKVITLKSKLVSDFRKDFQFYKVREINNYHHAHDAYLNAVVGTALIKKYPKLESEFVYGDYKVYDVRKMIAKSEQEIGKATAKYFFYSNIMNFFKTEITLANGEIRKRPLIETNGETGEIVWDKGRDFATVRKVLSMPQVNIVKKTEVQTGGFSKESILPKRNSDKLIARKKDWDPKKYGGFDSPTVAYSVLVVAKVEKGKSKKLKSVKELLGITIMERSSFEKNPIDFLEAKGYKEVKKDLIIKLPKYSLFELENGRKRMLASAGELQKGNELALPSKYVNFLYLASHYEKLKGSPEDNEQKQLFVEQHKHYLDEIIEQISEFSKRVILADANLDKVLSAYNKHRDKPIREQAENIIHLFTLTNLGAPAAFKYFDTTIDRKRYTSTKEVLDATLIHQSITGLYETRIDLSQLGGDGGPAPEAAAKGGTLNIEDEYRLHETSKEPDVPLGSTWLSDFPQAWAETGGMGLAVRQAPLIIPLKATSTPVSIKQYPMSQEARLGIKPHIQRLLDQGILVPCQSPWNTPLLPVKKPGTNDYRPVQDLREVNKRVEDIHPTVPNPYNLLSGLPPSHQWYTVLDLKDAFFCLRLHPTSQPLFAFEWRDPEMGISGQLTWTRLPQGFKNSPTLFNEALHRDLADFRIQHPDLILLQYVDDLLLAATSEQDCQRGTRALLQTLGNLGYRASAKKAQICQKQVKYLGYLLKEGQRWLTEARKETVMGQPTPKTPRQLREFLGTAGFCRLWIPGFAEMAAPLYPLTKPGTLFNWGPDQQKAYQEIKQALLTAPALGLPDLTKPFELFVDEKQGYAKGVLTQKLGPWRRPVAYLSKKLDPVAAGWPPCLRMVAAIAVLTKDAGKLTMGQPLVILAPHAVEALVKQPPDRWLSNARMTHYQAMLLDTDRVQFGPVVALNPATLLPLPEKEAPHDCLEILAETHGTRPDLTDQPIPDADYTWYTDGSSFLQEGQRRAGAAVTTETEVIWARALPAGTSAQRAELIALTQALKMAEGKKLNVYTDSRYAFATAHVHGEIYRRRGWLTSEGREIKNKNEILALLKALFLPKRLSIIHCPGHQKGNSAEARGNRMADQAAREAAMKAVLETSTLLAGKRTADGSEFEKRTADGSEFESPKKKAKVE

SEQ ID NO: 6797 - protein, 2093 aa, synthetic construct
MPAAKRVKLDGGDKKYSIGLDIGTNSVGWAVITDEYKVPSKKFKVLGNTDRHSIKKNLIGALLFDSGETAEATRLKRTARRRYTRRKNRICYLQEIFSNEMAKVDDSFFHRLEESFLVEEDKKHERHPIFGNIVDEVAYHEKYPTIYHLRKKLVDSTDKADLRLIYLALAHMIKFRGHFLIEGDLNPDNSDVDKLFIQLVQTYNQLFEENPINASGVDAKAILSARLSKSRRLENLIAQLPGEKKNGLFGNLIALSLGLTPNFKSNFDLAEDAKLQLSKDTYDDDLDNLLAQIGDQYADLFLAAKNLSDAILLSDILRVNTEITKAPLSASMIKRYDEHHQDLTLLKALVRQQLPEKYKEIFFDQSKNGYAGYIDGGASQEEFYKFIKPILEKMDGTEELLVKLNREDLLRKQRTFDNGSIPHQIHLGELHAILRRQEDFYPFLKDNREKIEKILTFRIPYYVGPLARGNSRFAWMTRKSEETITPWNFEEVVDKGASAQSFIERMTNFDKNLPNEKVLPKHSLLYEYFTVYNELTKVKYVTEGMRKPAFLSGEQKKAIVDLLFKTNRKVTVKQLKEDYFKKIECFDSVEISGVEDRFNASLGTYHDLLKIIKDKDFLDNEENEDILEDIVLTLTLFEDREMIEERLKTYAHLFDDKVMKQLKRRRYTGWGRLSRKLINGIRDKQSGKTILDFLKSDGFANRNFMQLIHDDSLTFKEDIQKAQVSGQGDSLHEHIANLAGSPAIKKGILQTVKVVDELVKVMGRHKPENIVIEMARENQTTQKGQKNSRERMKRIEEGIKELGSQILKEHPVENTQLQNEKLYLYYLQNGRDMYVDQELDINRLSDYDVDHIVPQSFLKDDSIDNKVLTRSDKARGKSDNVPSEEVVKKMKNYWRQLLNAKLITQRKFDNLTKAERGGLSELDKAGFIKRQLVETRQITKHVAQILDSRMNTKYDENDKLIREVKVITLKSKLVSDFRKDFQFYKVREINNYHHAHDAYLNAVVGTALIKKYPKLESEFVYGDYKVYDVRKMIAKSEQEIGKATAKYFFYSNIMNFFKTEITLANGEIRKRPLIETNGETGEIVWDKGRDFATVRKVLSMPQVNIVKKTEVQTGGFSKESILPKRNSDKLIARKKDWDPKKYGGFDSPTVAYSVLVVAKVEKGKSKKLKSVKELLGITIMERSSFEKNPIDFLEAKGYKEVKKDLIIKLPKYSLFELENGRKRMLASAGELQKGNELALPSKYVNFLYLASHYEKLKGSPEDNEQKQLFVEQHKHYLDEIIEQISEFSKRVILADANLDKVLSAYNKHRDKPIREQAENIIHLFTLTNLGAPAAFKYFDTTIDRKRYTSTKEVLDATLIHQSITGLYETRIDLSQLGGDGGPAPEAAAKGGTLNIEDEYRLHETSKEPDVPLGSTWLSDFPQAWAETGGMGLAVRQAPLIIPLKATSTPVSIKQYPMSQEARLGIKPHIQRLLDQGILVPCQSPWNTPLLPVKKPGTNDYRPVQDLREVNKRVEDIHPTVPNPYNLLSGLPPSHQWYTVLDLKDAFFCLRLHPTSQPLFAFEWRDPEMGISGQLTWTRLPQGFKNSPTLFNEALHRDLADFRIQHPDLILLQYVDDLLLAATSEQDCQRGTRALLQTLGNLGYRASAKKAQICQKQVKYLGYLLKEGQRWLTEARKETVMGQPTPKTPRQLREFLGKAGFCRLFIPGFAEMAAPLYPLTKPGTLFNWGPDQQKAYQEIKQALLTAPALGLPDLTKPFELFVDEKQGYAKGVLTQKLGPWRRPVAYLSKKLDPVAAGWPPCLRMVAAIAVLTKDAGKLTMGQPLVILAPHAVEALVKQPPDRWLSNARMTHYQAMLLDTDRVQFGPVVALNPATLLPLPEKEAPHDCLEILAETHGTRPDLTDQPIPDADYTWYTDGSSFLQEGQRRAGAAVTTETEVIWARALPAGTSAQRAELIALTQALKMAEGKKLNVYTDSRYAFATAHVHGEIYRRRGWLTSEGREIKNKNEILALLKALFLPKRLSIIHCPGHQKGNSAEARGNRMADQAAREAAMKAVLETSTLLAGKRTADGSEFEKRTADGSEFESPKKKAKVE

SEQ ID NO: 6798 - protein, 2096 aa, synthetic construct
MPAAKRVKLDGGDKKYSIGLDIGTNSVGWAVITDEYKVPSKKFKVLGNTDRHSIKKNLIGALLFDSGETAEATRLKRTARRRYTRRKNRICYLQEIFSNEMAKVDDSFFHRLEESFLVEEDKKHERHPIFGNIVDEVAYHEKYPTIYHLRKKLVDSTDKADLRLIYLALAHMIKFRGHFLIEGDLNPDNSDVDKLFIQLVQTYNQLFEENPINASGVDAKAILSARLSKSRRLENLIAQLPGEKKNGLFGNLIALSLGLTPNFKSNFDLAEDAKLQLSKDTYDDDLDNLLAQIGDQYADLFLAAKNLSDAILLSDILRVNTEITKAPLSASMIKRYDEHHQDLTLLKALVRQQLPEKYKEIFFDQSKNGYAGYIDGGASQEEFYKFIKPILEKMDGTEELLVKLNREDLLRKQRTFDNGSIPHQIHLGELHAILRRQEDFYPFLKDNREKIEKILTFRIPYYVGPLARGNSRFAWMTRKSEETITPWNFEEVVDKGASAQSFIERMTNFDKNLPNEKVLPKHSLLYEYFTVYNELTKVKYVTEGMRKPAFLSGEQKKAIVDLLFKTNRKVTVKQLKEDYFKKIECFDSVEISGVEDRFNASLGTYHDLLKIIKDKDFLDNEENEDILEDIVLTLTLFEDREMIEERLKTYAHLFDDKVMKQLKRRRYTGWGRLSRKLINGIRDKQSGKTILDFLKSDGFANRNFMQLIHDDSLTFKEDIQKAQVSGQGDSLHEHIANLAGSPAIKKGILQTVKVVDELVKVMGRHKPENIVIEMARENQTTQKGQKNSRERMKRIEEGIKELGSQILKEHPVENTQLQNEKLYLYYLQNGRDMYVDQELDINRLSDYDVDHIVPQSFLKDDSIDNKVLTRSDKARGKSDNVPSEEVVKKMKNYWRQLLNAKLITQRKFDNLTKAERGGLSELDKAGFIKRQLVETRQITKHVAQILDSRMNTKYDENDKLIREVKVITLKSKLVSDFRKDFQFYKVREINNYHHAHDAYLNAVVGTALIKKYPKLESEFVYGDYKVYDVRKMIAKSEQEIGKATAKYFFYSNIMNFFKTEITLANGEIRKRPLIETNGETGEIVWDKGRDFATVRKVLSMPQVNIVKKTEVQTGGFSKESILPKRNSDKLIARKKDWDPKKYGGFDSPTVAYSVLVVAKVEKGKSKKLKSVKELLGITIMERSSFEKNPIDFLEAKGYKEVKKDLIIKLPKYSLFELENGRKRMLASAGELQKGNELALPSKYVNFLYLASHYEKLKGSPEDNEQKQLFVEQHKHYLDEIIEQISEFSKRVILADANLDKVLSAYNKHRDKPIREQAENIIHLFTLTNLGAPAAFKYFDTTIDRKRYTSTKEVLDATLIHQSITGLYETRIDLSQLGGDGGGGSGGGGSSGGTAPLEEEYRLFLEAPIQNVTLLEQWKREIPKVWAEINPPGLASTQAPIHVQLLSTALPVRVRQYPITLEAKRSLRETIRKFRAAGILRPVHSPWNTPLLPVRKSGTSEYRMVQDLREVNKRVETIHPTVPNPYTLLSLLPPDRIWYSVLDLKDAFFCIPLAPESQLIFAFEWADAEEGESGQLTWTRLPQGFKNSPTLFNEALNRDLQGFRLDHPSVSLLQYVDDLLIAADTQAACLSATRDLLMTLAELGYRVSGKKAQLCQEEVTYLGFKIHKGSRSLSNSRTQAILQIPVPKTKRQVREFLGKIGYCRLFIPGFAELAQPLYAATRPGNDPLVWGEKEEEAFQSLKLALTQPPALALPSLDKPFQLFVEETSGAAKGVLTQALGPWKRPVAYLSKRLDPVAAGWPRCLRAIAAAALLTREASKLTFGQDIEITSSHNLESLLRSPPDKWLTNARITQYQVLLLDPPRVRFKQTAALNPATLLPETDDTLPIHHCLDTLDSLTSTRPDLTDQPLAQAEATLFTDGSSYIRDGKRYAGAAVVTLDSVIWAEPLPIGTSAQKAELIALTKALEWSKDKSVNIYTDSRYAFATLHVHGMIYRERGWLTAGGKAIKNAPEILALLTAVWLPKRVAVMHCKGHQKDDAPTSTGNRRADEVAREVAIRPLSTQATISAGKRTADGSEFEKRTADGSEFESPKKKAKVE

SEQ ID NO: 6799 - protein, 2100 aa, synthetic construct
MPAAKRVKLDGGDKKYSIGLDIGTNSVGWAVITDEYKVPSKKFKVLGNTDRHSIKKNLIGALLFDSGETAEATRLKRTARRRYTRRKNRICYLQEIFSNEMAKVDDSFFHRLEESFLVEEDKKHERHPIFGNIVDEVAYHEKYPTIYHLRKKLVDSTDKADLRLIYLALAHMIKFRGHFLIEGDLNPDNSDVDKLFIQLVQTYNQLFEENPINASGVDAKAILSARLSKSRRLENLIAQLPGEKKNGLFGNLIALSLGLTPNFKSNFDLAEDAKLQLSKDTYDDDLDNLLAQIGDQYADLFLAAKNLSDAILLSDILRVNTEITKAPLSASMIKRYDEHHQDLTLLKALVRQQLPEKYKEIFFDQSKNGYAGYIDGGASQEEFYKFIKPILEKMDGTEELLVKLNREDLLRKQRTFDNGSIPHQIHLGELHAILRRQEDFYPFLKDNREKIEKILTFRIPYYVGPLARGNSRFAWMTRKSEETITPWNFEEVVDKGASAQSFIERMTNFDKNLPNEKVLPKHSLLYEYFTVYNELTKVKYVTEGMRKPAFLSGEQKKAIVDLLFKTNRKVTVKQLKEDYFKKIECFDSVEISGVEDRFNASLGTYHDLLKIIKDKDFLDNEENEDILEDIVLTLTLFEDREMIEERLKTYAHLFDDKVMKQLKRRRYTGWGRLSRKLINGIRDKQSGKTILDFLKSDGFANRNFMQLIHDDSLTFKEDIQKAQVSGQGDSLHEHIANLAGSPAIKKGILQTVKVVDELVKVMGRHKPENIVIEMARENQTTQKGQKNSRERMKRIEEGIKELGSQILKEHPVENTQLQNEKLYLYYLQNGRDMYVDQELDINRLSDYDVDHIVPQSFLKDDSIDNKVLTRSDKARGKSDNVPSEEVVKKMKNYWRQLLNAKLITQRKFDNLTKAERGGLSELDKAGFIKRQLVETRQITKHVAQILDSRMNTKYDENDKLIREVKVITLKSKLVSDFRKDFQFYKVREINNYHHAHDAYLNAVVGTALIKKYPKLESEFVYGDYKVYDVRKMIAKSEQEIGKATAKYFFYSNIMNFFKTEITLANGEIRKRPLIETNGETGEIVWDKGRDFATVRKVLSMPQVNIVKKTEVQTGGFSKESILPKRNSDKLIARKKDWDPKKYGGFDSPTVAYSVLVVAKVEKGKSKKLKSVKELLGITIMERSSFEKNPIDFLEAKGYKEVKKDLIIKLPKYSLFELENGRKRMLASAGELQKGNELALPSKYVNFLYLASHYEKLKGSPEDNEQKQLFVEQHKHYLDEIIEQISEFSKRVILADANLDKVLSAYNKHRDKPIREQAENIIHLFTLTNLGAPAAFKYFDTTIDRKRYTSTKEVLDATLIHQSITGLYETRIDLSQLGGDGGGGSGGGGSSGGTVSLQDEHRLFDIPVTTSLPDVWLQDFPQAWAETGGLGRAKCQAPIIIDLKPTAVPVSIKQYPMSLEAHMGIRQHIIKFLELGVLRPCRSPWNTPLLPVKKPGTQDYRPVQDLREINKRTVDIHPTVPNPYNLLSTLKPDYSWYTVLDLKDAFFCLPLAPQSQELFAFEWKDPERGISGQLTWTRLPQGFKNSPTLFDEALHRDLTDFRTQHPEVTLLQYVDDLLLAAPTKKACTQGTRHLLQELGEKGYRASAKKAQICQTKVTYLGYILSEGKRWLTPGRIETVARIPPPRNPREVREFLGTAGFCRLWIPGFAELAAPLYALTKESTPFTWQTEHQLAFEALKKALLSAPALGLPDTSKPFTLFLDERQGIAKGVLTQKLGPWKRPVAYLSKKLDPVAAGWPPCLRIMAATAMLVKDSAKLTLGQPLTVITPHTLEAIVRQPPDRWITNARLTHYQALLLDTDRVQFGPPVTLNPATLLPVPENQPSPHDCRQVLAETHGTREDLKDQELPDADHTWYTDGSSYLDSGTRRAGAAVVDGHNTIWAQSLPPGTSAQKAELIALTKALELSKGKKANIYTDSRYAFATAHTHGSIYERRGLLTSEGKEIKNKAEIIALLKALFLPQEVAIIHCPGHQKGQDPVAVGNRQADRVARQAAMAEVLTLATEPDNTSHITAGKRTADGSEFEKRTADGSEFESPKKKAKVE

SEQ ID NO: 6800 - protein, 1999 aa, synthetic construct
MPAAKRVKLDGGDKKYSIGLDIGTNSVGWAVITDEYKVPSKKFKVLGNTDRHSIKKNLIGALLFDSGETAEATRLKRTARRRYTRRKNRICYLQEIFSNEMAKVDDSFFHRLEESFLVEEDKKHERHPIFGNIVDEVAYHEKYPTIYHLRKKLVDSTDKADLRLIYLALAHMIKFRGHFLIEGDLNPDNSDVDKLFIQLVQTYNQLFEENPINASGVDAKAILSARLSKSRRLENLIAQLPGEKKNGLFGNLIALSLGLTPNFKSNFDLAEDAKLQLSKDTYDDDLDNLLAQIGDQYADLFLAAKNLSDAILLSDILRVNTEITKAPLSASMIKRYDEHHQDLTLLKALVRQQLPEKYKEIFFDQSKNGYAGYIDGGASQEEFYKFIKPILEKMDGTEELLVKLNREDLLRKQRTFDNGSIPHQIHLGELHAILRRQEDFYPFLKDNREKIEKILTFRIPYYVGPLARGNSRFAWMTRKSEETITPWNFEEVVDKGASAQSFIERMTNFDKNLPNEKVLPKHSLLYEYFTVYNELTKVKYVTEGMRKPAFLSGEQKKAIVDLLFKTNRKVTVKQLKEDYFKKIECFDSVEISGVEDRFNASLGTYHDLLKIIKDKDFLDNEENEDILEDIVLTLTLFEDREMIEERLKTYAHLFDDKVMKQLKRRRYTGWGRLSRKLINGIRDKQSGKTILDFLKSDGFANRNFMQLIHDDSLTFKEDIQKAQVSGQGDSLHEHIANLAGSPAIKKGILQTVKVVDELVKVMGRHKPENIVIEMARENQTTQKGQKNSRERMKRIEEGIKELGSQILKEHPVENTQLQNEKLYLYYLQNGRDMYVDQELDINRLSDYDVDHIVPQSFLKDDSIDNKVLTRSDKARGKSDNVPSEEVVKKMKNYWRQLLNAKLITQRKFDNLTKAERGGLSELDKAGFIKRQLVETRQITKHVAQILDSRMNTKYDENDKLIREVKVITLKSKLVSDFRKDFQFYKVREINNYHHAHDAYLNAVVGTALIKKYPKLESEFVYGDYKVYDVRKMIAKSEQEIGKATAKYFFYSNIMNFFKTEITLANGEIRKRPLIETNGETGEIVWDKGRDFATVRKVLSMPQVNIVKKTEVQTGGFSKESILPKRNSDKLIARKKDWDPKKYGGFDSPTVAYSVLVVAKVEKGKSKKLKSVKELLGITIMERSSFEKNPIDFLEAKGYKEVKKDLIIKLPKYSLFELENGRKRMLASAGELQKGNELALPSKYVNFLYLASHYEKLKGSPEDNEQKQLFVEQHKHYLDEIIEQISEFSKRVILADANLDKVLSAYNKHRDKPIREQAENIIHLFTLTNLGAPAAFKYFDTTIDRKRYTSTKEVLDATLIHQSITGLYETRIDLSQLGGDGGGGSGGGGSSGGGVLDTPPSHIGLEHLPPPPEVPQFPLNLERLQALQDLVHRSLEAGYISPWDGPGNNPVFPVRKPNGAWRFVHDLRATNALTKPIPALSPGPPDLTAPPTHPPHIICLDLKDAFFQIPVEDRFRFYLSFTLPSPGGLQPHRRFAWRVLPQGFINSPALFQRALQEPLRQVSAAFSQSLLVSYMDDILYASPTEEQRSQCYQALAARLRDLGFQVASEKTSQTPSPVPFLGQMVHEQIVTYQSLPTLQISSPISLHQLQAVLGDLQWVSRGTPTTRRPLQLLYSSLKRHHDPRAIIQLSPEQLQGIAELRQALSHNARSRYNEQEPLLAYVHLTRAGSTLVLFQKGAQFPLAYFQTPLTDNQASPWGLLLLLGCQYLQTQALSSYAKPILKYYHNLPKTSLDNWIQSSEDPRVQELLQLWPQISSQGIQPPGPWKTLITRAEVFLTPQFSPDPIPAALCLFSDGATGRGAYCLWKDHLLDFQAVPAPESAQKGELAGLLAGLAAAPPEPVNIWVDSKYLYSLLRTWVLGAWLQPDPVPSYALLYKSLLRHPAIVVGHVRSHSSASHPIASLNNYVDQLAGKRTADGSEFEKRTADGSEFESPKKKAKVE

SEQ ID NO: 6801 - protein, 2085 aa, synthetic construct
MPAAKRVKLDGGDKKYSIGLDIGTNSVGWAVITDEYKVPSKKFKVLGNTDRHSIKKNLIGALLFDSGETAEATRLKRTARRRYTRRKNRICYLQEIFSNEMAKVDDSFFHRLEESFLVEEDKKHERHPIFGNIVDEVAYHEKYPTIYHLRKKLVDSTDKADLRLIYLALAHMIKFRGHFLIEGDLNPDNSDVDKLFIQLVQTYNQLFEENPINASGVDAKAILSARLSKSRRLENLIAQLPGEKKNGLFGNLIALSLGLTPNFKSNFDLAEDAKLQLSKDTYDDDLDNLLAQIGDQYADLFLAAKNLSDAILLSDILRVNTEITKAPLSASMIKRYDEHHQDLTLLKALVRQQLPEKYKEIFFDQSKNGYAGYIDGGASQEEFYKFIKPILEKMDGTEELLVKLNREDLLRKQRTFDNGSIPHQIHLGELHAILRRQEDFYPFLKDNREKIEKILTFRIPYYVGPLARGNSRFAWMTRKSEETITPWNFEEVVDKGASAQSFIERMTNFDKNLPNEKVLPKHSLLYEYFTVYNELTKVKYVTEGMRKPAFLSGEQKKAIVDLLFKTNRKVTVKQLKEDYFKKIECFDSVEISGVEDRFNASLGTYHDLLKIIKDKDFLDNEENEDILEDIVLTLTLFEDREMIEERLKTYAHLFDDKVMKQLKRRRYTGWGRLSRKLINGIRDKQSGKTILDFLKSDGFANRNFMQLIHDDSLTFKEDIQKAQVSGQGDSLHEHIANLAGSPAIKKGILQTVKVVDELVKVMGRHKPENIVIEMARENQTTQKGQKNSRERMKRIEEGIKELGSQILKEHPVENTQLQNEKLYLYYLQNGRDMYVDQELDINRLSDYDVDHIVPQSFLKDDSIDNKVLTRSDKARGKSDNVPSEEVVKKMKNYWRQLLNAKLITQRKFDNLTKAERGGLSELDKAGFIKRQLVETRQITKHVAQILDSRMNTKYDENDKLIREVKVITLKSKLVSDFRKDFQFYKVREINNYHHAHDAYLNAVVGTALIKKYPKLESEFVYGDYKVYDVRKMIAKSEQEIGKATAKYFFYSNIMNFFKTEITLANGEIRKRPLIETNGETGEIVWDKGRDFATVRKVLSMPQVNIVKKTEVQTGGFSKESILPKRNSDKLIARKKDWDPKKYGGFDSPTVAYSVLVVAKVEKGKSKKLKSVKELLGITIMERSSFEKNPIDFLEAKGYKEVKKDLIIKLPKYSLFELENGRKRMLASAGELQKGNELALPSKYVNFLYLASHYEKLKGSPEDNEQKQLFVEQHKHYLDEIIEQISEFSKRVILADANLDKVLSAYNKHRDKPIREQAENIIHLFTLTNLGAPAAFKYFDTTIDRKRYTSTKEVLDATLIHQSITGLYETRIDLSQLGGDGGGGSGGGGSSGGVPWILKKPLELTIKLDLEEQQGTLLNNSILSKKGKEELKQLFEKYSALWQSWENQVGHRRIRPHKIATGTVKPTPQKQYHINPKAKPDIQIVINDLLKQGVLIQKESTMNTPVYPVPKPNGRWRMVLDYRAVNKVTPLIAVQNQHSYGILGSLFKGRYKTTIDLSNGFWAHPIVPEDYWITAFTWQGKQYCWTVLPQGFLNSPGLFTGDVVDLLQGIPNVEVYVDDVYISHDSEKEHLEYLDILFNRLKEAGYIISLKKSNIANSIVDFLGFQITNEGRGLTDTFKEKLENITAPTTLKQLQSILGLLNFARNFIPDFTELIAPLYALIPKSTKNYVPWQIEHSTTLETLITKLNGAEYLQGRKGDKTLIMKVNASYTTGYIRYYNEGEKKPISYVSIVFSKTELKFTELEKLLTTVHKGLLKALDLSMGQNIHVYSPIVSMQNIQKTPQTAKKALASRWLSWLSYLEDPRIRFFYDPQMPALKDLPAVDTGKDNKKHPSNFQHIFYTDGSAITSPTKEGHLNAGMGIVYFINKDGNLQKQQEWSISLGNHTAQFAEIAAFEFALKKCLPLGGNILVVTDSNYVAKAYNEELDVWASNGFVNNRKKPLKHISKWKSVADLKRLRPDVVVTHEPGHQKLDSSPHAYGNNLADQLATQASFKVHAGKRTADGSEFEKRTADGSEFESPKKKAKVE

SEQ ID NO: 6802 - protein, 2093 aa, synthetic construct
MPAAKRVKLDGGDKKYSIGLDIGTNSVGWAVITDEYKVPSKKFKVLGNTDRHSIKKNLIGALLFDSGETAEATRLKRTARRRYTRRKNRICYLQEIFSNEMAKVDDSFFHRLEESFLVEEDKKHERHPIFGNIVDEVAYHEKYPTIYHLRKKLVDSTDKADLRLIYLALAHMIKFRGHFLIEGDLNPDNSDVDKLFIQLVQTYNQLFEENPINASGVDAKAILSARLSKSRRLENLIAQLPGEKKNGLFGNLIALSLGLTPNFKSNFDLAEDAKLQLSKDTYDDDLDNLLAQIGDQYADLFLAAKNLSDAILLSDILRVNTEITKAPLSASMIKRYDEHHQDLTLLKALVRQQLPEKYKEIFFDQSKNGYAGYIDGGASQEEFYKFIKPILEKMDGTEELLVKLNREDLLRKQRTFDNGSIPHQIHLGELHAILRRQEDFYPFLKDNREKIEKILTFRIPYYVGPLARGNSRFAWMTRKSEETITPWNFEEVVDKGASAQSFIERMTNFDKNLPNEKVLPKHSLLYEYFTVYNELTKVKYVTEGMRKPAFLSGEQKKAIVDLLFKTNRKVTVKQLKEDYFKKIECFDSVEISGVEDRFNASLGTYHDLLKIIKDKDFLDNEENEDILEDIVLTLTLFEDREMIEERLKTYAHLFDDKVMKQLKRRRYTGWGRLSRKLINGIRDKQSGKTILDFLKSDGFANRNFMQLIHDDSLTFKEDIQKAQVSGQGDSLHEHIANLAGSPAIKKGILQTVKVVDELVKVMGRHKPENIVIEMARENQTTQKGQKNSRERMKRIEEGIKELGSQILKEHPVENTQLQNEKLYLYYLQNGRDMYVDQELDINRLSDYDVDHIVPQSFLKDDSIDNKVLTRSDKARGKSDNVPSEEVVKKMKNYWRQLLNAKLITQRKFDNLTKAERGGLSELDKAGFIKRQLVETRQITKHVAQILDSRMNTKYDENDKLIREVKVITLKSKLVSDFRKDFQFYKVREINNYHHAHDAYLNAVVGTALIKKYPKLESEFVYGDYKVYDVRKMIAKSEQEIGKATAKYFFYSNIMNFFKTEITLANGEIRKRPLIETNGETGEIVWDKGRDFATVRKVLSMPQVNIVKKTEVQTGGFSKESILPKRNSDKLIARKKDWDPKKYGGFDSPTVAYSVLVVAKVEKGKSKKLKSVKELLGITIMERSSFEKNPIDFLEAKGYKEVKKDLIIKLPKYSLFELENGRKRMLASAGELQKGNELALPSKYVNFLYLASHYEKLKGSPEDNEQKQLFVEQHKHYLDEIIEQISEFSKRVILADANLDKVLSAYNKHRDKPIREQAENIIHLFTLTNLGAPAAFKYFDTTIDRKRYTSTKEVLDATLIHQSITGLYETRIDLSQLGGDGGGGSGGGGSSGGTLQLEEEYRLFEPESTQKQEMDIWLKNFPQAWAETGGMGTAHCQAPVLIQLKATATPISIRQYPMPHEAYQGIKPHIRRMLDQGILKPCQSPWNTPLLPVKKPGTEDYRPVQDLREVNKRVEDIHPTVPNPYNLLSTLPPSHPWYTVLDLKDAFFCLRLHSESQLLFAFEWRDPEIGLSGQLTWTRLPQGFKNSPTLFNEALHSDLADFRVRYPALVLLQYVDDLLLAAATRTECLEGTKALLETLGNKGYRASAKKAQICLQEVTYLGYSLKDGQRWLTKARKEAILSIPVPKNSRQVREFLGTAGYCRLWIPGFAELAAPLYPLTRPGTLFQWGTEQQLAFEDIKKALLSSPALGLPDITKPFELFIDENSGFAKGVLVQKLGPWKRPVAYLSKKLDTVASGWPPCLRMVAAIAILVKDAGKLTLGQPLTILTSHPVEALVRQPPNKWLSNARMTHYQAMLLDAERVHFGPTVSLNPATLLPLPSGGNHHDCLQILAETHGTRPDLTDQPLPDADLTWYTDGSSFIRNGEREAGAAVTTESEVIWAAPLPPGTSAQRAELIALTQALKMAEGKKLTVYTDSRYAFATTHVHGEIYRRRGWLTSEGKEIKNKNEILALLEALFLPKRLSIIHCPGHQKGDSPQAKGNRLADDTAKKAATETHSSLTVLPAGKRTADGSEFEKRTADGSEFESPKKKAKVE

SEQ ID NO: 6803 - protein, 2125 aa, synthetic construct
MPAAKRVKLDGGDKKYSIGLDIGTNSVGWAVITDEYKVPSKKFKVLGNTDRHSIKKNLIGALLFDSGETAEATRLKRTARRRYTRRKNRICYLQEIFSNEMAKVDDSFFHRLEESFLVEEDKKHERHPIFGNIVDEVAYHEKYPTIYHLRKKLVDSTDKADLRLIYLALAHMIKFRGHFLIEGDLNPDNSDVDKLFIQLVQTYNQLFEENPINASGVDAKAILSARLSKSRRLENLIAQLPGEKKNGLFGNLIALSLGLTPNFKSNFDLAEDAKLQLSKDTYDDDLDNLLAQIGDQYADLFLAAKNLSDAILLSDILRVNTEITKAPLSASMIKRYDEHHQDLTLLKALVRQQLPEKYKEIFFDQSKNGYAGYIDGGASQEEFYKFIKPILEKMDGTEELLVKLNREDLLRKQRTFDNGSIPHQIHLGELHAILRRQEDFYPFLKDNREKIEKILTFRIPYYVGPLARGNSRFAWMTRKSEETITPWNFEEVVDKGASAQSFIERMTNFDKNLPNEKVLPKHSLLYEYFTVYNELTKVKYVTEGMRKPAFLSGEQKKAIVDLLFKTNRKVTVKQLKEDYFKKIECFDSVEISGVEDRFNASLGTYHDLLKIIKDKDFLDNEENEDILEDIVLTLTLFEDREMIEERLKTYAHLFDDKVMKQLKRRRYTGWGRLSRKLINGIRDKQSGKTILDFLKSDGFANRNFMQLIHDDSLTFKEDIQKAQVSGQGDSLHEHIANLAGSPAIKKGILQTVKVVDELVKVMGRHKPENIVIEMARENQTTQKGQKNSRERMKRIEEGIKELGSQILKEHPVENTQLQNEKLYLYYLQNGRDMYVDQELDINRLSDYDVDHIVPQSFLKDDSIDNKVLTRSDKARGKSDNVPSEEVVKKMKNYWRQLLNAKLITQRKFDNLTKAERGGLSELDKAGFIKRQLVETRQITKHVAQILDSRMNTKYDENDKLIREVKVITLKSKLVSDFRKDFQFYKVREINNYHHAHDAYLNAVVGTALIKKYPKLESEFVYGDYKVYDVRKMIAKSEQEIGKATAKYFFYSNIMNFFKTEITLANGEIRKRPLIETNGETGEIVWDKGRDFATVRKVLSMPQVNIVKKTEVQTGGFSKESILPKRNSDKLIARKKDWDPKKYGGFDSPTVAYSVLVVAKVEKGKSKKLKSVKELLGITIMERSSFEKNPIDFLEAKGYKEVKKDLIIKLPKYSLFELENGRKRMLASAGELQKGNELALPSKYVNFLYLASHYEKLKGSPEDNEQKQLFVEQHKHYLDEIIEQISEFSKRVILADANLDKVLSAYNKHRDKPIREQAENIIHLFTLTNLGAPAAFKYFDTTIDRKRYTSTKEVLDATLIHQSITGLYETRIDLSQLGGDGGGGSGGGGSSGGLLGRDLLTKLKAQIQFSTEGPQVTWEDRPAMCLVLNLEEEYRLHEKPVPPSIDPSWLQLFPMVWAEKAGMGLANQVPPVVVELKSDASPVAVRQYPMSKEAREGIRPHIQRFLDLGILVPCQSPWNTPLLPVKKPGTNDYRPVQDLREVNKRVQDIHPTVPNPYNLLSSLPPSHTWYSVLDLKDAFFCLKLHPNSQPLFAFEWRDPEKGNTGQLTWTRLPQGFKNSPTLFNEALHRDLASFRALNPQVVMLQYVDDLLVAAPTYRDCKEGTRRLLQELSKLGYRVSAKKAQLCREEVTYLGYLLKGGKRWLTPARKATVMKIPTPTTPRQVREFLGTAGFCRLWIPGFASLAAPLYPLTRPKVPFTWTEAHQEAFGRIKEALLSAPALALPDLTKPFALYVDEKEGVARGVLTQTLGPWRRPVAYLSKKLDPVASGWPTCLKAIAAVALLLKDADKLTLGQNVLVIAPHNLESIVRQPPDRWMTNARMTHYQSLLLNERVSFAPPAILNPATLLPVESDDTPIHICSEILAEETGTRPDLRDQPLPGVPAWYTDGSSFIMDGRRQAGAAIVDNKRTVWASNLPEGTSAQKAELIALTQALRLAEGKSINIYTDSRYAFATAHVHGAIYKQRGWLTSAGKDIKNKEEILALLEAIHLPKRVAIIHCPGHQRGTDPVATGNRKADEAAKQAAQSTRILTETTKNAGKRTADGSEFEKRTADGSEFESPKKKAKVE

SEQ ID NO: 6804 - protein, 2125 aa, synthetic construct
MPAAKRVKLDGGDKKYSIGLDIGTNSVGWAVITDEYKVPSKKFKVLGNTDRHSIKKNLIGALLFDSGETAEATRLKRTARRRYTRRKNRICYLQEIFSNEMAKVDDSFFHRLEESFLVEEDKKHERHPIFGNIVDEVAYHEKYPTIYHLRKKLVDSTDKADLRLIYLALAHMIKFRGHFLIEGDLNPDNSDVDKLFIQLVQTYNQLFEENPINASGVDAKAILSARLSKSRRLENLIAQLPGEKKNGLFGNLIALSLGLTPNFKSNFDLAEDAKLQLSKDTYDDDLDNLLAQIGDQYADLFLAAKNLSDAILLSDILRVNTEITKAPLSASMIKRYDEHHQDLTLLKALVRQQLPEKYKEIFFDQSKNGYAGYIDGGASQEEFYKFIKPILEKMDGTEELLVKLNREDLLRKQRTFDNGSIPHQIHLGELHAILRRQEDFYPFLKDNREKIEKILTFRIPYYVGPLARGNSRFAWMTRKSEETITPWNFEEVVDKGASAQSFIERMTNFDKNLPNEKVLPKHSLLYEYFTVYNELTKVKYVTEGMRKPAFLSGEQKKAIVDLLFKTNRKVTVKQLKEDYFKKIECFDSVEISGVEDRFNASLGTYHDLLKIIKDKDFLDNEENEDILEDIVLTLTLFEDREMIEERLKTYAHLFDDKVMKQLKRRRYTGWGRLSRKLINGIRDKQSGKTILDFLKSDGFANRNFMQLIHDDSLTFKEDIQKAQVSGQGDSLHEHIANLAGSPAIKKGILQTVKVVDELVKVMGRHKPENIVIEMARENQTTQKGQKNSRERMKRIEEGIKELGSQILKEHPVENTQLQNEKLYLYYLQNGRDMYVDQELDINRLSDYDVDHIVPQSFLKDDSIDNKVLTRSDKARGKSDNVPSEEVVKKMKNYWRQLLNAKLITQRKFDNLTKAERGGLSELDKAGFIKRQLVETRQITKHVAQILDSRMNTKYDENDKLIREVKVITLKSKLVSDFRKDFQFYKVREINNYHHAHDAYLNAVVGTALIKKYPKLESEFVYGDYKVYDVRKMIAKSEQEIGKATAKYFFYSNIMNFFKTEITLANGEIRKRPLIETNGETGEIVWDKGRDFATVRKVLSMPQVNIVKKTEVQTGGFSKESILPKRNSDKLIARKKDWDPKKYGGFDSPTVAYSVLVVAKVEKGKSKKLKSVKELLGITIMERSSFEKNPIDFLEAKGYKEVKKDLIIKLPKYSLFELENGRKRMLASAGELQKGNELALPSKYVNFLYLASHYEKLKGSPEDNEQKQLFVEQHKHYLDEIIEQISEFSKRVILADANLDKVLSAYNKHRDKPIREQAENIIHLFTLTNLGAPAAFKYFDTTIDRKRYTSTKEVLDATLIHQSITGLYETRIDLSQLGGDGGGGSGGGGSSGGLLGRDLLTKLKAQIQFSTEGPQVTWEDRPAMCLVLNLEEEYRLHEKPVPPSIDPSWLQLFPMVWAEKAGMGLANQVPPVVVELKSDASPVAVRQYPMSKEAREGIRPHIQRFLDLGILVPCQSPWNTPLLPVKKPGTNDYRPVQDLREVNKRVQDIHPTVPNPYNLLSSLPPSHTWYSVLDLKDAFFCLKLHPNSQPLFAFEWRDPEKGNTGQLTWTRLPQGFKNSPTLFNEALHRDLASFRALNPQVVMLQYVDDLLVAAPTYRDCKEGTRRLLQELSKLGYRVSAKKAQLCREEVTYLGYLLKGGKRWLTPARKATVMKIPTPTTPRQVREFLGKAGFCRLFIPGFASLAAPLYPLTRPKVPFTWTEAHQEAFGRIKEALLSAPALALPDLTKPFALYVDEKEGVARGVLTQTLGPWRRPVAYLSKKLDPVASGWPTCLKAIAAVALLLKDADKLTLGQNVLVIAPHNLESIVRQPPDRWMTNARMTHYQSLLLNERVSFAPPAILNPATLLPVESDDTPIHICSEILAEETGTRPDLRDQPLPGVPAWYTDGSSFIMDGRRQAGAAIVDNKRTVWASNLPEGTSAQKAELIALTQALRLAEGKSINIYTDSRYAFATAHVHGAIYKQRGWLTSAGKDIKNKEEILALLEAIHLPKRVAIIHCPGHQRGTDPVATGNRKADEAAKQAAQSTRILTETTKNAGKRTADGSEFEKRTADGSEFESPKKKAKVE

SEQ ID NO: 6805 - protein, 2094 aa, synthetic construct
MPAAKRVKLDGGDKKYSIGLDIGTNSVGWAVITDEYKVPSKKFKVLGNTDRHSIKKNLIGALLFDSGETAEATRLKRTARRRYTRRKNRICYLQEIFSNEMAKVDDSFFHRLEESFLVEEDKKHERHPIFGNIVDEVAYHEKYPTIYHLRKKLVDSTDKADLRLIYLALAHMIKFRGHFLIEGDLNPDNSDVDKLFIQLVQTYNQLFEENPINASGVDAKAILSARLSKSRRLENLIAQLPGEKKNGLFGNLIALSLGLTPNFKSNFDLAEDAKLQLSKDTYDDDLDNLLAQIGDQYADLFLAAKNLSDAILLSDILRVNTEITKAPLSASMIKRYDEHHQDLTLLKALVRQQLPEKYKEIFFDQSKNGYAGYIDGGASQEEFYKFIKPILEKMDGTEELLVKLNREDLLRKQRTFDNGSIPHQIHLGELHAILRRQEDFYPFLKDNREKIEKILTFRIPYYVGPLARGNSRFAWMTRKSEETITPWNFEEVVDKGASAQSFIERMTNFDKNLPNEKVLPKHSLLYEYFTVYNELTKVKYVTEGMRKPAFLSGEQKKAIVDLLFKTNRKVTVKQLKEDYFKKIECFDSVEISGVEDRFNASLGTYHDLLKIIKDKDFLDNEENEDILEDIVLTLTLFEDREMIEERLKTYAHLFDDKVMKQLKRRRYTGWGRLSRKLINGIRDKQSGKTILDFLKSDGFANRNFMQLIHDDSLTFKEDIQKAQVSGQGDSLHEHIANLAGSPAIKKGILQTVKVVDELVKVMGRHKPENIVIEMARENQTTQKGQKNSRERMKRIEEGIKELGSQILKEHPVENTQLQNEKLYLYYLQNGRDMYVDQELDINRLSDYDVDHIVPQSFLKDDSIDNKVLTRSDKARGKSDNVPSEEVVKKMKNYWRQLLNAKLITQRKFDNLTKAERGGLSELDKAGFIKRQLVETRQITKHVAQILDSRMNTKYDENDKLIREVKVITLKSKLVSDFRKDFQFYKVREINNYHHAHDAYLNAVVGTALIKKYPKLESEFVYGDYKVYDVRKMIAKSEQEIGKATAKYFFYSNIMNFFKTEITLANGEIRKRPLIETNGETGEIVWDKGRDFATVRKVLSMPQVNIVKKTEVQTGGFSKESILPKRNSDKLIARKKDWDPKKYGGFDSPTVAYSVLVVAKVEKGKSKKLKSVKELLGITIMERSSFEKNPIDFLEAKGYKEVKKDLIIKLPKYSLFELENGRKRMLASAGELQKGNELALPSKYVNFLYLASHYEKLKGSPEDNEQKQLFVEQHKHYLDEIIEQISEFSKRVILADANLDKVLSAYNKHRDKPIREQAENIIHLFTLTNLGAPAAFKYFDTTIDRKRYTSTKEVLDATLIHQSITGLYETRIDLSQLGGDGGGGSGGGGSSGGTLNLEDEYRLYETSAEPEVSPGSTWLSDFPQAWAETGGMGLAVRQAPLIIPLKATSTPVSIKQYPMSQEAKLGIKPHIQRLLDQGILVPCQSPWNTPLLPVKKPGTNDYRPVQDLREVNKRVEDIHPTVPNPYNLLSGLPPSHRWYTVLDLKDAFFCLRLHPTSQPLFAFEWRDPGMGISGQLTWTRLPQGFKNSPTLFNEALHRDLADFRIQHPDLILLQYVDDILLAATSELDCQQGTRALLLTLGNLGYRASAKKAQLCQKQVKYLGYLLKEGQRWLTEARKETVMGQPTPKTPRQLREFLGKAGFCRLFIPGFAEMAAPLYPLTKPGTLFNWGPDQQKAYQEIKQALLTAPALGLPDLTKPFELFVDEKQGYAKGVLTQKLGPWRRPVAYLSKKLDPVAAGWPPCLRMVAAIAVLRKDAGKLTMGQPLVILAPHAVEALVKQPPDRWLSNARMTHYQAMLLDTDRVQFGPVVALNPATLLPLPEEGAPHDCLEILAETHGTRPDLTDQPIPDADHTWYTDGSSFLQEGQRKAGAAVTTETEVIWARALPAGTSAQRAELIALTQALKMAEGKRLNVYTDSRYAFATAHIHGEIYRRRGWLTSEGREIKNKSEILALLKALFLPKRLSIIHCLGHQKGDSAEARGNRLADQAAREAAIKTPPDTSTLLAGKRTADGSEFEKRTADGSEFESPKKKAKVE

SEQ ID NO: 6806 - protein, 2094 aa, synthetic construct
MPAAKRVKLDGGDKKYSIGLDIGTNSVGWAVITDEYKVPSKKFKVLGNTDRHSIKKNLIGALLFDSGETAEATRLKRTARRRYTRRKNRICYLQEIFSNEMAKVDDSFFHRLEESFLVEEDKKHERHPIFGNIVDEVAYHEKYPTIYHLRKKLVDSTDKADLRLIYLALAHMIKFRGHFLIEGDLNPDNSDVDKLFIQLVQTYNQLFEENPINASGVDAKAILSARLSKSRRLENLIAQLPGEKKNGLFGNLIALSLGLTPNFKSNFDLAEDAKLQLSKDTYDDDLDNLLAQIGDQYADLFLAAKNLSDAILLSDILRVNTEITKAPLSASMIKRYDEHHQDLTLLKALVRQQLPEKYKEIFFDQSKNGYAGYIDGGASQEEFYKFIKPILEKMDGTEELLVKLNREDLLRKQRTFDNGSIPHQIHLGELHAILRRQEDFYPFLKDNREKIEKILTFRIPYYVGPLARGNSRFAWMTRKSEETITPWNFEEVVDKGASAQSFIERMTNFDKNLPNEKVLPKHSLLYEYFTVYNELTKVKYVTEGMRKPAFLSGEQKKAIVDLLFKTNRKVTVKQLKEDYFKKIECFDSVEISGVEDRFNASLGTYHDLLKIIKDKDFLDNEENEDILEDIVLTLTLFEDREMIEERLKTYAHLFDDKVMKQLKRRRYTGWGRLSRKLINGIRDKQSGKTILDFLKSDGFANRNFMQLIHDDSLTFKEDIQKAQVSGQGDSLHEHIANLAGSPAIKKGILQTVKVVDELVKVMGRHKPENIVIEMARENQTTQKGQKNSRERMKRIEEGIKELGSQILKEHPVENTQLQNEKLYLYYLQNGRDMYVDQELDINRLSDYDVDHIVPQSFLKDDSIDNKVLTRSDKARGKSDNVPSEEVVKKMKNYWRQLLNAKLITQRKFDNLTKAERGGLSELDKAGFIKRQLVETRQITKHVAQILDSRMNTKYDENDKLIREVKVITLKSKLVSDFRKDFQFYKVREINNYHHAHDAYLNAVVGTALIKKYPKLESEFVYGDYKVYDVRKMIAKSEQEIGKATAKYFFYSNIMNFFKTEITLANGEIRKRPLIETNGETGEIVWDKGRDFATVRKVLSMPQVNIVKKTEVQTGGFSKESILPKRNSDKLIARKKDWDPKKYGGFDSPTVAYSVLVVAKVEKGKSKKLKSVKELLGITIMERSSFEKNPIDFLEAKGYKEVKKDLIIKLPKYSLFELENGRKRMLASAGELQKGNELALPSKYVNFLYLASHYEKLKGSPEDNEQKQLFVEQHKHYLDEIIEQISEFSKRVILADANLDKVLSAYNKHRDKPIREQAENIIHLFTLTNLGAPAAFKYFDTTIDRKRYTSTKEVLDATLIHQSITGLYETRIDLSQLGGDGGGGSGGGGSSGGTLGIEDEYRLHETSTEPDVSLGSTWLSDFPQAWAETGGMGLAVRQAPLIIPLKATSTPVSIQQYPMSHEARLGIKPHIQRLLDQGILVPCQSPWNTPLLPVKKPGTNDYRPVQDLREVNKRVEDIHPTVPNPYNLLSGLPPSHQWYTVLDLKDAFFCLRLHPTSQPLFAFEWRDPGMGISGQLTWTRLPQGFKNSPTLFNEALHRDLADFRIQHPDLILLQYVDDILLAATSELDCQQGTRALLQTLGDLGYRASAKKAQICQKQVKYLGYLLREGQRWLTEARKETVMGQPVPKTPRQLREFLGTAGFCRLWIPGFAEMAAPLYPLTKPGTLFSWGPDQQKAYQEIKQALLTAPALGLPDLTKPFELFVDEKQGYAKGVLTQKLGPWRRPVAYLSKKLDPVAAGWPPCLRMVAAIAVLTKDAGKLTMGQPLVILAPHAVEALVKQPPDRWLSNARMTHYQAMLLDTDRVQFGPVVALNPATLLPLPEEGAPHDCLEILAETHGTRPDLTDQPIPDADHTWYTDGSSFLQEGQRKAGAAVTTETEVIWAGALPAGTSAQRAELIALTQALKMAEGKRLNVYTDSRYAFATAHIHGEIYRRRGWLTSEGREIKNKSEILALLKALFLPKRLSIIHCLGHQKGDSAEARGNRLADQAAREAAIKTPPDTSTLLAGKRTADGSEFEKRTADGSEFESPKKKAKVE

SEQ ID NO: 6807 - protein, 2094 aa, synthetic construct; identical to SEQ ID NO: 6806

SEQ ID NO: 6808 - protein, 2094 aa, synthetic construct
MPAAKRVKLDGGDKKYSIGLDIGTNSVGWAVITDEYKVPSKKFKVLGNTDRHSIKKNLIGALLFDSGETAEATRLKRTARRRYTRRKNRICYLQEIFSNEMAKVDDSFFHRLEESFLVEEDKKHERHPIFGNIVDEVAYHEKYPTIYHLRKKLVDSTDKADLRLIYLALAHMIKFRGHFLIEGDLNPDNSDVDKLFIQLVQTYNQLFEENPINASGVDAKAILSARLSKSRRLENLIAQLPGEKKNGLFGNLIALSLGLTPNFKSNFDLAEDAKLQLSKDTYDDDLDNLLAQIGDQYADLFLAAKNLSDAILLSDILRVNTEITKAPLSASMIKRYDEHHQDLTLLKALVRQQLPEKYKEIFFDQSKNGYAGYIDGGASQEEFYKFIKPILEKMDGTEELLVKLNREDLLRKQRTFDNGSIPHQIHLGELHAILRRQEDFYPFLKDNREKIEKILTFRIPYYVGPLARGNSRFAWMTRKSEETITPWNFEEVVDKGASAQSFIERMTNFDKNLPNEKVLPKHSLLYEYFTVYNELTKVKYVTEGMRKPAFLSGEQKKAIVDLLFKTNRKVTVKQLKEDYFKKIECFDSVEISGVEDRFNASLGTYHDLLKIIKDKDFLDNEENEDILEDIVLTLTLFEDREMIEERLKTYAHLFDDKVMKQLKRRRYTGWGRLSRKLINGIRDKQSGKTILDFLKSDGFANRNFMQLIHDDSLTFKEDIQKAQVSGQGDSLHEHIANLAGSPAIKKGILQTVKVVDELVKVMGRHKPENIVIEMARENQTTQKGQKNSRERMKRIEEGIKELGSQILKEHPVENTQLQNEKLYLYYLQNGRDMYVDQELDINRLSDYDVDHIVPQSFLKDDSIDNKVLTRSDKARGKSDNVPSEEVVKKMKNYWRQLLNAKLITQRKFDNLTKAERGGLSELDKAGFIKRQLVETRQITKHVAQILDSRMNTKYDENDKLIREVKVITLKSKLVSDFRKDFQFYKVREINNYHHAHDAYLNAVVGTALIKKYPKLESEFVYGDYKVYDVRKMIAKSEQEIGKATAKYFFYSNIMNFFKTEITLANGEIRKRPLIETNGETGEIVWDKGRDFATVRKVLSMPQVNIVKKTEVQTGGFSKESILPKRNSDKLIARKKDWDPKKYGGFDSPTVAYSVLVVAKVEKGKSKKLKSVKELLGITIMERSSFEKNPIDFLEAKGYKEVKKDLIIKLPKYSLFELENGRKRMLASAGELQKGNELALPSKYVNFLYLASHYEKLKGSPEDNEQKQLFVEQHKHYLDEIIEQISEFSKRVILADANLDKVLSAYNKHRDKPIREQAENIIHLFTLTNLGAPAAFKYFDTTIDRKRYTSTKEVLDATLIHQSITGLYETRIDLSQLGGDGGGGSGGGGSSGGTLNIEDEYRLHETSKEPDVSLGSTWLSDFPQAWAETGGMGLAVRQAPLIIPLKATSTPVSIKQYPMSQEARLGIKPHIQRLLDQGILVPCQSPWNTPLLPVKKPGTNDYRPVQDLREVNKRVEDIHPTVPNPYNLLSGLPPSHQWYTVLDLKDAFFCLRLHPTSQPLFAFEWRDPEMGISGQLTWTRLPQGFKNSPTLFNEALHRDLAGFRIQHPDLILLQYVDDLLLAATSELDCQQGTRALLQTLGDLGYRASAKKAQICQKQVKYLGYLLKEGQRWLTEARKETVMGQPIPKTPRQLREFLGTAGFCRLWIPGFAEMAAPLYPLTKPGTLFNWGPDQQKAFQEIKQALLTAPALGLPDLTKPFELFVDEKQGYAKGVLTQKLGPWRRPVAYLSKKLDPVAAGWPPCLRMVAAIAVLTKDAGKLTMGQPLVILAPHAVEALVKQPPDRWLSNARMTHYQALLLDTDRVQFGPVVALNPATLLPLPEEGLQHDCLDILAEAHGTRSDLMDQPLPDADHTWYTDGSSFLQEGQRKAGAAVTTETEVIWARALPAGTSAQRAELIALTQALKMAEGKKLNVYTDSRYAFATAHIHGEIYRRRGWLTSEGKEIKNKDEILALLKALFLPKRLSIIHCPGHQKGNSAEARGNRMADQAAREVATRETPETSTLLAGKRTADGSEFEKRTADGSEFESPKKKAKVE

SEQ ID NO: 6809 - protein, 2094 aa, synthetic construct
MPAAKRVKLDGGDKKYSIGLDIGTNSVGWAVITDEYKVPSKKFKVLGNTDRHSIKKNLIGALLFDSGETAEATRLKRTARRRYTRRKNRICYLQEIFSNEMAKVDDSFFHRLEESFLVEEDKKHERHPIFGNIVDEVAYHEKYPTIYHLRKKLVDSTDKADLRLIYLALAHMIKFRGHFLIEGDLNPDNSDVDKLFIQLVQTYNQLFEENPINASGVDAKAILSARLSKSRRLENLIAQLPGEKKNGLFGNLIALSLGLTPNFKSNFDLAEDAKLQLSKDTYDDDLDNLLAQIGDQYADLFLAAKNLSDAILLSDILRVNTEITKAPLSASMIKRYDEHHQDLTLLKALVRQQLPEKYKEIFFDQSKNGYAGYIDGGASQEEFYKFIKPILEKMDGTEELLVKLNREDLLRKQRTFDNGSIPHQIHLGELHAILRRQEDFYPFLKDNREKIEKILTFRIPYYVGPLARGNSRFAWMTRKSEETITPWNFEEVVDKGASAQSFIERMTNFDKNLPNEKVLPKHSLLYEYFTVYNELTKVKYVTEGMRKPAFLSGEQKKAIVDLLFKTNRKVTVKQLKEDYFKKIECFDSVEISGVEDRFNASLGTYHDLLKIIKDKDFLDNEENEDILEDIVLTLTLFEDREMIEERLKTYAHLFDDKVMKQLKRRRYTGWGRLSRKLINGIRDKQSGKTILDFLKSDGFANRNFMQLIHDDSLTFKEDIQKAQVSGQGDSLHEHIANLAGSPAIKKGILQTVKVVDELVKVMGRHKPENIVIEMARENQTTQKGQKNSRERMKRIEEGIKELGSQILKEHPVENTQLQNEKLYLYYLQNGRDMYVDQELDINRLSDYDVDHIVPQSFLKDDSIDNKVLTRSDKARGKSDNVPSEEVVKKMKNYWRQLLNAKLITQRKFDNLTKAERGGLSELDKAGFIKRQLVETRQITKHVAQILDSRMNTKYDENDKLIREVKVITLKSKLVSDFRKDFQFYKVREINNYHHAHDAYLNAVVGTALIKKYPKLESEFVYGDYKVYDVRKMIAKSEQEIGKATAKYFFYSNIMNFFKTEITLANGEIRKRPLIETNGETGEIVWDKGRDFATVRKVLSMPQVNIVKKTEVQTGGFSKESILPKRNSDKLIARKKDWDPKKYGGFDSPTVAYSVLVVAKVEKGKSKKLKSVKELLGITIMERSSFEKNPIDFLEAKGYKEVKKDLIIKLPKYSLFELENGRKRMLASAGELQKGNELALPSKYVNFLYLASHYEKLKGSPEDNEQKQLFVEQHKHYLDEIIEQISEFSKRVILADANLDKVLSAYNKHRDKPIREQAENIIHLFTLTNLGAPAAFKYFDTTIDRKRYTSTKEVLDATLIHQSITGLYETRIDLSQLGGDGGGGSGGGGSSGGTLNIEDEHRLHETSKEPDVSLGSTWLSDFPQAWAETGGMGLAVRQAPLIIPLKATSTPVSIKQYPMSQEARLGIKPHIQRLLDQGILVPCQSPWNTPLLPVKKPGTNDYRPVQDLREVNKRVEDIHPTVPNPYNLLSGLPPSHQWYTVLDLKDAFFCLRLHPTSQPLFAFEWRDPEMGISGQLTWTRLPQGFKNSPTLFNEALHRDLADFRIQHPDLILLQYVDDLLLAATSELDCQQGTRALLQTLGNLGYRASAKKAQICQKQVKYLGYLLKEGQRWLTEARKETVMGQPTPKTPRQLREFLGTAGFCRLWIPGFAEMAAPLYPLTKPGTLFNWGPDQQKAYQEIKQALLTAPALGLPDLTKPFELFVDEKQGYAKGVLTQKLGPWRRPVAYLSKKLDPVAAGWPPCLRMVAAIAVLTKDAGKLTMGQPLVILAPHAVEALVKQPPDRWLSNARMTHYQALLLDTDRVQFGPVVALNPATLLPLPEEGLQHNCLDILAEAHGTRPDLTDQPLPDADHTWYTDGSSLLQEGQRKAGAAVTTETEVIWAKALPAGTSAQRAELIALTQALKMAEGKKLNVYTDSRYAFATAHIHGEIYRRRGWLTSEGKEIKNKDEILALLKALFLPKRLSIIHCPGHQKGHSAEARGNRMADQAARKAAITETPDTSTLLAGKRTADGSEFEKRTADGSEFESPKKKAKVE

SEQ ID NO: 6810 - protein, 2088 aa, synthetic construct
MPAAKRVKLDGGDKKYSIGLDIGTNSVGWAVITDEYKVPSKKFKVLGNTDRHSIKKNLIGALLFDSGETAEATRLKRTARRRYTRRKNRICYLQEIFSNEMAKVDDSFFHRLEESFLVEEDKKHERHPIFGNIVDEVAYHEKYPTIYHLRKKLVDSTDKADLRLIYLALAHMIKFRGHFLIEGDLNPDNSDVDKLFIQLVQTYNQLFEENPINASGVDAKAILSARLSKSRRLENLIAQLPGEKKNGLFGNLIALSLGLTPNFKSNFDLAEDAKLQLSKDTYDDDLDNLLAQIGDQYADLFLAAKNLSDAILLSDILRVNTEITKAPLSASMIKRYDEHHQDLTLLKALVRQQLPEKYKEIFFDQSKNGYAGYIDGGASQEEFYKFIKPILEKMDGTEELLVKLNREDLLRKQRTFDNGSIPHQIHLGELHAILRRQEDFYPFLKDNREKIEKILTFRIPYYVGPLARGNSRFAWMTRKSEETITPWNFEEVVDKGASAQSFIERMTNFDKNLPNEKVLPKHSLLYEYFTVYNELTKVKYVTEGMRKPAFLSGEQKKAIVDLLFKTNRKVTVKQLKEDYFKKIECFDSVEISGVEDRFNASLGTYHDLLKIIKDKDFLDNEENEDILEDIVLTLTLFEDREMIEERLKTYAHLFDDKVMKQLKRRRYTGWGRLSRKLINGIRDKQSGKTILDFLKSDGFANRNFMQLIHDDSLTFKEDIQKAQVSGQGDSLHEHIANLAGSPAIKKGILQTVKVVDELVKVMGRHKPENIVIEMARENQTTQKGQKNSRERMKRIEEGIKELGSQILKEHPVENTQLQNEKLYLYYLQNGRDMYVDQELDINRLSDYDVDHIVPQSFLKDDSIDNKVLTRSDKARGKSDNVPSEEVVKKMKNYWRQLLNAKLITQRKFDNLTKAERGGLSELDKAGFIKRQLVETRQITKHVAQILDSRMNTKYDENDKLIREVKVITLKSKLVSDFRKDFQFYKVREINNYHHAHDAYLNAVVGTALIKKYPKLESEFVYGDYKVYDVRKMIAKSEQEIGKATAKYFFYSNIMNFFKTEITLANGEIRKRPLIETNGETGEIVWDKGRDFATVRKVLSMPQVNIVKKTEVQTGGFSKESILPKRNSDKLIARKKDWDPKKYGGFDSPTVAYSVLVVAKVEKGKSKKLKSVKELLGITIMERSSFEKNPIDFLEAKGYKEVKKDLIIKLPKYSLFELENGRKRMLASAGELQKGNELALPSKYVNFLYLASHYEKLKGSPEDNEQKQLFVEQHKHYLDEIIEQISEFSKRVILADANLDKVLSAYNKHRDKPIREQAENIIHLFTLTNLGAPAAFKYFDTTIDRKRYTSTKEVLDATLIHQSITGLYETRIDLSQLGGDGGGGSGGGGSSGGTLQLDDEYRLYSPLVKPDQNIQFWLEQFPQAWAETAGMGLAKQVPPQVIQLKASATPVSVRQYPLSKEAQEGIRPHVQRLIQQGILVPVQSPWNTPLLPVRKPGTNDYRPVQDLREVNKRVQDIHPTVPNPYNLLCALPPQRSWYTVLDLKDAFFCLRLHPTSQPLFAFEWRDPGTGRTGQLTWTRLPQGFKNSPTIFDEALHRDLANFRIQHPQVTLLQYVDDLLLAGATKQDCLEGTKALLLELSDLGYRASAKKAQICRREVTYLGYSLRDGQRWLTEARKKTVVQIPAPTTAKQVREFLGTAGFCRLWIPGFATLAAPLYPLTKEKGEFSWAPEHQKAFDAIKKALLSAPALALPDVTKPFTLYVDERKGVARGVLTQTLGPWRRPVAYLSKKLDPVASGWPVCLKAIAAVAILVKDADKLTLGQNITVIAPHALENIVRQPPDRWMTNARMTHYQSLLLTERVTFAPPAALNPATLLPEETDEPVTHDCHQLLIEETGVRKDLTDIPLTGEVLTWFTDGSSYVVEGKRMAGAAVVDGTRTIWASSLPEGTSAQKAELMALTQALRLAEGKSINIYTDSRYAFATAHVHGAIYKQRGLLTSAGREIKNKEEILSLLEALHLPKRLAIIHCPGHQKAKDPISRGNQMADRVAKQAAQGVNLLAGKRTADGSEFEKRTADGSEFESPKKKAKVE

SEQ ID NO: 6811 - protein, 2088 aa, synthetic construct; identical to SEQ ID NO: 6810

SEQ ID NO: 6812 - protein, 2174 aa, synthetic construct
MPAAKRVKLDGGDKKYSIGLDIGTNSVGWAVITDEYKVPSKKFKVLGNTDRHSIKKNLIGALLFDSGETAEATRLKRTARRRYTRRKNRICYLQEIFSNEMAKVDDSFFHRLEESFLVEEDKKHERHPIFGNIVDEVAYHEKYPTIYHLRKKLVDSTDKADLRLIYLALAHMIKFRGHFLIEGDLNPDNSDVDKLFIQLVQTYNQLFEENPINASGVDAKAILSARLSKSRRLENLIAQLPGEKKNGLFGNLIALSLGLTPNFKSNFDLAEDAKLQLSKDTYDDDLDNLLAQIGDQYADLFLAAKNLSDAILLSDILRVNTEITKAPLSASMIKRYDEHHQDLTLLKALVRQQLPEKYKEIFFDQSKNGYAGYIDGGASQEEFYKFIKPILEKMDGTEELLVKLNREDLLRKQRTFDNGSIPHQIHLGELHAILRRQEDFYPFLKDNREKIEKILTFRIPYYVGPLARGNSRFAWMTRKSEETITPWNFEEVVDKGASAQSFIERMTNFDKNLPNEKVLPKHSLLYEYFTVYNELTKVKYVTEGMRKPAFLSGEQKKAIVDLLFKTNRKVTVKQLKEDYFKKIECFDSVEISGVEDRFNASLGTYHDLLKIIKDKDFLDNEENEDILEDIVLTLTLFEDREMIEERLKTYAHLFDDKVMKQLKRRRYTGWGRLSRKLINGIRDKQSGKTILDFLKSDGFANRNFMQLIHDDSLTFKEDIQKAQVSGQGDSLHEHIANLAGSPAIKKGILQTVKVVDELVKVMGRHKPENIVIEMARENQTTQKGQKNSRERMKRIEEGIKELGSQILKEHPVENTQLQNEKLYLYYLQNGRDMYVDQELDINRLSDYDVDHIVPQSFLKDDSIDNKVLTRSDKARGKSDNVPSEEVVKKMKNYWRQLLNAKLITQRKFDNLTKAERGGLSELDKAGFIKRQLVETRQITKHVAQILDSRMNTKYDENDKLIREVKVITLKSKLVSDFRKDFQFYKVREINNYHHAHDAYLNAVVGTALIKKYPKLESEFVYGDYKVYDVRKMIAKSEQEIGKATAKYFFYSNIMNFFKTEITLANGEIRKRPLIETNGETGEIVWDKGRDFATVRKVLSMPQVNIVKKTEVQTGGFSKESILPKRNSDKLIARKKDWDPKKYGGFDSPTVAYSVLVVAKVEKGKSKKLKSVKELLGITIMERSSFEKNPIDFLEAKGYKEVKKDLIIKLPKYSLFELENGRKRMLASAGELQKGNELALPSKYVNFLYLASHYEKLKGSPEDNEQKQLFVEQHKHYLDEIIEQISEFSKRVILADANLDKVLSAYNKHRDKPIREQAENIIHLFTLTNLGAPAAFKYFDTTIDRKRYTSTKEVLDATLIHQSITGLYETRIDLSQLGGDGGGGSGGGGSSGGMDPLQLLQPLEAEIKGTKLKAHWNSGATITCVPEAFLEDERPIQTMLIKTIHGEKQQDVYYLTFKVQGRKVEAEVLASPYDYILLNPSDVPWLMKKPLQLTVLVPLHEYQERLLQQTALPKEQKELLQKLFLKYDALWQHWENQVGHRRIKPHNIATGTLAPRPQKQYPINPKAKPSIQIVIDDLLKQGVLIQQNSTMNTPVYPVPKPDGKWRMVLDYREVNKTIPLIAAQNQHSAGILSSIYRGKYKTTLDLTNGFWAHPITPESYWLTAFTWQGKQYCWTRLPQGFLNSPALFTADVVDLLKEIPNVQAYVDDIYISHDDPQEHLEQLEKIFSILLNAGYVVSLKKSEIAQREVEFLGFNITKEGRGLTDTFKQKLLNITPPKDLKQLQSILGLLNFARNFIPNYSELVKPLYTIVANANGKFISWTEDNSNQLQHIISVLNQADNLEERNPETRLIIKVNSSPSAGYIRYYNEGSKRPIMYVNYIFSKAEAKFTQTEKLLTTMHKGLIKAMDLAMGQEILVYSPIVSMTKIQRTPLPERKALPVRWITWMTYLEDPRIQFHYDKSLPELQQIPNVTEDVIAKTKHPSEFAMVFYTDGSAIKHPDVNKSHSAGMGIAQVQFIPEYKIVHQWSIPLGDHTAQLAEIAAVEFACKKALKISGPVLIVTDSFYVAESANKELPYWKSNGFLNNKKKPLRHVSKWKSIAECLQLKPDIIIMHEKGHQQPMTTLHTEGNNLADKLATQGSYVVHAGKRTADGSEFEKRTADGSEFESPKKKAKVE

SEQ ID NO: 6813 - protein, 2085 aa, synthetic construct
MPAAKRVKLDGGDKKYSIGLDIGTNSVGWAVITDEYKVPSKKFKVLGNTDRHSIKKNLIGALLFDSGETAEATRLKRTARRRYTRRKNRICYLQEIFSNEMAKVDDSFFHRLEESFLVEEDKKHERHPIFGNIVDEVAYHEKYPTIYHLRKKLVDSTDKADLRLIYLALAHMIKFRGHFLIEGDLNPDNSDVDKLFIQLVQTYNQLFEENPINASGVDAKAILSARLSKSRRLENLIAQLPGEKKNGLFGNLIALSLGLTPNFKSNFDLAEDAKLQLSKDTYDDDLDNLLAQIGDQYADLFLAAKNLSDAILLSDILRVNTEITKAPLSASMIKRYDEHHQDLTLLKALVRQQLPEKYKEIFFDQSKNGYAGYIDGGASQEEFYKFIKPILEKMDGTEELLVKLNREDLLRKQRTFDNGSIPHQIHLGELHAILRRQEDFYPFLKDNREKIEKILTFRIPYYVGPLARGNSRFAWMTRKSEETITPWNFEEVVDKGASAQSFIERMTNFDKNLPNEKVLPKHSLLYEYFTVYNELTKVKYVTEGMRKPAFLSGEQKKAIVDLLFKTNRKVTVKQLKEDYFKKIECFDSVEISGVEDRFNASLGTYHDLLKIIKDKDFLDNEENEDILEDIVLTLTLFEDREMIEERLKTYAHLFDDKVMKQLKRRRYTGWGRLSRKLINGIRDKQSGKTILDFLKSDGFANRNFMQLIHDDSLTFKEDIQKAQVSGQGDSLHEHIANLAGSPAIKKGILQTVKVVDELVKVMGRHKPENIVIEMARENQTTQKGQKNSRERMKRIEEGIKELGSQILKEHPVENTQLQNEKLYLYYLQNGRDMYVDQELDINRLSDYDVDHIVPQSFLKDDSIDNKVLTRSDKARGKSDNVPSEEVVKKMKNYWRQLLNAKLITQRKFDNLTKAERGGLSELDKAGFIKRQLVETRQITKHVAQILDSRMNTKYDENDKLIREVKVITLKSKLVSDFRKDFQFYKVREINNYHHAHDAYLNAVVGTALIKKYPKLESEFVYGDYKVYDVRKMIAKSEQEIGKATAKYFFYSNIMNFFKTEITLANGEIRKRPLIETNGETGEIVWDKGRDFATVRKVLSMPQVNIVKKTEVQTGGFSKESILPKRNSDKLIARKKDWDPKKYGGFDSPTVAYSVLVVAKVEKGKSKKLKSVKELLGITIMERSSFEKNPIDFLEAKGYKEVKKDLIIKLPKYSLFELENGRKRMLASAGELQKGNELALPSKYVNFLYLASHYEKLKGSPEDNEQKQLFVEQHKHYLDEIIEQISEFSKRVILADANLDKVLSAYNKHRDKPIREQAENIIHLFTLTNLGAPAAFKYFDTTIDRKRYTSTKEVLDATLIHQSITGLYETRIDLSQLGGDGGGGSGGGGSSGGVPWLMKKPLQLTVLVPLHEYQERLLQQTALPKEQKELLQKLFLKYDALWQHWENQVGHRRIKPHNIATGTLAPRPQKQYPINPKAKPSIQIVIDDLLKQGVLIQQNSTMNTPVYPVPKPDGKWRMVLDYREVNKTIPLIAAQNQHSAGILSSIYRGKYKTTLDLTNGFWAHPITPESYWLTAFTWQGKQYCWTRLPQGFLNSPALFTADVVDLLKEIPNVQAYVDDIYISHDDPQEHLEQLEKIFSILLNAGYVVSLKKSEIAQREVEFLGFNITKEGRGLTDTFKQKLLNITPPKDLKQLQSILGLLNFARNFIPNYSELVKPLYTIVANANGKFISWTEDNSNQLQHIISVLNQADNLEERNPETRLIIKVNSSPSAGYIRYYNEGSKRPIMYVNYIFSKAEAKFTQTEKLLTTMHKGLIKAMDLAMGQEILVYSPIVSMTKIQRTPLPERKALPVRWITWMTYLEDPRIQFHYDKSLPELQQIPNVTEDVIAKTKHPSEFAMVFYTDGSAIKHPDVNKSHSAGMGIAQVQFIPEYKIVHQWSIPLGDHTAQLAEIAAVEFACKKALKISGPVLIVTDSFYVAESANKELPYWKSNGFLNNKKKPLRHVSKWKSIAECLQLKPDIIIMHEKGHQQPMTTLHTEGNNLADKLATQGSYVVHAGKRTADGSEFEKRTADGSEFESPKKKAKVE

SEQ ID NO: 6814 - protein, 2085 aa, synthetic construct
MPAAKRVKLDGGDKKYSIGLDIGTNSVGWAVITDEYKVPSKKFKVLGNTDRHSIKKNLIGALLFDSGETAEATRLKRTARRRYTRRKNRICYLQEIFSNEMAKVDDSFFHRLEESFLVEEDKKHERHPIFGNIVDEVAYHEKYPTIYHLRKKLVDSTDKADLRLIYLALAHMIKFRGHFLIEGDLNPDNSDVDKLFIQLVQTYNQLFEENPINASGVDAKAILSARLSKSRRLENLIAQLPGEKKNGLFGNLIALSLGLTPNFKSNFDLAEDAKLQLSKDTYDDDLDNLLAQIGDQYADLFLAAKNLSDAILLSDILRVNTEITKAPLSASMIKRYDEHHQDLTLLKALVRQQLPEKYKEIFFDQSKNGYAGYIDGGASQEEFYKFIKPILEKMDGTEELLVKLNREDLLRKQRTFDNGSIPHQIHLGELHAILRRQEDFYPFLKDNREKIEKILTFRIPYYVGPLARGNSRFAWMTRKSEETITPWNFEEVVDKGASAQSFIERMTNFDKNLPNEKVLPKHSLLYEYFTVYNELTKVKYVTEGMRKPAFLSGEQKKAIVDLLFKTNRKVTVKQLKEDYFKKIECFDSVEISGVEDRFNASLGTYHDLLKIIKDKDFLDNEENEDILEDIVLTLTLFEDREMIEERLKTYAHLFDDKVMKQLKRRRYTGWGRLSRKLINGIRDKQSGKTILDFLKSDGFANRNFMQLIHDDSLTFKEDIQKAQVSGQGDSLHEHIANLAGSPAIKKGILQTVKVVDELVKVMGRHKPENIVIEMARENQTTQKGQKNSRERMKRIEEGIKELGSQILKEHPVENTQLQNEKLYLYYLQNGRDMYVDQELDINRLSDYDVDHIVPQSFLKDDSIDNKVLTRSDKARGKSDNVPSEEVVKKMKNYWRQLLNAKLITQRKFDNLTKAERGGLSELDKAGFIKRQLVETRQITKHVAQILDSRMNTKYDENDKLIREVKVITLKSKLVSDFRKDFQFYKVREINNYHHAHDAYLNAVVGTALIKKYPKLESEFVYGDYKVYDVRKMIAKSEQEIGKATAKYFFYSNIMNFFKTEITLANGEIRKRPLIETNGETGEIVWDKGRDFATVRKVLSMPQVNIVKKTEVQTGGFSKESILPKRNSDKLIARKKDWDPKKYGGFDSPTVAYSVLVVAKVEKGKSKKLKSVKELLGITIMERSSFEKNPIDFLEAKGYKEVKKDLIIKLPKYSLFELENGRKRMLASAGELQKGNELALPSKYVNFLYLASHYEKLKGSPEDNEQKQLFVEQHKHYLDEIIEQISEFSKRVILADANLDKVLSAYNKHRDKPIREQAENIIHLFTLTNLGAPAAFKYFDTTIDRKRYTSTKEVLDATLIHQSITGLYETRIDLSQLGGDGGGGSGGGGSSGGIPWLMKKPLQLTTLVPLQEYEERLLKQTMLTGSYKEKLQSLFLKYDALWQHWENQVGHRRIKPHHIATGTVNPRPQKQYPINPKAKASIQTVINDLLKQGVLIQQNSIMNTPVYPVPKPDGKWRMVLDYREVNKTIPLIAAQNQHSAGILSSIFRGKYKTTLDLSNGFWAHSITPESYWLTAFTWLGQQYCWTRLPQGFLNSPALFNADVVDLLKEVPNVQVYVDDIYISHDDPREHLEQLEKVFSLLLNAGYVVSLKKSEIAQHEVEFLGFNITKEGRGLTETFKQKLLNITPPRDLKQLQSILGKLNFARNFIPNFSELVKPLYNIIATAPGKYITWTTDNSQQLQNIISMLNSAENLEERNPEVRLIMKVNTSPSAGYIRFYNEFAKRPIMYLNYVYTKAEVKFTNTEKLLTTIHKGLIKALDLGMGQEILVYSPIVSMTKIQKTPLPERKALPIRWITWMSYLEDPRIQFHYDKTLPELQQVPTVTDDIIAKIKHPSEFSMVFYTDGSAIKHPNVNKSHNAGMGIAQVQFKPEFTVINTWSIPLGDHTAQLAEVAAVEFACKKALKIDGPVLIVTDSFYVAESVNKELPYWQSNGFFNNKKKPLKHVSKWKSIADCIQLKPDIIIIHEKGHQPTASTFHTEGNNLADKLATQGSYVVNAGKRTADGSEFEKRTADGSEFESPKKKAKVE

SEQ ID NO: 6815 - protein, 2094 aa, synthetic construct
MPAAKRVKLDGGDKKYSIGLDIGTNSVGWAVITDEYKVPSKKFKVLGNTDRHSIKKNLIGALLFDSGETAEATRLKRTARRRYTRRKNRICYLQEIFSNEMAKVDDSFFHRLEESFLVEEDKKHERHPIFGNIVDEVAYHEKYPTIYHLRKKLVDSTDKADLRLIYLALAHMIKFRGHFLIEGDLNPDNSDVDKLFIQLVQTYNQLFEENPINASGVDAKAILSARLSKSRRLENLIAQLPGEKKNGLFGNLIALSLGLTPNFKSNFDLAEDAKLQLSKDTYDDDLDNLLAQIGDQYADLFLAAKNLSDAILLSDILRVNTEITKAPLSASMIKRYDEHHQDLTLLKALVRQQLPEKYKEIFFDQSKNGYAGYIDGGASQEEFYKFIKPILEKMDGTEELLVKLNREDLLRKQRTFDNGSIPHQIHLGELHAILRRQEDFYPFLKDNREKIEKILTFRIPYYVGPLARGNSRFAWMTRKSEETITPWNFEEVVDKGASAQSFIERMTNFDKNLPNEKVLPKHSLLYEYFTVYNELTKVKYVTEGMRKPAFLSGEQKKAIVDLLFKTNRKVTVKQLKEDYFKKIECFDSVEISGVEDRFNASLGTYHDLLKIIKDKDFLDNEENEDILEDIVLTLTLFEDREMIEERLKTYAHLFDDKVMKQLKRRRYTGWGRLSRKLINGIRDKQSGKTILDFLKSDGFANRNFMQLIHDDSLTFKEDIQKAQVSGQGDSLHEHIANLAGSPAIKKGILQTVKVVDELVKVMGRHKPENIVIEMARENQTTQKGQKNSRERMKRIEEGIKELGSQILKEHPVENTQLQNEKLYLYYLQNGRDMYVDQELDINRLSDYDVDHIVPQSFLKDDSIDNKVLTRSDKARGKSDNVPSEEVVKKMKNYWRQLLNAKLITQRKFDNLTKAERGGLSELDKAGFIKRQLVETRQITKHVAQILDSRMNTKYDENDKLIREVKVITLKSKLVSDFRKDFQFYKVREINNYHHAHDAYLNAVVGTALIKKYPKLESEFVYGDYKVYDVRKMIAKSEQEIGKATAKYFFYSNIMNFFKTEITLANGEIRKRPLIETNGETGEIVWDKGRDFATVRKVLSMPQVNIVKKTEVQTGGFSKESILPKRNSDKLIARKKDWDPKKYGGFDSPTVAYSVLVVAKVEKGKSKKLKSVKELLGITIMERSSFEKNPIDFLEAKGYKEVKKDLIIKLPKYSLFELENGRKRMLASAGELQKGNELALPSKYVNFLYLASHYEKLKGSPEDNEQKQLFVEQHKHYLDEIIEQISEFSKRVILADANLDKVLSAYNKHRDKPIREQAENIIHLFTLTNLGAPAAFKYFDTTIDRKRYTSTKEVLDATLIHQSITGLYETRIDLSQLGGDGGGGSGGGGSSGGTLNIEDEYRLHETSKEPDVPLGSTWLSDFPQAWAETGGMGLAVRQAPLIIPLKATSTPVSIKQYPMSQEARLGIKPHIQRLLDQGILVPCQSPWNTPLLPVKKPGTNDYRPVQDLREVNKRVEDIHPTVPNPYNLLSGLPPSHQWYTVLDLKDAFFCLRLHPTSQPLFAFEWRDPEMGISGQLTWTRLPQGFKNSPTLFNEALHRDLADFRIQHPDLILLQYVDDLLLAATSEQDCQRGTRALLQTLGNLGYRASAKKAQICQKQVKYLGYLLKEGQRWLTEARKETVMGQPTPKTPRQLREFLGTAGFCRLWIPGFAEMAAPLYPLTKPGTLFNWGPDQQKAYQEIKQALLTAPALGLPDLTKPFELFVDEKQGYAKGVLTQKLGPWRRPVAYLSKKLDPVAAGWPPCLRMVAAIAVLTKDAGKLTMGQPLVILAPHAVEALVKQPPDRWLSNARMTHYQAMLLDTDRVQFGPVVALNPATLLPLPEKEAPHDCLEILAETHGTRPDLTDQPIPDADYTWYTDGSSFLQEGQRRAGAAVTTETEVIWARALPAGTSAQRAELIALTQALKMAEGKKLNVYTDSRYAFATAHVHGEIYRRRGWLTSEGREIKNKNEILALLKALFLPKRLSIIHCPGHQKGNSAEARGNRMADQAAREAAMKAVLETSTLLAGKRTADGSEFEKRTADGSEFESPKKKAKVE

SEQ ID NO: 6816 - protein, 2094 aa, synthetic construct
MPAAKRVKLDGGDKKYSIGLDIGTNSVGWAVITDEYKVPSKKFKVLGNTDRHSIKKNLIGALLFDSGETAEATRLKRTARRRYTRRKNRICYLQEIFSNEMAKVDDSFFHRLEESFLVEEDKKHERHPIFGNIVDEVAYHEKYPTIYHLRKKLVDSTDKADLRLIYLALAHMIKFRGHFLIEGDLNPDNSDVDKLFIQLVQTYNQLFEENPINASGVDAKAILSARLSKSRRLENLIAQLPGEKKNGLFGNLIALSLGLTPNFKSNFDLAEDAKLQLSKDTYDDDLDNLLAQIGDQYADLFLAAKNLSDAILLSDILRVNTEITKAPLSASMIKRYDEHHQDLTLLKALVRQQLPEKYKEIFFDQSKNGYAGYIDGGASQEEFYKFIKPILEKMDGTEELLVKLNREDLLRKQRTFDNGSIPHQIHLGELHAILRRQEDFYPFLKDNREKIEKILTFRIPYYVGPLARGNSRFAWMTRKSEETITPWNFEEVVDKGASAQSFIERMTNFDKNLPNEKVLPKHSLLYEYFTVYNELTKVKYVTEGMRKPAFLSGEQKKAIVDLLFKTNRKVTVKQLKEDYFKKIECFDSVEISGVEDRFNASLGTYHDLLKIIKDKDFLDNEENEDILEDIVLTLTLFEDREMIEERLKTYAHLFDDKVMKQLKRRRYTGWGRLSRKLINGIRDKQSGKTILDFLKSDGFANRNFMQLIHDDSLTFKEDIQKAQVSGQGDSLHEHIANLAGSPAIKKGILQTVKVVDELVKVMGRHKPENIVIEMARENQTTQKGQKNSRERMKRIEEGIKELGSQILKEHPVENTQLQNEKLYLYYLQNGRDMYVDQELDINRLSDYDVDHIVPQSFLKDDSIDNKVLTRSDKARGKSDNVPSEEVVKKMKNYWRQLLNAKLITQRKFDNLTKAERGGLSELDKAGFIKRQLVETRQITKHVAQILDSRMNTKYDENDKLIREVKVITLKSKLVSDFRKDFQFYKVREINNYHHAHDAYLNAVVGTALIKKYPKLESEFVYGDYKVYDVRKMIAKSEQEIGKATAKYFFYSNIMNFFKTEITLANGEIRKRPLIETNGETGEIVWDKGRDFATVRKVLSMPQVNIVKKTEVQTGGFSKESILPKRNSDKLIARKKDWDPKKYGGFDSPTVAYSVLVVAKVEKGKSKKLKSVKELLGITIMERSSFEKNPIDFLEAKGYKEVKKDLIIKLPKYSLFELENGRKRMLASAGELQKGNELALPSKYVNFLYLASHYEKLKGSPEDNEQKQLFVEQHKHYLDEIIEQISEFSKRVILADANLDKVLSAYNKHRDKPIREQAENIIHLFTLTNLGAPAAFKYFDTTIDRKRYTSTKEVLDATLIHQSITGLYETRIDLSQLGGDGGGGSGGGGSSGGTLNIEDEYRLHETSKEPDVPLGSTWLSDFPQAWAETGGMGLAVRQAPLIIPLKATSTPVSIKQYPMSQEARLGIKPHIQRLLDQGILVPCQSPWNTPLLPVKKPGTNDYRPVQDLREVNKRVEDIHPTVPNPYNLLSGLPPSHQWYTVLDLKDAFFCLRLHPTSQPLFAFEWRDPEMGISGQLTWTRLPQGFKNSPTLFNEALHRDLADFRIQHPDLILLQYVDDLLLAATSEQDCQRGTRALLQTLGNLGYRASAKKAQICQKQVKYLGYLLKEGQRWLTEARKETVMGQPTPKTPRQLREFLGKAGFCRLFIPGFAEMAAPLYPLTKPGTLFNWGPDQQKAYQEIKQALLTAPALGLPDLTKPFELFVDEKQGYAKGVLTQKLGPWRRPVAYLSKKLDPVAAGWPPCLRMVAAIAVLTKDAGKLTMGQPLVILAPHAVEALVKQPPDRWLSNARMTHYQAMLLDTDRVQFGPVVALNPATLLPLPEKEAPHDCLEILAETHGTRPDLTDQPIPDADYTWYTDGSSFLQEGQRRAGAAVTTETEVIWARALPAGTSAQRAELIALTQALKMAEGKKLNVYTDSRYAFATAHVHGEIYRRRGWLTSEGREIKNKNEILALLKALFLPKRLSIIHCPGHQKGNSAEARGNRMADQAAREAAMKAVLETSTLLAGKRTADGSEFEKRTADGSEFESPKKKAKVE

SEQ ID NO: 6817 - protein, 2096 aa, synthetic construct
MPAAKRVKLDGGDKKYSIGLDIGTNSVGWAVITDEYKVPSKKFKVLGNTDRHSIKKNLIGALLFDSGETAEATRLKRTARRRYTRRKNRICYLQEIFSNEMAKVDDSFFHRLEESFLVEEDKKHERHPIFGNIVDEVAYHEKYPTIYHLRKKLVDSTDKADLRLIYLALAHMIKFRGHFLIEGDLNPDNSDVDKLFIQLVQTYNQLFEENPINASGVDAKAILSARLSKSRRLENLIAQLPGEKKNGLFGNLIALSLGLTPNFKSNFDLAEDAKLQLSKDTYDDDLDNLLAQIGDQYADLFLAAKNLSDAILLSDILRVNTEITKAPLSASMIKRYDEHHQDLTLLKALVRQQLPEKYKEIFFDQSKNGYAGYIDGGASQEEFYKFIKPILEKMDGTEELLVKLNREDLLRKQRTFDNGSIPHQIHLGELHAILRRQEDFYPFLKDNREKIEKILTFRIPYYVGPLARGNSRFAWMTRKSEETITPWNFEEVVDKGASAQSFIERMTNFDKNLPNEKVLPKHSLLYEYFTVYNELTKVKYVTEGMRKPAFLSGEQKKAIVDLLFKTNRKVTVKQLKEDYFKKIECFDSVEISGVEDRFNASLGTYHDLLKIIKDKDFLDNEENEDILEDIVLTLTLFEDREMIEERLKTYAHLFDDKVMKQLKRRRYTGWGRLSRKLINGIRDKQSGKTILDFLKSDGFANRNFMQLIHDDSLTFKEDIQKAQVSGQGDSLHEHIANLAGSPAIKKGILQTVKVVDELVKVMGRHKPENIVIEMARENQTTQKGQKNSRERMKRIEEGIKELGSQILKEHPVENTQLQNEKLYLYYLQNGRDMYVDQELDINRLSDYDVDHIVPQSFLKDDSIDNKVLTRSDKARGKSDNVPSEEVVKKMKNYWRQLLNAKLITQRKFDNLTKAERGGLSELDKAGFIKRQLVETRQITKHVAQILDSRMNTKYDENDKLIREVKVITLKSKLVSDFRKDFQFYKVREINNYHHAHDAYLNAVVGTALIKKYPKLESEFVYGDYKVYDVRKMIAKSEQEIGKATAKYFFYSNIMNFFKTEITLANGEIRKRPLIETNGETGEIVWDKGRDFATVRKVLSMPQVNIVKKTEVQTGGFSKESILPKRNSDKLIARKKDWDPKKYGGFDSPTVAYSVLVVAKVEKGKSKKLKSVKELLGITIMERSSFEKNPIDFLEAKGYKEVKKDLIIKLPKYSLFELENGRKRMLASAGELQKGNELALPSKYVNFLYLASHYEKLKGSPEDNEQKQLFVEQHKHYLDEIIEQISEFSKRVILADANLDKVLSAYNKHRDKPIREQAENIIHLFTLTNLGAPAAFKYFDTTIDRKRYTSTKEVLDATLIHQSITGLYETRIDLSQLGGDGGGGSGSSGGGGGTAPLEEEYRLFLEAPIQNVTLLEQWKREIPKVWAEINPPGLASTQAPIHVQLLSTALPVRVRQYPITLEAKRSLRETIRKFRAAGILRPVHSPWNTPLLPVRKSGTSEYRMVQDLREVNKRVETIHPTVPNPYTLLSLLPPDRIWYSVLDLKDAFFCIPLAPESQLIFAFEWADAEEGESGQLTWTRLPQGFKNSPTLFNEALNRDLQGFRLDHPSVSLLQYVDDLLIAADTQAACLSATRDLLMTLAELGYRVSGKKAQLCQEEVTYLGFKIHKGSRSLSNSRTQAILQIPVPKTKRQVREFLGTIGYCRLWIPGFAELAQPLYAATRPGNDPLVWGEKEEEAFQSLKLALTQPPALALPSLDKPFQLFVEETSGAAKGVLTQALGPWKRPVAYLSKRLDPVAAGWPRCLRAIAAAALLTREASKLTFGQDIEITSSHNLESLLRSPPDKWLTNARITQYQVLLLDPPRVRFKQTAALNPATLLPETDDTLPIHHCLDTLDSLTSTRPDLTDQPLAQAEATLFTDGSSYIRDGKRYAGAAVVTLDSVIWAEPLPIGTSAQKAELIALTKALEWSKDKSVNIYTDSRYAFATLHVHGMIYRERGWLTAGGKAIKNAPEILALLTAVWLPKRVAVMHCKGHQKDDAPTSTGNRRADEVAREVAIRPLSTQATISAGKRTADGSEFEKRTADGSEFESPKKKAKVE

SEQ ID NO: 6818 - protein, 2100 aa, synthetic construct
MPAAKRVKLDGGDKKYSIGLDIGTNSVGWAVITDEYKVPSKKFKVLGNTDRHSIKKNLIGALLFDSGETAEATRLKRTARRRYTRRKNRICYLQEIFSNEMAKVDDSFFHRLEESFLVEEDKKHERHPIFGNIVDEVAYHEKYPTIYHLRKKLVDSTDKADLRLIYLALAHMIKFRGHFLIEGDLNPDNSDVDKLFIQLVQTYNQLFEENPINASGVDAKAILSARLSKSRRLENLIAQLPGEKKNGLFGNLIALSLGLTPNFKSNFDLAEDAKLQLSKDTYDDDLDNLLAQIGDQYADLFLAAKNLSDAILLSDILRVNTEITKAPLSASMIKRYDEHHQDLTLLKALVRQQLPEKYKEIFFDQSKNGYAGYIDGGASQEEFYKFIKPILEKMDGTEELLVKLNREDLLRKQRTFDNGSIPHQIHLGELHAILRRQEDFYPFLKDNREKIEKILTFRIPYYVGPLARGNSRFAWMTRKSEETITPWNFEEVVDKGASAQSFIERMTNFDKNLPNEKVLPKHSLLYEYFTVYNELTKVKYVTEGMRKPAFLSGEQKKAIVDLLFKTNRKVTVKQLKEDYFKKIECFDSVEISGVEDRFNASLGTYHDLLKIIKDKDFLDNEENEDILEDIVLTLTLFEDREMIEERLKTYAHLFDDKVMKQLKRRRYTGWGRLSRKLINGIRDKQSGKTILDFLKSDGFANRNFMQLIHDDSLTFKEDIQKAQVSGQGDSLHEHIANLAGSPAIKKGILQTVKVVDELVKVMGRHKPENIVIEMARENQTTQKGQKNSRERMKRIEEGIKELGSQILKEHPVENTQLQNEKLYLYYLQNGRDMYVDQELDINRLSDYDVDHIVPQSFLKDDSIDNKVLTRSDKARGKSDNVPSEEVVKKMKNYWRQLLNAKLITQRKFDNLTKAERGGLSELDKAGFIKRQLVETRQITKHVAQILDSRMNTKYDENDKLIREVKVITLKSKLVSDFRKDFQFYKVREINNYHHAHDAYLNAVVGTALIKKYPKLESEFVYGDYKVYDVRKMIAKSEQEIGKATAKYFFYSNIMNFFKTEITLANGEIRKRPLIETNGETGEIVWDKGRDFATVRKVLSMPQVNIVKKTEVQTGGFSKESILPKRNSDKLIARKKDWDPKKYGGFDSPTVAYSVLVVAKVEKGKSKKLKSVKELLGITIMERSSFEKNPIDFLEAKGYKEVKKDLIIKLPKYSLFELENGRKRMLASAGELQKGNELALPSKYVNFLYLASHYEKLKGSPEDNEQKQLFVEQHKHYLDEIIEQISEFSKRVILADANLDKVLSAYNKHRDKPIREQAENIIHLFTLTNLGAPAAFKYFDTTIDRKRYTSTKEVLDATLIHQSITGLYETRIDLSQLGGDGGGGSGSSGGGGGTVSLQDEHRLFDIPVTTSLPDVWLQDFPQAWAETGGLGRAKCQAPIIIDLKPTAVPVSIKQYPMSLEAHMGIRQHIIKFLELGVLRPCRSPWNTPLLPVKKPGTQDYRPVQDLREINKRTVDIHPTVPNPYNLLSTLKPDYSWYTVLDLKDAFFCLPLAPQSQELFAFEWKDPERGISGQLTWTRLPQGFKNSPTLFDEALHRDLTDFRTQHPEVTLLQYVDDLLLAAPTKKACTQGTRHLLQELGEKGYRASAKKAQICQTKVTYLGYILSEGKRWLTPGRIETVARIPPPRNPREVREFLGTAGFCRLWIPGFAELAAPLYALTKESTPFTWQTEHQLAFEALKKALLSAPALGLPDTSKPFTLFLDERQGIAKGVLTQKLGPWKRPVAYLSKKLDPVAAGWPPCLRIMAATAMLVKDSAKLTLGQPLTVITPHTLEAIVRQPPDRWITNARLTHYQALLLDTDRVQFGPPVTLNPATLLPVPENQPSPHDCRQVLAETHGTREDLKDQELPDADHTWYTDGSSYLDSGTRRAGAAVVDGHNTIWAQSLPPGTSAQKAELIALTKALELSKGKKANIYTDSRYAFATAHTHGSIYERRGLLTSEGKEIKNKAEIIALLKALFLPQEVAIIHCPGHQKGQDPVAVGNRQADRVARQAAMAEVLTLATEPDNTSHITAGKRTADGSEFEKRTADGSEFESPKKKAKVE

SEQ ID NO: 6819 - protein, 2094 aa, synthetic construct
MPAAKRVKLDGGDKKYSIGLDIGTNSVGWAVITDEYKVPSKKFKVLGNTDRHSIKKNLIGALLFDSGETAEATRLKRTARRRYTRRKNRICYLQEIFSNEMAKVDDSFFHRLEESFLVEEDKKHERHPIFGNIVDEVAYHEKYPTIYHLRKKLVDSTDKADLRLIYLALAHMIKFRGHFLIEGDLNPDNSDVDKLFIQLVQTYNQLFEENPINASGVDAKAILSARLSKSRRLENLIAQLPGEKKNGLFGNLIALSLGLTPNFKSNFDLAEDAKLQLSKDTYDDDLDNLLAQIGDQYADLFLAAKNLSDAILLSDILRVNTEITKAPLSASMIKRYDEHHQDLTLLKALVRQQLPEKYKEIFFDQSKNGYAGYIDGGASQEEFYKFIKPILEKMDGTEELLVKLNREDLLRKQRTFDNGSIPHQIHLGELHAILRRQEDFYPFLKDNREKIEKILTFRIPYYVGPLARGNSRFAWMTRKSEETITPWNFEEVVDKGASAQSFIERMTNFDKNLPNEKVLPKHSLLYEYFTVYNELTKVKYVTEGMRKPAFLSGEQKKAIVDLLFKTNRKVTVKQLKEDYFKKIECFDSVEISGVEDRFNASLGTYHDLLKIIKDKDFLDNEENEDILEDIVLTLTLFEDREMIEERLKTYAHLFDDKVMKQLKRRRYTGWGRLSRKLINGIRDKQSGKTILDFLKSDGFANRNFMQLIHDDSLTFKEDIQKAQVSGQGDSLHEHIANLAGSPAIKKGILQTVKVVDELVKVMGRHKPENIVIEMARENQTTQKGQKNSRERMKRIEEGIKELGSQILKEHPVENTQLQNEKLYLYYLQNGRDMYVDQELDINRLSDYDVDHIVPQSFLKDDSIDNKVLTRSDKARGKSDNVPSEEVVKKMKNYWRQLLNAKLITQRKFDNLTKAERGGLSELDKAGFIKRQLVETRQITKHVAQILDSRMNTKYDENDKLIREVKVITLKSKLVSDFRKDFQFYKVREINNYHHAHDAYLNAVVGTALIKKYPKLESEFVYGDYKVYDVRKMIAKSEQEIGKATAKYFFYSNIMNFFKTEITLANGEIRKRPLIETNGETGEIVWDKGRDFATVRKVLSMPQVNIVKKTEVQTGGFSKESILPKRNSDKLIARKKDWDPKKYGGFDSPTVAYSVLVVAKVEKGKSKKLKSVKELLGITIMERSSFEKNPIDFLEAKGYKEVKKDLIIKLPKYSLFELENGRKRMLASAGELQKGNELALPSKYVNFLYLASHYEKLKGSPEDNEQKQLFVEQHKHYLDEIIEQISEFSKRVILADANLDKVLSAYNKHRDKPIREQAENIIHLFTLTNLGAPAAFKYFDTTIDRKRYTSTKEVLDATLIHQSITGLYETRIDLSQLGGDGGGGSGSSGGGGGTLNLEDEYRLYETSAEPEVSPGSTWLSDFPQAWAETGGMGLAVRQAPLIIPLKATSTPVSIKQYPMSQEAKLGIKPHIQRLLDQGILVPCQSPWNTPLLPVKKPGTNDYRPVQDLREVNKRVEDIHPTVPNPYNLLSGLPPSHRWYTVLDLKDAFFCLRLHPTSQPLFAFEWRDPGMGISGQLTWTRLPQGFKNSPTLFNEALHRDLADFRIQHPDLILLQYVDDILLAATSELDCQQGTRALLLTLGNLGYRASAKKAQLCQKQVKYLGYLLKEGQRWLTEARKETVMGQPTPKTPRQLREFLGKAGFCRLFIPGFAEMAAPLYPLTKPGTLFNWGPDQQKAYQEIKQALLTAPALGLPDLTKPFELFVDEKQGYAKGVLTQKLGPWRRPVAYLSKKLDPVAAGWPPCLRMVAAIAVLRKDAGKLTMGQPLVILAPHAVEALVKQPPDRWLSNARMTHYQAMLLDTDRVQFGPVVALNPATLLPLPEEGAPHDCLEILAETHGTRPDLTDQPIPDADHTWYTDGSSFLQEGQRKAGAAVTTETEVIWARALPAGTSAQRAELIALTQALKMAEGKRLNVYTDSRYAFATAHIHGEIYRRRGWLTSEGREIKNKSEILALLKALFLPKRLSIIHCLGHQKGDSAEARGNRLADQAAREAAIKTPPDTSTLLAGKRTADGSEFEKRTADGSEFESPKKKAKVE

SEQ ID NO: 6820 - protein, 2094 aa, synthetic construct
MPAAKRVKLDGGDKKYSIGLDIGTNSVGWAVITDEYKVPSKKFKVLGNTDRHSIKKNLIGALLFDSGETAEATRLKRTARRRYTRRKNRICYLQEIFSNEMAKVDDSFFHRLEESFLVEEDKKHERHPIFGNIVDEVAYHEKYPTIYHLRKKLVDSTDKADLRLIYLALAHMIKFRGHFLIEGDLNPDNSDVDKLFIQLVQTYNQLFEENPINASGVDAKAILSARLSKSRRLENLIAQLPGEKKNGLFGNLIALSLGLTPNFKSNFDLAEDAKLQLSKDTYDDDLDNLLAQIGDQYADLFLAAKNLSDAILLSDILRVNTEITKAPLSASMIKRYDEHHQDLTLLKALVRQQLPEKYKEIFFDQSKNGYAGYIDGGASQEEFYKFIKPILEKMDGTEELLVKLNREDLLRKQRTFDNGSIPHQIHLGELHAILRRQEDFYPFLKDNREKIEKILTFRIPYYVGPLARGNSRFAWMTRKSEETITPWNFEEVVDKGASAQSFIERMTNFDKNLPNEKVLPKHSLLYEYFTVYNELTKVKYVTEGMRKPAFLSGEQKKAIVDLLFKTNRKVTVKQLKEDYFKKIECFDSVEISGVEDRFNASLGTYHDLLKIIKDKDFLDNEENEDILEDIVLTLTLFEDREMIEERLKTYAHLFDDKVMKQLKRRRYTGWGRLSRKLINGIRDKQSGKTILDFLKSDGFANRNFMQLIHDDSLTFKEDIQKAQVSGQGDSLHEHIANLAGSPAIKKGILQTVKVVDELVKVMGRHKPENIVIEMARENQTTQKGQKNSRERMKRIEEGIKELGSQILKEHPVENTQLQNEKLYLYYLQNGRDMYVDQELDINRLSDYDVDHIVPQSFLKDDSIDNKVLTRSDKARGKSDNVPSEEVVKKMKNYWRQLLNAKLITQRKFDNLTKAERGGLSELDKAGFIKRQLVETRQITKHVAQILDSRMNTKYDENDKLIREVKVITLKSKLVSDFRKDFQFYKVREINNYHHAHDAYLNAVVGTALIKKYPKLESEFVYGDYKVYDVRKMIAKSEQEIGKATAKYFFYSNIMNFFKTEITLANGEIRKRPLIETNGETGEIVWDKGRDFATVRKVLSMPQVNIVKKTEVQTGGFSKESILPKRNSDKLIARKKDWDPKKYGGFDSPTVAYSVLVVAKVEKGKSKKLKSVKELLGITIMERSSFEKNPIDFLEAKGYKEVKKDLIIKLPKYSLFELENGRKRMLASAGELQKGNELALPSKYVNFLYLASHYEKLKGSPEDNEQKQLFVEQHKHYLDEIIEQISEFSKRVILADANLDKVLSAYNKHRDKPIREQAENIIHLFTLTNLGAPAAFKYFDTTIDRKRYTSTKEVLDATLIHQSITGLYETRIDLSQLGGDGGGGSGSSGGGGGLGIEDEYRLHETSTEPDVSLGSTWLSDFPQAWAETGGMGLAVRQAPLIIPLKATSTPVSIQQYPMSHEARLGIKPHIQRLLDQGILVPCQSPWNTPLLPVKKPGTNDYRPVQDLREVNKRVEDIHPTVPNPYNLLSGLPPSHQWYTVLDLKDAFFCLRLHPTSQPLFAFEWRDPGMGISGQLTWTRLPQGFKNSPTLFNEALHRDLADFRIQHPDLILLQYVDDILLAATSELDCQQGTRALLQTLGDLGYRASAKKAQICQKQVKYLGYLLREGQRWLTEARKETVMGQPVPKTPRQLREFLGKAGFCRLFIPGFAEMAAPLYPLTKPGTLFSWGPDQQKAYQEIKQALLTAPALGLPDLTKPFELFVDEKQGYAKGVLTQKLGPWRRPVAYLSKKLDPVAAGWPPCLRMVAAIAVLTKDAGKLTMGQPLVILAPHAVEALVKQPPDRWLSNARMTHYQAMLLDTDRVQFGPVVALNPATLLPLPEEGAPHDCLEILAETHGTRPDLTDQPIPDADHTWYTDGSSFLQEGQRKAGAAVTTETEVIWAGALPAGTSAQRAELIALTQALKMAEGKRLNVYTDSRYAFATAHIHGEIYRRRGWLTSEGREIKNKSEILALLKALFLPKRLSIIHCLGHQKGDSAEARGNRLADQAAREAAIKTPPDTSTLLIAGKRTADGSEFEKRTADGSEFESPKKKAKVE

SEQ ID NO: 6821 - protein, 2174 aa, synthetic construct
MPAAKRVKLDGGDKKYSIGLDIGTNSVGWAVITDEYKVPSKKFKVLGNTDRHSIKKNLIGALLFDSGETAEATRLKRTARRRYTRRKNRICYLQEIFSNEMAKVDDSFFHRLEESFLVEEDKKHERHPIFGNIVDEVAYHEKYPTIYHLRKKLVDSTDKADLRLIYLALAHMIKFRGHFLIEGDLNPDNSDVDKLFIQLVQTYNQLFEENPINASGVDAKAILSARLSKSRRLENLIAQLPGEKKNGLFGNLIALSLGLTPNFKSNFDLAEDAKLQLSKDTYDDDLDNLLAQIGDQYADLFLAAKNLSDAILLSDILRVNTEITKAPLSASMIKRYDEHHQDLTLLKALVRQQLPEKYKEIFFDQSKNGYAGYIDGGASQEEFYKFIKPILEKMDGTEELLVKLNREDLLRKQRTFDNGSIPHQIHLGELHAILRRQEDFYPFLKDNREKIEKILTFRIPYYVGPLARGNSRFAWMTRKSEETITPWNFEEVVDKGASAQSFIERMTNFDKNLPNEKVLPKHSLLYEYFTVYNELTKVKYVTEGMRKPAFLSGEQKKAIVDLLFKTNRKVTVKQLKEDYFKKIECFDSVEISGVEDRFNASLGTYHDLLKIIKDKDFLDNEENEDILEDIVLTLTLFEDREMIEERLKTYAHLFDDKVMKQLKRRRYTGWGRLSRKLINGIRDKQSGKTILDFLKSDGFANRNFMQLIHDDSLTFKEDIQKAQVSGQGDSLHEHIANLAGSPAIKKGILQTVKVVDELVKVMGRHKPENIVIEMARENQTTQKGQKNSRERMKRIEEGIKELGSQILKEHPVENTQLQNEKLYLYYLQNGRDMYVDQELDINRLSDYDVDHIVPQSFLKDDSIDNKVLTRSDKARGKSDNVPSEEVVKKMKNYWRQLLNAKLITQRKFDNLTKAERGGLSELDKAGFIKRQLVETRQITKHVAQILDSRMNTKYDENDKLIREVKVITLKSKLVSDFRKDFQFYKVREINNYHHAHDAYLNAVVGTALIKKYPKLESEFVYGDYKVYDVRKMIAKSEQEIGKATAKYFFYSNIMNFFKTEITLANGEIRKRPLIETNGETGEIVWDKGRDFATVRKVLSMPQVNIVKKTEVQTGGFSKESILPKRNSDKLIARKKDWDPKKYGGFDSPTVAYSVLVVAKVEKGKSKKLKSVKELLGITIMERSSFEKNPIDFLEAKGYKEVKKDLIIKLPKYSLFELENGRKRMLASAGELQKGNELALPSKYVNFLYLASHYEKLKGSPEDNEQKQLFVEQHKHYLDEIIEQISEFSKRVILADANLDKVLSAYNKHRDKPIREQAENIIHLFTLTNLGAPAAFKYFDTTIDRKRYTSTKEVLDATLIHQSITGLYETRIDLSQLGGDGGGGSGSSGGGGGMDPLQLLQPLEAEIKGTKLKAHWNSGATITCVPEAFLEDERPIQTMLIKTIHGEKQQDVYYLTFKVQGRKVEAEVLASPYDYILLNPSDVPWLMKKPLQLTVLVPLHEYQERLLQQTALPKEQKELLQKLFLKYDALWQHWENQVGHRRIKPHNIATGTLAPRPQKQYPINPKAKPSIQIVIDDLLKQGVLIQQNSTMNTPVYPVPKPDGKWRMVLDYREVNKTIPLIAAQNQHSAGILSSIYRGKYKTTLDLTNGFWAHPITPESYWLTAFTWQGKQYCWTRLPQGFLNSPALFNADVVDLLKEIPNVQAYVDDIYISHDDPQEHLEQLEKIFSILLNAGYVVSLKKSEIAQREVEFLGFNITKEGRGLTDTFKQKLLNITPPKDLKQLQSILGLLNFARNFIPNYSELVKPLYTIVAPANGKFISWTEDNSNQLQHIISVLNQADNLEERNPETRLIIKVNSSPSAGYIRYYNEGSKRPIMYVNYIFSKAEAKFTQTEKLLTTMHKGLIKAMDLAMGQEILVYSPIVSMTKIQRTPLPERKALPVRWITWMTYLEDPRIQFHYDKSLPELQQIPNVTEDVIAKTKHPSEFAMVFYTDGSAIKHPDVNKSHSAGMGIAQVQFIPEYKIVHQWSIPLGDHTAQLAEIAAVEFACKKALKISGPVLIVTDSFYVAESANKELPYWKSNGFLNNKKKPLRHVSKWKSIAECLQLKPDIIIMHEKGHQQPMTTLHTEGNNLADKLATQGSYVVHAGKRTADGSEFEKRTADGSEFESPKKKAKVE

SEQ ID NO: 6822 - protein, 2096 aa, synthetic construct
MPAAKRVKLDGGDKKYSIGLDIGTNSVGWAVITDEYKVPSKKFKVLGNTDRHSIKKNLIGALLFDSGETAEATRLKRTARRRYTRRKNRICYLQEIFSNEMAKVDDSFFHRLEESFLVEEDKKHERHPIFGNIVDEVAYHEKYPTIYHLRKKLVDSTDKADLRLIYLALAHMIKFRGHFLIEGDLNPDNSDVDKLFIQLVQTYNQLFEENPINASGVDAKAILSARLSKSRRLENLIAQLPGEKKNGLFGNLIALSLGLTPNFKSNFDLAEDAKLQLSKDTYDDDLDNLLAQIGDQYADLFLAAKNLSDAILLSDILRVNTEITKAPLSASMIKRYDEHHQDLTLLKALVRQQLPEKYKEIFFDQSKNGYAGYIDGGASQEEFYKFIKPILEKMDGTEELLVKLNREDLLRKQRTFDNGSIPHQIHLGELHAILRRQEDFYPFLKDNREKIEKILTFRIPYYVGPLARGNSRFAWMTRKSEETITPWNFEEVVDKGASAQSFIERMTNFDKNLPNEKVLPKHSLLYEYFTVYNELTKVKYVTEGMRKPAFLSGEQKKAIVDLLFKTNRKVTVKQLKEDYFKKIECFDSVEISGVEDRFNASLGTYHDLLKIIKDKDFLDNEENEDILEDIVLTLTLFEDREMIEERLKTYAHLFDDKVMKQLKRRRYTGWGRLSRKLINGIRDKQSGKTILDFLKSDGFANRNFMQLIHDDSLTFKEDIQKAQVSGQGDSLHEHIANLAGSPAIKKGILQTVKVVDELVKVMGRHKPENIVIEMARENQTTQKGQKNSRERMKRIEEGIKELGSQILKEHPVENTQLQNEKLYLYYLQNGRDMYVDQELDINRLSDYDVDHIVPQSFLKDDSIDNKVLTRSDKARGKSDNVPSEEVVKKMKNYWRQLLNAKLITQRKFDNLTKAERGGLSELDKAGFIKRQLVETRQITKHVAQILDSRMNTKYDENDKLIREVKVITLKSKLVSDFRKDFQFYKVREINNYHHAHDAYLNAVVGTALIKKYPKLESEFVYGDYKVYDVRKMIAKSEQEIGKATAKYFFYSNIMNFFKTEITLANGEIRKRPLIETNGETGEIVWDKGRDFATVRKVLSMPQVNIVKKTEVQTGGFSKESILPKRNSDKLIARKKDWDPKKYGGFDSPTVAYSVLVVAKVEKGKSKKLKSVKELLGITIMERSSFEKNPIDFLEAKGYKEVKKDLIIKLPKYSLFELENGRKRMLASAGELQKGNELALPSKYVNFLYLASHYEKLKGSPEDNEQKQLFVEQHKHYLDEIIEQISEFSKRVILADANLDKVLSAYNKHRDKPIREQAENIIHLFTLTNLGAPAAFKYFDTTIDRKRYTSTKEVLDATLIHQSITGLYETRIDLSQLGGDGGGGGGGSGSSGGTAPLEEEYRLFLEAPIQNVTLLEQWKREIPKVWAEINPPGLASTQAPIHVQLLSTALPVRVRQYPITLEAKRSLRETIRKFRAAGILRPVHSPWNTPLLPVRKSGTSEYRMVQDLREVNKRVETIHPTVPNPYTLLSLLPPDRIWYSVLDLKDAFFCIPLAPESQLIFAFEWADAEEGESGQLTWTRLPQGFKNSPTLFDEALNRDLQGFRLDHPSVSLLQYVDDLLIAADTQAACLSATRDLLMTLAELGYRVSGKKAQLCQEEVTYLGFKIHKGSRSLSNSRTQAILQIPVPKTKRQVREFLGTIGYCRLWIPGFAELAQPLYAATRGGNDPLVWGEKEEEAFQSLKLALTQPPALALPSLDKPFQLFVEETSGAAKGVLTQALGPWKRPVAYLSKRLDPVAAGWPRCLRAIAAAALLTREASKLTFGQDIEITSSHNLESLLRSPPDKWLTNARITQYQVLLLDPPRVRFKQTAALNPATLLPETDDTLPIHHCLDTLDSLTSTRPDLTDQPLAQAEATLFTDGSSYIRDGKRYAGAAVVTLDSVIWAEPLPIGTSAQKAELIALTKALEWSKDKSVNIYTDSRYAFATLHVHGMIYRERGLLTAGGKAIKNAPEILALLTAVWLPKRVAVMHCKGHQKDDAPTSTGNRRADEVAREVAIRPLSTQATISAGKRTADGSEFEKRTADGSEFESPKKKAKVE

SEQ ID NO: 6823 - protein, 2096 aa, synthetic construct
MPAAKRVKLDGGDKKYSIGLDIGTNSVGWAVITDEYKVPSKKFKVLGNTDRHSIKKNLIGALLFDSGETAEATRLKRTARRRYTRRKNRICYLQEIFSNEMAKVDDSFFHRLEESFLVEEDKKHERHPIFGNIVDEVAYHEKYPTIYHLRKKLVDSTDKADLRLIYLALAHMIKFRGHFLIEGDLNPDNSDVDKLFIQLVQTYNQLFEENPINASGVDAKAILSARLSKSRRLENLIAQLPGEKKNGLFGNLIALSLGLTPNFKSNFDLAEDAKLQLSKDTYDDDLDNLLAQIGDQYADLFLAAKNLSDAILLSDILRVNTEITKAPLSASMIKRYDEHHQDLTLLKALVRQQLPEKYKEIFFDQSKNGYAGYIDGGASQEEFYKFIKPILEKMDGTEELLVKLNREDLLRKQRTFDNGSIPHQIHLGELHAILRRQEDFYPFLKDNREKIEKILTFRIPYYVGPLARGNSRFAWMTRKSEETITPWNFEEVVDKGASAQSFIERMTNFDKNLPNEKVLPKHSLLYEYFTVYNELTKVKYVTEGMRKPAFLSGEQKKAIVDLLFKTNRKVTVKQLKEDYFKKIECFDSVEISGVEDRFNASLGTYHDLLKIIKDKDFLDNEENEDILEDIVLTLTLFEDREMIEERLKTYAHLFDDKVMKQLKRRRYTGWGRLSRKLINGIRDKQSGKTILDFLKSDGFANRNFMQLIHDDSLTFKEDIQKAQVSGQGDSLHEHIANLAGSPAIKKGILQTVKVVDELVKVMGRHKPENIVIEMARENQTTQKGQKNSRERMKRIEEGIKELGSQILKEHPVENTQLQNEKLYLYYLQNGRDMYVDQELDINRLSDYDVDHIVPQSFLKDDSIDNKVLTRSDKARGKSDNVPSEEVVKKMKNYWRQLLNAKLITQRKFDNLTKAERGGLSELDKAGFIKRQLVETRQITKHVAQILDSRMNTKYDENDKLIREVKVITLKSKLVSDFRKDFQFYKVREINNYHHAHDAYLNAVVGTALIKKYPKLESEFVYGDYKVYDVRKMIAKSEQEIGKATAKYFFYSNIMNFFKTEITLANGEIRKRPLIETNGETGEIVWDKGRDFATVRKVLSMPQVNIVKKTEVQTGGFSKESILPKRNSDKLIARKKDWDPKKYGGFDSPTVAYSVLVVAKVEKGKSKKLKSVKELLGITIMERSSFEKNPIDFLEAKGYKEVKKDLIIKLPKYSLFELENGRKRMLASAGELQKGNELALPSKYVNFLYLASHYEKLKGSPEDNEQKQLFVEQHKHYLDEIIEQISEFSKRVILADANLDKVLSAYNKHRDKPIREQAENIIHLFTLTNLGAPAAFKYFDTTIDRKRYTSTKEVLDATLIHQSITGLYETRIDLSQLGGDGGGGGGGSGSSGGTAPLEEEYRLFLEAPIQNVTLLEQWKREIPKVWAEINPPGLASTQAPIHVQLLSTALPVRVRQYPITLEAKRSLRETIRKFRAAGILRPVHSPWNTPLLPVRKSGTSEYRMVQDLREVNKRVETIHPTVPNPYTLLSLLPPDRIWYSVLDLKDAFFCIPLAPESQLIFAFEWADAEEGESGQLTWTRLPQGFKNSPTLFNEALNRDLQGFRLDHPSVSLLQYVDDLLIAADTQAACLSATRDLLMTLAELGYRVSGKKAQLCQEEVTYLGFKIHKGSRSLSNSRTQAILQIPVPKTKRQVREFLGTIGYCRLWIPGFAELAQPLYAATRPGNDPLVWGEKEEEAFQSLKLALTQPPALALPSLDKPFQLFVEETSGAAKGVLTQALGPWKRPVAYLSKRLDPVAAGWPRCLRAIAAAALLTREASKLTFGQDIEITSSHNLESLLRSPPDKWLTNARITQYQVLLLDPPRVRFKQTAALNPATLLPETDDTLPIHHCLDTLDSLTSTRPDLTDQPLAQAEATLFTDGSSYIRDGKRYAGAAVVTLDSVIWAEPLPIGTSAQKAELIALTKALEWSKDKSVNIYTDSRYAFATLHVHGMIYRERGWLTAGGKAIKNAPEILALLTAVWLPKRVAVMHCKGHQKDDAPTSTGNRRADEVAREVAIRPLSTQATISAGKRTADGSEFEKRTADGSEFESPKKKAKVE

SEQ ID NO: 6824 - protein, 2096 aa, synthetic construct
MPAAKRVKLDGGDKKYSIGLDIGTNSVGWAVITDEYKVPSKKFKVLGNTDRHSIKKNLIGALLFDSGETAEATRLKRTARRRYTRRKNRICYLQEIFSNEMAKVDDSFFHRLEESFLVEEDKKHERHPIFGNIVDEVAYHEKYPTIYHLRKKLVDSTDKADLRLIYLALAHMIKFRGHFLIEGDLNPDNSDVDKLFIQLVQTYNQLFEENPINASGVDAKAILSARLSKSRRLENLIAQLPGEKKNGLFGNLIALSLGLTPNFKSNFDLAEDAKLQLSKDTYDDDLDNLLAQIGDQYADLFLAAKNLSDAILLSDILRVNTEITKAPLSASMIKRYDEHHQDLTLLKALVRQQLPEKYKEIFFDQSKNGYAGYIDGGASQEEFYKFIKPILEKMDGTEELLVKLNREDLLRKQRTFDNGSIPHQIHLGELHAILRRQEDFYPFLKDNREKIEKILTFRIPYYVGPLARGNSRFAWMTRKSEETITPWNFEEVVDKGASAQSFIERMTNFDKNLPNEKVLPKHSLLYEYFTVYNELTKVKYVTEGMRKPAFLSGEQKKAIVDLLFKTNRKVTVKQLKEDYFKKIECFDSVEISGVEDRFNASLGTYHDLLKIIKDKDFLDNEENEDILEDIVLTLTLFEDREMIEERLKTYAHLFDDKVMKQLKRRRYTGWGRLSRKLINGIRDKQSGKTILDFLKSDGFANRNFMQLIHDDSLTFKEDIQKAQVSGQGDSLHEHIANLAGSPAIKKGILQTVKVVDELVKVMGRHKPENIVIEMARENQTTQKGQKNSRERMKRIEEGIKELGSQILKEHPVENTQLQNEKLYLYYLQNGRDMYVDQELDINRLSDYDVDHIVPQSFLKDDSIDNKVLTRSDKARGKSDNVPSEEVVKKMKNYWRQLLNAKLITQRKFDNLTKAERGGLSELDKAGFIKRQLVETRQITKHVAQILDSRMNTKYDENDKLIREVKVITLKSKLVSDFRKDFQFYKVREINNYHHAHDAYLNAVVGTALIKKYPKLESEFVYGDYKVYDVRKMIAKSEQEIGKATAKYFFYSNIMNFFKTEITLANGEIRKRPLIETNGETGEIVWDKGRDFATVRKVLSMPQVNIVKKTEVQTGGFSKESILPKRNSDKLIARKKDWDPKKYGGFDSPTVAYSVLVVAKVEKGKSKKLKSVKELLGITIMERSSFEKNPIDFLEAKGYKEVKKDLIIKLPKYSLFELENGRKRMLASAGELQKGNELALPSKYVNFLYLASHYEKLKGSPEDNEQKQLFVEQHKHYLDEIIEQISEFSKRVILADANLDKVLSAYNKHRDKPIREQAENIIHLFTLTNLGAPAAFKYFDTTIDRKRYTSTKEVLDATLIHQSITGLYETRIDLSQLGGDGGGGGGGSGSSGGTAPLEEEYRLFLEAPIQNVTLLEQWKREIPKVWAEINPPGLASTQAPIHVQLLSTALPVRVRQYPITLEAKRSLRETIRKFRAAGILRPVHSPWNTPLLPVRKSGTSEYRMVQDLREVNKRVETIHPTVPNPYTLLSLLPPDRIWYSVLDLKDAFFCIPLAPESQLIFAFEWADAEEGESGQLTWTRLPQGFKNSPTLFNEALNRDLQGFRLDHPSVSLLQYVDDLLIAADTQAACLSATRDLLMTLAELGYRVSGKKAQLCQEEVTYLGFKIHKGSRSLSNSRTQAILQIPVPKTKRQVREFLGKIGYCRLFIPGFAELAQPLYAATRPGNDPLVWGEKEEEAFQSLKLALTQPPALALPSLDKPFQLFVEETSGAAKGVLTQALGPWKRPVAYLSKRLDPVAAGWPRCLRAIAAAALLTREASKLTFGQDIEITSSHNLESLLRSPPDKWLTNARITQYQVLLLDPPRVRFKQTAALNPATLLPETDDTLPIHHCLDTLDSLTSTRPDLTDQPLAQAEATLFTDGSSYIRDGKRYAGAAVVTLDSVIWAEPLPIGTSAQKAELIALTKALEWSKDKSVNIYTDSRYAFATLHVHGMIYRERGWLTAGGKAIKNAPEILALLTAVWLPKRVAVMHCKGHQKDDAPTSTGNRRADEVAREVAIRPLSTQATISAGKRTADGSEFEKRTADGSEFESPKKKAKVE

SEQ ID NO: 6825 - protein, 2100 aa, synthetic construct
MPAAKRVKLDGGDKKYSIGLDIGTNSVGWAVITDEYKVPSKKFKVLGNTDRHSIKKNLIGALLFDSGETAEATRLKRTARRRYTRRKNRICYLQEIFSNEMAKVDDSFFHRLEESFLVEEDKKHERHPIFGNIVDEVAYHEKYPTIYHLRKKLVDSTDKADLRLIYLALAHMIKFRGHFLIEGDLNPDNSDVDKLFIQLVQTYNQLFEENPINASGVDAKAILSARLSKSRRLENLIAQLPGEKKNGLFGNLIALSLGLTPNFKSNFDLAEDAKLQLSKDTYDDDLDNLLAQIGDQYADLFLAAKNLSDAILLSDILRVNTEITKAPLSASMIKRYDEHHQDLTLLKALVRQQLPEKYKEIFFDQSKNGYAGYIDGGASQEEFYKFIKPILEKMDGTEELLVKLNREDLLRKQRTFDNGSIPHQIHLGELHAILRRQEDFYPFLKDNREKIEKILTFRIPYYVGPLARGNSRFAWMTRKSEETITPWNFEEVVDKGASAQSFIERMTNFDKNLPNEKVLPKHSLLYEYFTVYNELTKVKYVTEGMRKPAFLSGEQKKAIVDLLFKTNRKVTVKQLKEDYFKKIECFDSVEISGVEDRFNASLGTYHDLLKIIKDKDFLDNEENEDILEDIVLTLTLFEDREMIEERLKTYAHLFDDKVMKQLKRRRYTGWGRLSRKLINGIRDKQSGKTILDFLKSDGFANRNFMQLIHDDSLTFKEDIQKAQVSGQGDSLHEHIANLAGSPAIKKGILQTVKVVDELVKVMGRHKPENIVIEMARENQTTQKGQKNSRERMKRIEEGIKELGSQILKEHPVENTQLQNEKLYLYYLQNGRDMYVDQELDINRLSDYDVDHIVPQSFLKDDSIDNKVLTRSDKARGKSDNVPSEEVVKKMKNYWRQLLNAKLITQRKFDNLTKAERGGLSELDKAGFIKRQLVETRQITKHVAQILDSRMNTKYDENDKLIREVKVITLKSKLVSDFRKDFQFYKVREINNYHHAHDAYLNAVVGTALIKKYPKLESEFVYGDYKVYDVRKMIAKSEQEIGKATAKYFFYSNIMNFFKTEITLANGEIRKRPLIETNGETGEIVWDKGRDFATVRKVLSMPQVNIVKKTEVQTGGFSKESILPKRNSDKLIARKKDWDPKKYGGFDSPTVAYSVLVVAKVEKGKSKKLKSVKELLGITIMERSSFEKNPIDFLEAKGYKEVKKDLIIKLPKYSLFELENGRKRMLASAGELQKGNELALPSKYVNFLYLASHYEKLKGSPEDNEQKQLFVEQHKHYLDEIIEQISEFSKRVILADANLDKVLSAYNKHRDKPIREQAENIIHLFTLTNLGAPAAFKYFDTTIDRKRYTSTKEVLDATLIHQSITGLYETRIDLSQLGGDGGGGGGGSGSSGGTVSLQDEHRLFDIPVTTSLPDVWLQDFPQAWAETGGLGRAKCQAPIIIDLKPTAVPVSIKQYPMSLEAHMGIRQHIIKFLELGVLRPCRSPWNTPLLPVKKPGTQDYRPVQDLREINKRTVDIHPTVPNPYNLLSTLKPDYSWYTVLDLKDAFFCLPLAPQSQELFAFEWKDPERGISGQLTWTRLPQGFKNSPTLFNEALHRDLTDFRTQHPEVTLLQYVDDLLLAAPTKKACTQGTRHLLQELGEKGYRASAKKAQICQTKVTYLGYILSEGKRWLTPGRIETVARIPPPRNPREVREFLGTAGFCRLWIPGFAELAAPLYALTKPSTPFTWQTEHQLAFEALKKALLSAPALGLPDTSKPFTLFLDERQGIAKGVLTQKLGPWKRPVAYLSKKLDPVAAGWPPCLRIMAATAMLVKDSAKLTLGQPLTVITPHTLEAIVRQPPDRWITNARLTHYQALLLDTDRVQFGPPVTLNPATLLPVPENQPSPHDCRQVLAETHGTREDLKDQELPDADHTWYTDGSSYLDSGTRRAGAAVVDGHNTIWAQSLPPGTSAQKAELIALTKALELSKGKKANIYTDSRYAFATAHTHGSIYERRGWLTSEGKEIKNKAEIIALLKALFLPQEVAIIHCPGHQKGQDPVAVGNRQADRVARQAAMAEVLTLATEPDNTSHITAGKRTADGSEFEKRTADGSEFESPKKKAKVE

SEQ ID NO: 6826 - protein, 2093 aa, synthetic construct
MPAAKRVKLDGGDKKYSIGLDIGTNSVGWAVITDEYKVPSKKFKVLGNTDRHSIKKNLIGALLFDSGETAEATRLKRTARRRYTRRKNRICYLQEIFSNEMAKVDDSFFHRLEESFLVEEDKKHERHPIFGNIVDEVAYHEKYPTIYHLRKKLVDSTDKADLRLIYLALAHMIKFRGHFLIEGDLNPDNSDVDKLFIQLVQTYNQLFEENPINASGVDAKAILSARLSKSRRLENLIAQLPGEKKNGLFGNLIALSLGLTPNFKSNFDLAEDAKLQLSKDTYDDDLDNLLAQIGDQYADLFLAAKNLSDAILLSDILRVNTEITKAPLSASMIKRYDEHHQDLTLLKALVRQQLPEKYKEIFFDQSKNGYAGYIDGGASQEEFYKFIKPILEKMDGTEELLVKLNREDLLRKQRTFDNGSIPHQIHLGELHAILRRQEDFYPFLKDNREKIEKILTFRIPYYVGPLARGNSRFAWMTRKSEETITPWNFEEVVDKGASAQSFIERMTNFDKNLPNEKVLPKHSLLYEYFTVYNELTKVKYVTEGMRKPAFLSGEQKKAIVDLLFKTNRKVTVKQLKEDYFKKIECFDSVEISGVEDRFNASLGTYHDLLKIIKDKDFLDNEENEDILEDIVLTLTLFEDREMIEERLKTYAHLFDDKVMKQLKRRRYTGWGRLSRKLINGIRDKQSGKTILDFLKSDGFANRNFMQLIHDDSLTFKEDIQKAQVSGQGDSLHEHIANLAGSPAIKKGILQTVKVVDELVKVMGRHKPENIVIEMARENQTTQKGQKNSRERMKRIEEGIKELGSQILKEHPVENTQLQNEKLYLYYLQNGRDMYVDQELDINRLSDYDVDHIVPQSFLKDDSIDNKVLTRSDKARGKSDNVPSEEVVKKMKNYWRQLLNAKLITQRKFDNLTKAERGGLSELDKAGFIKRQLVETRQITKHVAQILDSRMNTKYDENDKLIREVKVITLKSKLVSDFRKDFQFYKVREINNYHHAHDAYLNAVVGTALIKKYPKLESEFVYGDYKVYDVRKMIAKSEQEIGKATAKYFFYSNIMNFFKTEITLANGEIRKRPLIETNGETGEIVWDKGRDFATVRKVLSMPQVNIVKKTEVQTGGFSKESILPKRNSDKLIARKKDWDPKKYGGFDSPTVAYSVLVVAKVEKGKSKKLKSVKELLGITIMERSSFEKNPIDFLEAKGYKEVKKDLIIKLPKYSLFELENGRKRMLASAGELQKGNELALPSKYVNFLYLASHYEKLKGSPEDNEQKQLFVEQHKHYLDEIIEQISEFSKRVILADANLDKVLSAYNKHRDKPIREQAENIIHLFTLTNLGAPAAFKYFDTTIDRKRYTSTKEVLDATLIHQSITGLYETRIDLSQLGGDGGGGGGGSGSSGGTLQLEEEYRLFEPESTQKQEMDIWLKNFPQAWAETGGMGTAHCQAPVLIQLKATATPISIRQYPMPHEAYQGIKPHIRRMLDQGILKPCQSPWNTPLLPVKKPGTEDYRPVQDLREVNKRVEDIHPTVPNPYNLLSTLPPSHPWYTVLDLKDAFFCLRLHSESQLLFAFEWRDPEIGLSGQLTWTRLPQGFKNSPTLFNEALHSDLADFRVRYPALVLLQYVDDLLLAAATRTECLEGTKALLETLGNKGYRASAKKAQICLQEVTYLGYSLKDGQRWLTKARKEAILSIPVPKNSRQVREFLGKAGYCRLFIPGFAELAAPLYPLTRPGTLFQWGTEQQLAFEDIKKALLSSPALGLPDITKPFELFIDENSGFAKGVLVQKLGPWKRPVAYLSKKLDTVASGWPPCLRMVAAIAILVKDAGKLTLGQPLTILTSHPVEALVRQPPNKWLSNARMTHYQAMLLDAERVHFGPTVSLNPATLLPLPSGGNHHDCLQILAETHGTRPDLTDQPLPDADLTWYTDGSSFIRNGEREAGAAVTTESEVIWAAPLPPGTSAQRAELIALTQALKMAEGKKLTVYTDSRYAFATTHVHGEIYRRRGWLTSEGKEIKNKNEILALLEALFLPKRLSIIHCPGHQKGDSPQAKGNRLADDTAKKAATETHSSLTVLPAGKRTADGSEFEKRTADGSEFESPKKKAKVE

SEQ ID NO: 6827 - protein, 2174 aa, synthetic construct
MPAAKRVKLDGGDKKYSIGLDIGTNSVGWAVITDEYKVPSKKFKVLGNTDRHSIKKNLIGALLFDSGETAEATRLKRTARRRYTRRKNRICYLQEIFSNEMAKVDDSFFHRLEESFLVEEDKKHERHPIFGNIVDEVAYHEKYPTIYHLRKKLVDSTDKADLRLIYLALAHMIKFRGHFLIEGDLNPDNSDVDKLFIQLVQTYNQLFEENPINASGVDAKAILSARLSKSRRLENLIAQLPGEKKNGLFGNLIALSLGLTPNFKSNFDLAEDAKLQLSKDTYDDDLDNLLAQIGDQYADLFLAAKNLSDAILLSDILRVNTEITKAPLSASMIKRYDEHHQDLTLLKALVRQQLPEKYKEIFFDQSKNGYAGYIDGGASQEEFYKFIKPILEKMDGTEELLVKLNREDLLRKQRTFDNGSIPHQIHLGELHAILRRQEDFYPFLKDNREKIEKILTFRIPYYVGPLARGNSRFAWMTRKSEETITPWNFEEVVDKGASAQSFIERMTNFDKNLPNEKVLPKHSLLYEYFTVYNELTKVKYVTEGMRKPAFLSGEQKKAIVDLLFKTNRKVTVKQLKEDYFKKIECFDSVEISGVEDRFNASLGTYHDLLKIIKDKDFLDNEENEDILEDIVLTLTLFEDREMIEERLKTYAHLFDDKVMKQLKRRRYTGWGRLSRKLINGIRDKQSGKTILDFLKSDGFANRNFMQLIHDDSLTFKEDIQKAQVSGQGDSLHEHIANLAGSPAIKKGILQTVKVVDELVKVMGRHKPENIVIEMARENQTTQKGQKNSRERMKRIEEGIKELGSQILKEHPVENTQLQNEKLYLYYLQNGRDMYVDQELDINRLSDYDVDHIVPQSFLKDDSIDNKVLTRSDKARGKSDNVPSEEVVKKMKNYWRQLLNAKLITQRKFDNLTKAERGGLSELDKAGFIKRQLVETRQITKHVAQILDSRMNTKYDENDKLIREVKVITLKSKLVSDFRKDFQFYKVREINNYHHAHDAYLNAVVGTALIKKYPKLESEFVYGDYKVYDVRKMIAKSEQEIGKATAKYFFYSNIMNFFKTEITLANGEIRKRPLIETNGETGEIVWDKGRDFATVRKVLSMPQVNIVKKTEVQTGGFSKESILPKRNSDKLIARKKDWDPKKYGGFDSPTVAYSVLVVAKVEKGKSKKLKSVKELLGITIMERSSFEKNPIDFLEAKGYKEVKKDLIIKLPKYSLFELENGRKRMLASAGELQKGNELALPSKYVNFLYLASHYEKLKGSPEDNEQKQLFVEQHKHYLDEIIEQISEFSKRVILADANLDKVLSAYNKHRDKPIREQAENIIHLFTLTNLGAPAAFKYFDTTIDRKRYTSTKEVLDATLIHQSITGLYETRIDLSQLGGDGGGGGGGSGSSGGMNPLQLLQPLPAEIKGTKLLAHWNSGATITCIPESFLEDEQPIKKTLIKTIHGEKQQNVYYVTFKVKGRKVEAEVIASPYEYILLSPTDVPWLTQQPLQLTILVPLQEYQEKILSKTALPEDQKQQLKTLFVKYDNLWQHWENQVGHRKIRPHNIATGDYPPRPQKQYPINPKAKPSIQIVIDDLLKQGVLTPQNSTMNTPVYPVPKPDGRWRMVLDYREVNKTIPLTAAQNQHSAGILATIVRQKYKTTLDLANGFWAHPITPESYWLTAFTWQGKQYCWTRLPQGFLNSPALFNADVVDLLKEIPNVQVYVDDIYLSHDDPKEHVQQLEKVFQILLQAGYVVSLKKSEIGQKTVEFLGFNITKEGRGLTDTFKTKLLNITPPKDLKQLQSILGKLNFARNFIPNFAELVQPLYNLIAPAKGKYIEWSEENTKQLNMVIEALNTASNLEERLPEQRLVIKVNTSPSAGYVRYYNETGKKPIMYLNYVFSKAELKFSMLEKLLTTMHKALIKAMDLAMGQEILVYSPIVSMTKIQKTPLPERKALPIRWITWMTYLEDPRIQFHYDKTLPELKHIPDVYTSSQSPVKHPSQYEGVFYTDGSAIKSPDPTKSNNAGMGIVHATYKPEYQVLNQWSIPLGNHTAQMAEIAAVEFACKKALKIPGPVLVITDSFYVAESANKELPYWKSNGFVNNKKKPLKHISKWKSIAECLSMKPDITIQHEKGISLQIPVFILKGNALADKLATQGSYVVNAGKRTADGSEFEKRTADGSEFESPKKKAKVE

SEQ ID NO: 6828 - protein, 2125 aa, synthetic construct
MPAAKRVKLDGGDKKYSIGLDIGTNSVGWAVITDEYKVPSKKFKVLGNTDRHSIKKNLIGALLFDSGETAEATRLKRTARRRYTRRKNRICYLQEIFSNEMAKVDDSFFHRLEESFLVEEDKKHERHPIFGNIVDEVAYHEKYPTIYHLRKKLVDSTDKADLRLIYLALAHMIKFRGHFLIEGDLNPDNSDVDKLFIQLVQTYNQLFEENPINASGVDAKAILSARLSKSRRLENLIAQLPGEKKNGLFGNLIALSLGLTPNFKSNFDLAEDAKLQLSKDTYDDDLDNLLAQIGDQYADLFLAAKNLSDAILLSDILRVNTEITKAPLSASMIKRYDEHHQDLTLLKALVRQQLPEKYKEIFFDQSKNGYAGYIDGGASQEEFYKFIKPILEKMDGTEELLVKLNREDLLRKQRTFDNGSIPHQIHLGELHAILRRQEDFYPFLKDNREKIEKILTFRIPYYVGPLARGNSRFAWMTRKSEETITPWNFEEVVDKGASAQSFIERMTNFDKNLPNEKVLPKHSLLYEYFTVYNELTKVKYVTEGMRKPAFLSGEQKKAIVDLLFKTNRKVTVKQLKEDYFKKIECFDSVEISGVEDRFNASLGTYHDLLKIIKDKDFLDNEENEDILEDIVLTLTLFEDREMIEERLKTYAHLFDDKVMKQLKRRRYTGWGRLSRKLINGIRDKQSGKTILDFLKSDGFANRNFMQLIHDDSLTFKEDIQKAQVSGQGDSLHEHIANLAGSPAIKKGILQTVKVVDELVKVMGRHKPENIVIEMARENQTTQKGQKNSRERMKRIEEGIKELGSQILKEHPVENTQLQNEKLYLYYLQNGRDMYVDQELDINRLSDYDVDHIVPQSFLKDDSIDNKVLTRSDKARGKSDNVPSEEVVKKMKNYWRQLLNAKLITQRKFDNLTKAERGGLSELDKAGFIKRQLVETRQITKHVAQILDSRMNTKYDENDKLIREVKVITLKSKLVSDFRKDFQFYKVREINNYHHAHDAYLNAVVGTALIKKYPKLESEFVYGDYKVYDVRKMIAKSEQEIGKATAKYFFYSNIMNFFKTEITLANGEIRKRPLIETNGETGEIVWDKGRDFATVRKVLSMPQVNIVKKTEVQTGGFSKESILPKRNSDKLIARKKDWDPKKYGGFDSPTVAYSVLVVAKVEKGKSKKLKSVKELLGITIMERSSFEKNPIDFLEAKGYKEVKKDLIIKLPKYSLFELENGRKRMLASAGELQKGNELALPSKYVNFLYLASHYEKLKGSPEDNEQKQLFVEQHKHYLDEIIEQISEFSKRVILADANLDKVLSAYNKHRDKPIREQAENIIHLFTLTNLGAPAAFKYFDTTIDRKRYTSTKEVLDATLIHQSITGLYETRIDLSQLGGDGGGGGGGSGSSGGLLGRDLLTKLKAQIQFSTEGPQVTWEDRPAMCLVLNLEEEYRLHEKPVPPSIDPSWLQLFPMVWAEKAGMGLANQVPPVVVELKSDASPVAVRQYPMSKEAREGIRPHIQRFLDLGILVPCQSPWNTPLLPVKKPGTNDYRPVQDLREVNKRVQDIHPTVPNPYNLLSSLPPSHTWYSVLDLKDAFFCLKLHPNSQPLFAFEWRDPEKGNTGQLTWTRLPQGFKNSPTLFNEALHRDLASFRALNPQVVMLQYVDDLLVAAPTYRDCKEGTRRLLQELSKLGYRVSAKKAQLCREEVTYLGYLLKGGKRWLTPARKATVMKIPTPTTPRQVREFLGTAGFCRLWIPGFASLAAPLYPLTRPKVPFTWTEAHQEAFGRIKEALLSAPALALPDLTKPFALYVDEKEGVARGVLTQTLGPWRRPVAYLSKKLDPVASGWPTCLKAIAAVALLLKDADKLTLGQNVLVIAPHNLESIVRQPPDRWMTNARMTHYQSLLLNERVSFAPPAILNPATLLPVESDDTPIHICSEILAEETGTRPDLRDQPLPGVPAWYTDGSSFIMDGRRQAGAAIVDNKRTVWASNLPEGTSAQKAELIALTQALRLAEGKSINIYTDSRYAFATAHVHGAIYKQRGWLTSAGKDIKNKEEILALLEAIHLPKRVAIIHCPGHQRGTDPVATGNRKADEAAKQAAQSTRILTETTKNAGKRTADGSEFEKRTADGSEFESPKKKAKVE

SEQ ID NO: 6829 - protein, 2125 aa, synthetic construct
MPAAKRVKLDGGDKKYSIGLDIGTNSVGWAVITDEYKVPSKKFKVLGNTDRHSIKKNLIGALLFDSGETAEATRLKRTARRRYTRRKNRICYLQEIFSNEMAKVDDSFFHRLEESFLVEEDKKHERHPIFGNIVDEVAYHEKYPTIYHLRKKLVDSTDKADLRLIYLALAHMIKFRGHFLIEGDLNPDNSDVDKLFIQLVQTYNQLFEENPINASGVDAKAILSARLSKSRRLENLIAQLPGEKKNGLFGNLIALSLGLTPNFKSNFDLAEDAKLQLSKDTYDDDLDNLLAQIGDQYADLFLAAKNLSDAILLSDILRVNTEITKAPLSASMIKRYDEHHQDLTLLKALVRQQLPEKYKEIFFDQSKNGYAGYIDGGASQEEFYKFIKPILEKMDGTEELLVKLNREDLLRKQRTFDNGSIPHQIHLGELHAILRRQEDFYPFLKDNREKIEKILTFRIPYYVGPLARGNSRFAWMTRKSEETITPWNFEEVVDKGASAQSFIERMTNFDKNLPNEKVLPKHSLLYEYFTVYNELTKVKYVTEGMRKPAFLSGEQKKAIVDLLFKTNRKVTVKQLKEDYFKKIECFDSVEISGVEDRFNASLGTYHDLLKIIKDKDFLDNEENEDILEDIVLTLTLFEDREMIEERLKTYAHLFDDKVMKQLKRRRYTGWGRLSRKLINGIRDKQSGKTILDFLKSDGFANRNFMQLIHDDSLTFKEDIQKAQVSGQGDSLHEHIANLAGSPAIKKGILQTVKVVDELVKVMGRHKPENIVIEMARENQTTQKGQKNSRERMKRIEEGIKELGSQILKEHPVENTQLQNEKLYLYYLQNGRDMYVDQELDINRLSDYDVDHIVPQSFLKDDSIDNKVLTRSDKARGKSDNVPSEEVVKKMKNYWRQLLNAKLITQRKFDNLTKAERGGLSELDKAGFIKRQLVETRQITKHVAQILDSRMNTKYDENDKLIREVKVITLKSKLVSDFRKDFQFYKVREINNYHHAHDAYLNAVVGTALIKKYPKLESEFVYGDYKVYDVRKMIAKSEQEIGKATAKYFFYSNIMNFFKTEITLANGEIRKRPLIETNGETGEIVWDKGRDFATVRKVLSMPQVNIVKKTEVQTGGFSKESILPKRNSDKLIARKKDWDPKKYGGFDSPTVAYSVLVVAKVEKGKSKKLKSVKELLGITIMERSSFEKNPIDFLEAKGYKEVKKDLIIKLPKYSLFELENGRKRMLASAGELQKGNELALPSKYVNFLYLASHYEKLKGSPEDNEQKQLFVEQHKHYLDEIIEQISEFSKRVILADANLDKVLSAYNKHRDKPIREQAENIIHLFTLTNLGAPAAFKYFDTTIDRKRYTSTKEVLDATLIHQSITGLYETRIDLSQLGGDGGGGGGGSGSSGGLLGRDLLTKLKAQIQFSTEGPQVTWEDRPAMCLVLNLEEEYRLHEKPVPPSIDPSWLQLFPMVWAEKAGMGLANQVPPVVVELKSDASPVAVRQYPMSKEAREGIRPHIQRFLDLGILVPCQSPWNTPLLPVKKPGTNDYRPVQDLREVNKRVQDIHPTVPNPYNLLSSLPPSHTWYSVLDLKDAFFCLKLHPNSQPLFAFEWRDPEKGNTGQLTWTRLPQGFKNSPTLFNEALHRDLASFRALNPQVVMLQYVDDLLVAAPTYRDCKEGTRRLLQELSKLGYRVSAKKAQLCREEVTYLGYLLKGGKRWLTPARKATVMKIPTPTTPRQVREFLGKAGFCRLFIPGFASLAAPLYPLTRPKVPFTWTEAHQEAFGRIKEALLSAPALALPDLTKPFALYVDEKEGVARGVLTQTLGPWRRPVAYLSKKLDPVASGWPTCLKAIAAVALLLKDADKLTLGQNVLVIAPHNLESIVRQPPDRWMTNARMTHYQSLLLNERVSFAPPAILNPATLLPVESDDTPIHICSEILAEETGTRPDLRDQPLPGVPAWYTDGSSFIMDGRRQAGAAIVDNKRTVWASNLPEGTSAQKAELIALTQALRLAEGKSINIYTDSRYAFATAHVHGAIYKQRGWLTSAGKDIKNKEEILALLEAIHLPKRVAIIHCPGHQRGTDPVATGNRKADEAAKQAAQSTRILTETTKNAGKRTADGSEFEKRTADGSEFESPKKKAKVE

SEQ ID NO: 6830 - protein, 2094 aa, synthetic construct
MPAAKRVKLDGGDKKYSIGLDIGTNSVGWAVITDEYKVPSKKFKVLGNTDRHSIKKNLIGALLFDSGETAEATRLKRTARRRYTRRKNRICYLQEIFSNEMAKVDDSFFHRLEESFLVEEDKKHERHPIFGNIVDEVAYHEKYPTIYHLRKKLVDSTDKADLRLIYLALAHMIKFRGHFLIEGDLNPDNSDVDKLFIQLVQTYNQLFEENPINASGVDAKAILSARLSKSRRLENLIAQLPGEKKNGLFGNLIALSLGLTPNFKSNFDLAEDAKLQLSKDTYDDDLDNLLAQIGDQYADLFLAAKNLSDAILLSDILRVNTEITKAPLSASMIKRYDEHHQDLTLLKALVRQQLPEKYKEIFFDQSKNGYAGYIDGGASQEEFYKFIKPILEKMDGTEELLVKLNREDLLRKQRTFDNGSIPHQIHLGELHAILRRQEDFYPFLKDNREKIEKILTFRIPYYVGPLARGNSRFAWMTRKSEETITPWNFEEVVDKGASAQSFIERMTNFDKNLPNEKVLPKHSLLYEYFTVYNELTKVKYVTEGMRKPAFLSGEQKKAIVDLLFKTNRKVTVKQLKEDYFKKIECFDSVEISGVEDRFNASLGTYHDLLKIIKDKDFLDNEENEDILEDIVLTLTLFEDREMIEERLKTYAHLFDDKVMKQLKRRRYTGWGRLSRKLINGIRDKQSGKTILDFLKSDGFANRNFMQLIHDDSLTFKEDIQKAQVSGQGDSLHEHIANLAGSPAIKKGILQTVKVVDELVKVMGRHKPENIVIEMARENQTTQKGQKNSRERMKRIEEGIKELGSQILKEHPVENTQLQNEKLYLYYLQNGRDMYVDQELDINRLSDYDVDHIVPQSFLKDDSIDNKVLTRSDKARGKSDNVPSEEVVKKMKNYWRQLLNAKLITQRKFDNLTKAERGGLSELDKAGFIKRQLVETRQITKHVAQILDSRMNTKYDENDKLIREVKVITLKSKLVSDFRKDFQFYKVREINNYHHAHDAYLNAVVGTALIKKYPKLESEFVYGDYKVYDVRKMIAKSEQEIGKATAKYFFYSNIMNFFKTEITLANGEIRKRPLIETNGETGEIVWDKGRDFATVRKVLSMPQVNIVKKTEVQTGGFSKESILPKRNSDKLIARKKDWDPKKYGGFDSPTVAYSVLVVAKVEKGKSKKLKSVKELLGITIMERSSFEKNPIDFLEAKGYKEVKKDLIIKLPKYSLFELENGRKRMLASAGELQKGNELALPSKYVNFLYLASHYEKLKGSPEDNEQKQLFVEQHKHYLDEIIEQISEFSKRVILADANLDKVLSAYNKHRDKPIREQAENIIHLFTLTNLGAPAAFKYFDTTIDRKRYTSTKEVLDATLIHQSITGLYETRIDLSQLGGDGGGGGGGSGSSGGTLNIEDEYRLHETSKGPDVPLGSTWLSDFPQAWAETGGMGLAVRQAPLIIPLKATSTPVSIKQYPMSQEARLGIKPHIQRLLDQGILVPCQSPWNTPLLPVKKPGTNDYRPVQDLREVNKRVEDIHPTVPNPYNLLSGLPPSHQWYTVLDLKDAFFCLRLHPTSQSLFAFEWRDPEMGISGQLTWTRLPQGFKNSPTLFNEALHRDLADFRIQHPDLILLQYVDDLLLAATSELDCQQGTRALLQTLGDLGYRASAKKAQICQKQVKYLGYLLKEGQRWLTEARKETVMGQPTPKTPRQLREFLGTAGFCRLWIPGFAEMAAPLYPLTKPGTLFEWGPDQQKAYQEIKQALLTAPALGLPDLTKPFELFVDEKQGYAKGVLTQKLGPWRRPVAYLSKKLDPVAAGWPPCLRMVAAIAVLTKDAGKLTMGQPLVILAPHAVEALVKQPPDRWLSNARMTHYQALLLDTDRVQFGPIVALNPATLLPLPEEGLQHDCLDILAEAHGTRPDLTDQPLPDADHTWYTDGSSFLQEGQRKAGAAVTTETEVVWAKALPAGTSAQRAELIALTQALKMAEGKKLNVYTDSRYAFATAHIHGEIYRRRGWLTSEGKEIKNKDEILALLKALFLPKRLSIIHCPGHQKGNRAEARGNRMADQAAREVATRETPETSTLLAGKRTADGSEFEKRTADGSEFESPKKKAKVE

SEQ ID NO: 6831 - protein, 2094 aa, synthetic construct
MPAAKRVKLDGGDKKYSIGLDIGTNSVGWAVITDEYKVPSKKFKVLGNTDRHSIKKNLIGALLFDSGETAEATRLKRTARRRYTRRKNRICYLQEIFSNEMAKVDDSFFHRLEESFLVEEDKKHERHPIFGNIVDEVAYHEKYPTIYHLRKKLVDSTDKADLRLIYLALAHMIKFRGHFLIEGDLNPDNSDVDKLFIQLVQTYNQLFEENPINASGVDAKAILSARLSKSRRLENLIAQLPGEKKNGLFGNLIALSLGLTPNFKSNFDLAEDAKLQLSKDTYDDDLDNLLAQIGDQYADLFLAAKNLSDAILLSDILRVNTEITKAPLSASMIKRYDEHHQDLTLLKALVRQQLPEKYKEIFFDQSKNGYAGYIDGGASQEEFYKFIKPILEKMDGTEELLVKLNREDLLRKQRTFDNGSIPHQIHLGELHAILRRQEDFYPFLKDNREKIEKILTFRIPYYVGPLARGNSRFAWMTRKSEETITPWNFEEVVDKGASAQSFIERMTNFDKNLPNEKVLPKHSLLYEYFTVYNELTKVKYVTEGMRKPAFLSGEQKKAIVDLLFKTNRKVTVKQLKEDYFKKIECFDSVEISGVEDRFNASLGTYHDLLKIIKDKDFLDNEENEDILEDIVLTLTLFEDREMIEERLKTYAHLFDDKVMKQLKRRRYTGWGRLSRKLINGIRDKQSGKTILDFLKSDGFANRNFMQLIHDDSLTFKEDIQKAQVSGQGDSLHEHIANLAGSPAIKKGILQTVKVVDELVKVMGRHKPENIVIEMARENQTTQKGQKNSRERMKRIEEGIKELGSQILKEHPVENTQLQNEKLYLYYLQNGRDMYVDQELDINRLSDYDVDHIVPQSFLKDDSIDNKVLTRSDKARGKSDNVPSEEVVKKMKNYWRQLLNAKLITQRKFDNLTKAERGGLSELDKAGFIKRQLVETRQITKHVAQILDSRMNTKYDENDKLIREVKVITLKSKLVSDFRKDFQFYKVREINNYHHAHDAYLNAVVGTALIKKYPKLESEFVYGDYKVYDVRKMIAKSEQEIGKATAKYFFYSNIMNFFKTEITLANGEIRKRPLIETNGETGEIVWDKGRDFATVRKVLSMPQVNIVKKTEVQTGGFSKESILPKRNSDKLIARKKDWDPKKYGGFDSPTVAYSVLVVAKVEKGKSKKLKSVKELLGITIMERSSFEKNPIDFLEAKGYKEVKKDLIIKLPKYSLFELENGRKRMLASAGELQKGNELALPSKYVNFLYLASHYEKLKGSPEDNEQKQLFVEQHKHYLDEIIEQISEFSKRVILADANLDKVLSAYNKHRDKPIREQAENIIHLFTLTNLGAPAAFKYFDTTIDRKRYTSTKEVLDATLIHQSITGLYETRIDLSQLGGDGGGGGGGSGSSGGTLNIEDEHRLHETSKEPDVSLGSTWLSDFPQAWAETGGMGLAVRQAPLIIPLKATSTPVSIKQYPMSQEARLGIKPHIQRLLDQGILVPCQSPWNTPLLPVKKPGTNDYRPVQDLREVNKRVEDIHPTVPNPYNLLSGLPPSHQWYTVLDLKDAFFCLRLHPTSQPLFAFEWRDPEMGISGQLTWTRLPQGFKNSPTLFNEALHRDLADFRIQHPDLILLQYVDDLLLAATSELDCQQGTRALLQTLGNLGYRASAKKAQICQKQVKYLGYLLKEGQRWLTEARKETVMGQPTPKTPRQLREFLGTAGFCRLWIPGFAEMAAPLYPLTKPGTLFNWGPDQQKAYQEIKQALLTAPALGLPDLTKPFELFVDEKQGYAKGVLTQKLGPWRRPVAYLSKKLDPVAAGWPPCLRMVAAIAVLTKDAGKLTMGQPLVILAPHAVEALVKQPPDRWLSNARMTHYQALLLDTDRVQFGPVVALNPATLLPLPEEGLQHNCLDILAEAHGTRPDLTDQPLPDADHTWYTDGSSLLQEGQRKAGAAVTTETEVIWAKALPAGTSAQRAELIALTQALKMAEGKKLNVYTDSRYAFATAHIHGEIYRRRGWLTSEGKEIKNKDEILALLKALFLPKRLSIIHCPGHQKGHSAEARGNRMADQAARKAAITETPDTSTLLAGKRTADGSEFEKRTADGSEFESPKKKAKVE

SEQ ID NO: 6832 - protein, 2094 aa, synthetic construct; identical to SEQ ID NO: 6831

SEQ ID NO: 6833 - protein, 2086 aa, synthetic construct
MPAAKRVKLDGGDKKYSIGLDIGTNSVGWAVITDEYKVPSKKFKVLGNTDRHSIKKNLIGALLFDSGETAEATRLKRTARRRYTRRKNRICYLQEIFSNEMAKVDDSFFHRLEESFLVEEDKKHERHPIFGNIVDEVAYHEKYPTIYHLRKKLVDSTDKADLRLIYLALAHMIKFRGHFLIEGDLNPDNSDVDKLFIQLVQTYNQLFEENPINASGVDAKAILSARLSKSRRLENLIAQLPGEKKNGLFGNLIALSLGLTPNFKSNFDLAEDAKLQLSKDTYDDDLDNLLAQIGDQYADLFLAAKNLSDAILLSDILRVNTEITKAPLSASMIKRYDEHHQDLTLLKALVRQQLPEKYKEIFFDQSKNGYAGYIDGGASQEEFYKFIKPILEKMDGTEELLVKLNREDLLRKQRTFDNGSIPHQIHLGELHAILRRQEDFYPFLKDNREKIEKILTFRIPYYVGPLARGNSRFAWMTRKSEETITPWNFEEVVDKGASAQSFIERMTNFDKNLPNEKVLPKHSLLYEYFTVYNELTKVKYVTEGMRKPAFLSGEQKKAIVDLLFKTNRKVTVKQLKEDYFKKIECFDSVEISGVEDRFNASLGTYHDLLKIIKDKDFLDNEENEDILEDIVLTLTLFEDREMIEERLKTYAHLFDDKVMKQLKRRRYTGWGRLSRKLINGIRDKQSGKTILDFLKSDGFANRNFMQLIHDDSLTFKEDIQKAQVSGQGDSLHEHIANLAGSPAIKKGILQTVKVVDELVKVMGRHKPENIVIEMARENQTTQKGQKNSRERMKRIEEGIKELGSQILKEHPVENTQLQNEKLYLYYLQNGRDMYVDQELDINRLSDYDVDHIVPQSFLKDDSIDNKVLTRSDKARGKSDNVPSEEVVKKMKNYWRQLLNAKLITQRKFDNLTKAERGGLSELDKAGFIKRQLVETRQITKHVAQILDSRMNTKYDENDKLIREVKVITLKSKLVSDFRKDFQFYKVREINNYHHAHDAYLNAVVGTALIKKYPKLESEFVYGDYKVYDVRKMIAKSEQEIGKATAKYFFYSNIMNFFKTEITLANGEIRKRPLIETNGETGEIVWDKGRDFATVRKVLSMPQVNIVKKTEVQTGGFSKESILPKRNSDKLIARKKDWDPKKYGGFDSPTVAYSVLVVAKVEKGKSKKLKSVKELLGITIMERSSFEKNPIDFLEAKGYKEVKKDLIIKLPKYSLFELENGRKRMLASAGELQKGNELALPSKYVNFLYLASHYEKLKGSPEDNEQKQLFVEQHKHYLDEIIEQISEFSKRVILADANLDKVLSAYNKHRDKPIREQAENIIHLFTLTNLGAPAAFKYFDTTIDRKRYTSTKEVLDATLIHQSITGLYETRIDLSQLGGDGGGGGGGSGSSGGLDDEYRLYSPLVKPDQNIQFWLEQFPQAWAETAGMGLAKQVPPQVIQLKASATPVSVRQYPLSKEAQEGIRPHVQRLIQQGILVPVQSPWNTPLLPVRKPGTNDYRPVQDLREVNKRVQDIHPTVPNPYNLLCALPPQRSWYTVLDLKDAFFCLRLHPTSQPLFAFEWRDPGTGRTGQLTWTRLPQGFKNSPTIFNEALHRDLANFRIQHPQVTLLQYVDDLLLAGATKQDCLEGTKALLLELSDLGYRASAKKAQICRREVTYLGYSLRDGQRWLTEARKKTVVQIPAPTTAKQVREFLGKAGFCRLFIPGFATLAAPLYPLTKPKGEFSWAPEHQKAFDAIKKALLSAPALALPDVTKPFTLYVDERKGVARGVLTQTLGPWRRPVAYLSKKLDPVASGWPVCLKAIAAVAILVKDADKLTLGQNITVIAPHALENIVRQPPDRWMTNARMTHYQSLLLTERVTFAPPAALNPATLLPEETDEPVTHDCHQLLIEETGVRKDLTDIPLTGEVLTWFTDGSSYVVEGKRMAGAAVVDGTRTIWASSLPEGTSAQKAELMALTQALRLAEGKSINIYTDSRYAFATAHVHGAIYKQRGWLTSAGREIKNKEEILSLLEALHLPKRLAIIHCPGHQKAKDPISRGNQMADRVAKQAAQGVNLLPAGKRTADGSEFEKRTADGSEFESPKKKAKVE

SEQ ID NO: 6834 - protein, 2086 aa, synthetic construct; identical to SEQ ID NO: 6833

SEQ ID NO: 6835 - protein, 2088 aa, synthetic construct
MPAAKRVKLDGGDKKYSIGLDIGTNSVGWAVITDEYKVPSKKFKVLGNTDRHSIKKNLIGALLFDSGETAEATRLKRTARRRYTRRKNRICYLQEIFSNEMAKVDDSFFHRLEESFLVEEDKKHERHPIFGNIVDEVAYHEKYPTIYHLRKKLVDSTDKADLRLIYLALAHMIKFRGHFLIEGDLNPDNSDVDKLFIQLVQTYNQLFEENPINASGVDAKAILSARLSKSRRLENLIAQLPGEKKNGLFGNLIALSLGLTPNFKSNFDLAEDAKLQLSKDTYDDDLDNLLAQIGDQYADLFLAAKNLSDAILLSDILRVNTEITKAPLSASMIKRYDEHHQDLTLLKALVRQQLPEKYKEIFFDQSKNGYAGYIDGGASQEEFYKFIKPILEKMDGTEELLVKLNREDLLRKQRTFDNGSIPHQIHLGELHAILRRQEDFYPFLKDNREKIEKILTFRIPYYVGPLARGNSRFAWMTRKSEETITPWNFEEVVDKGASAQSFIERMTNFDKNLPNEKVLPKHSLLYEYFTVYNELTKVKYVTEGMRKPAFLSGEQKKAIVDLLFKTNRKVTVKQLKEDYFKKIECFDSVEISGVEDRFNASLGTYHDLLKIIKDKDFLDNEENEDILEDIVLTLTLFEDREMIEERLKTYAHLFDDKVMKQLKRRRYTGWGRLSRKLINGIRDKQSGKTILDFLKSDGFANRNFMQLIHDDSLTFKEDIQKAQVSGQGDSLHEHIANLAGSPAIKKGILQTVKVVDELVKVMGRHKPENIVIEMARENQTTQKGQKNSRERMKRIEEGIKELGSQILKEHPVENTQLQNEKLYLYYLQNGRDMYVDQELDINRLSDYDVDHIVPQSFLKDDSIDNKVLTRSDKARGKSDNVPSEEVVKKMKNYWRQLLNAKLITQRKFDNLTKAERGGLSELDKAGFIKRQLVETRQITKHVAQILDSRMNTKYDENDKLIREVKVITLKSKLVSDFRKDFQFYKVREINNYHHAHDAYLNAVVGTALIKKYPKLESEFVYGDYKVYDVRKMIAKSEQEIGKATAKYFFYSNIMNFFKTEITLANGEIRKRPLIETNGETGEIVWDKGRDFATVRKVLSMPQVNIVKKTEVQTGGFSKESILPKRNSDKLIARKKDWDPKKYGGFDSPTVAYSVLVVAKVEKGKSKKLKSVKELLGITIMERSSFEKNPIDFLEAKGYKEVKKDLIIKLPKYSLFELENGRKRMLASAGELQKGNELALPSKYVNFLYLASHYEKLKGSPEDNEQKQLFVEQHKHYLDEIIEQISEFSKRVILADANLDKVLSAYNKHRDKPIREQAENIIHLFTLTNLGAPAAFKYFDTTIDRKRYTSTKEVLDATLIHQSITGLYETRIDLSQLGGDGGGGGGGSGSSGGTLQLDDEYRLYSPLVKPDQNIQFWLEQFPQAWAETAGMGLAKQVPPQVIQLKASATPVSVRQYPLSKEAQEGIRPHVQRLIQQGILVPVQSPWNTPLLPVRKPGTNDYRPVQDLREVNKRVQDIHPTVPNPYNLLCALPPQRSWYTVLDLKDAFFCLRLHPTSQPLFAFEWRDPGTGRTGQLTWTRLPQGFKNSPTIFDEALHRDLANFRIQHPQVTLLQYVDDLLLAGATKQDCLEGTKALLLELSDLGYRASAKKAQICRREVTYLGYSLRDGQRWLTEARKKTVVQIPAPTTAKQVREFLGTAGFCRLWIPGFATLAAPLYPLTKEKGEFSWAPEHQKAFDAIKKALLSAPALALPDVTKPFTLYVDERKGVARGVLTQTLGPWRRPVAYLSKKLDPVASGWPVCLKAIAAVAILVKDADKLTLGQNITVIAPHALENIVRQPPDRWMTNARMTHYQSLLLTERVTFAPPAALNPATLLPEETDEPVTHDCHQLLIEETGVRKDLTDIPLTGEVLTWFTDGSSYVVEGKRMAGAAVVDGTRTIWASSLPEGTSAQKAELMALTQALRLAEGKSINIYTDSRYAFATAHVHGAIYKQRGLLTSAGREIKNKEEILSLLEALHLPKRLAIIHCPGHQKAKDPISRGNQMADRVAKQAAQGVNLLAGKRTADGSEFEKRTADGSEFESPKKKAKVE

SEQ ID NO: 6836 - protein, 2085 aa, synthetic construct
MPAAKRVKLDGGDKKYSIGLDIGTNSVGWAVITDEYKVPSKKFKVLGNTDRHSIKKNLIGALLFDSGETAEATRLKRTARRRYTRRKNRICYLQEIFSNEMAKVDDSFFHRLEESFLVEEDKKHERHPIFGNIVDEVAYHEKYPTIYHLRKKLVDSTDKADLRLIYLALAHMIKFRGHFLIEGDLNPDNSDVDKLFIQLVQTYNQLFEENPINASGVDAKAILSARLSKSRRLENLIAQLPGEKKNGLFGNLIALSLGLTPNFKSNFDLAEDAKLQLSKDTYDDDLDNLLAQIGDQYADLFLAAKNLSDAILLSDILRVNTEITKAPLSASMIKRYDEHHQDLTLLKALVRQQLPEKYKEIFFDQSKNGYAGYIDGGASQEEFYKFIKPILEKMDGTEELLVKLNREDLLRKQRTFDNGSIPHQIHLGELHAILRRQEDFYPFLKDNREKIEKILTFRIPYYVGPLARGNSRFAWMTRKSEETITPWNFEEVVDKGASAQSFIERMTNFDKNLPNEKVLPKHSLLYEYFTVYNELTKVKYVTEGMRKPAFLSGEQKKAIVDLLFKTNRKVTVKQLKEDYFKKIECFDSVEISGVEDRFNASLGTYHDLLKIIKDKDFLDNEENEDILEDIVLTLTLFEDREMIEERLKTYAHLFDDKVMKQLKRRRYTGWGRLSRKLINGIRDKQSGKTILDFLKSDGFANRNFMQLIHDDSLTFKEDIQKAQVSGQGDSLHEHIANLAGSPAIKKGILQTVKVVDELVKVMGRHKPENIVIEMARENQTTQKGQKNSRERMKRIEEGIKELGSQILKEHPVENTQLQNEKLYLYYLQNGRDMYVDQELDINRLSDYDVDHIVPQSFLKDDSIDNKVLTRSDKARGKSDNVPSEEVVKKMKNYWRQLLNAKLITQRKFDNLTKAERGGLSELDKAGFIKRQLVETRQITKHVAQILDSRMNTKYDENDKLIREVKVITLKSKLVSDFRKDFQFYKVREINNYHHAHDAYLNAVVGTALIKKYPKLESEFVYGDYKVYDVRKMIAKSEQEIGKATAKYFFYSNIMNFFKTEITLANGEIRKRPLIETNGETGEIVWDKGRDFATVRKVLSMPQVNIVKKTEVQTGGFSKESILPKRNSDKLIARKKDWDPKKYGGFDSPTVAYSVLVVAKVEKGKSKKLKSVKELLGITIMERSSFEKNPIDFLEAKGYKEVKKDLIIKLPKYSLFELENGRKRMLASAGELQKGNELALPSKYVNFLYLASHYEKLKGSPEDNEQKQLFVEQHKHYLDEIIEQISEFSKRVILADANLDKVLSAYNKHRDKPIREQAENIIHLFTLTNLGAPAAFKYFDTTIDRKRYTSTKEVLDATLIHQSITGLYETRIDLSQLGGDGGGGGGGSGSSGGVPWLMKKPLQLTVLVPLHEYQERLLQQTALPKEQKELLQKLFLKYDALWQHWENQVGHRRIKPHNIATGTLAPRPQKQYPINPKAKPSIQIVIDDLLKQGVLIQQNSTMNTPVYPVPKPDGKWRMVLDYREVNKTIPLIAAQNQHSAGILSSIYRGKYKTTLDLTNGFWAHPITPESYWLTAFTWQGKQYCWTRLPQGFLNSPALFTADVVDLLKEIPNVQAYVDDIYISHDDPQEHLEQLEKIFSILLNAGYVVSLKKSEIAQREVEFLGFNITKEGRGLTDTFKQKLLNITPPKDLKQLQSILGLLNFARNFIPNYSELVKPLYTIVANANGKFISWTEDNSNQLQHIISVLNQADNLEERNPETRLIIKVNSSPSAGYIRYYNEGSKRPIMYVNYIFSKAEAKFTQTEKLLTTMHKGLIKAMDLAMGQEILVYSPIVSMTKIQRTPLPERKALPVRWITWMTYLEDPRIQFHYDKSLPELQQIPNVTEDVIAKTKHPSEFAMVFYTDGSAIKHPDVNKSHSAGMGIAQVQFIPEYKIVHQWSIPLGDHTAQLAEIAAVEFACKKALKISGPVLIVTDSFYVAESANKELPYWKSNGFLNNKKKPLRHVSKWKSIAECLQLKPDIIIMHEKGHQQPMTTLHTEGNNLADKLATQGSYVVHAGKRTADGSEFEKRTADGSEFESPKKKAKVE

SEQ ID NO: 6837 - protein, 2085 aa, synthetic construct
MPAAKRVKLDGGDKKYSIGLDIGTNSVGWAVITDEYKVPSKKFKVLGNTDRHSIKKNLIGALLFDSGETAEATRLKRTARRRYTRRKNRICYLQEIFSNEMAKVDDSFFHRLEESFLVEEDKKHERHPIFGNIVDEVAYHEKYPTIYHLRKKLVDSTDKADLRLIYLALAHMIKFRGHFLIEGDLNPDNSDVDKLFIQLVQTYNQLFEENPINASGVDAKAILSARLSKSRRLENLIAQLPGEKKNGLFGNLIALSLGLTPNFKSNFDLAEDAKLQLSKDTYDDDLDNLLAQIGDQYADLFLAAKNLSDAILLSDILRVNTEITKAPLSASMIKRYDEHHQDLTLLKALVRQQLPEKYKEIFFDQSKNGYAGYIDGGASQEEFYKFIKPILEKMDGTEELLVKLNREDLLRKQRTFDNGSIPHQIHLGELHAILRRQEDFYPFLKDNREKIEKILTFRIPYYVGPLARGNSRFAWMTRKSEETITPWNFEEVVDKGASAQSFIERMTNFDKNLPNEKVLPKHSLLYEYFTVYNELTKVKYVTEGMRKPAFLSGEQKKAIVDLLFKTNRKVTVKQLKEDYFKKIECFDSVEISGVEDRFNASLGTYHDLLKIIKDKDFLDNEENEDILEDIVLTLTLFEDREMIEERLKTYAHLFDDKVMKQLKRRRYTGWGRLSRKLINGIRDKQSGKTILDFLKSDGFANRNFMQLIHDDSLTFKEDIQKAQVSGQGDSLHEHIANLAGSPAIKKGILQTVKVVDELVKVMGRHKPENIVIEMARENQTTQKGQKNSRERMKRIEEGIKELGSQILKEHPVENTQLQNEKLYLYYLQNGRDMYVDQELDINRLSDYDVDHIVPQSFLKDDSIDNKVLTRSDKARGKSDNVPSEEVVKKMKNYWRQLLNAKLITQRKFDNLTKAERGGLSELDKAGFIKRQLVETRQITKHVAQILDSRMNTKYDENDKLIREVKVITLKSKLVSDFRKDFQFYKVREINNYHHAHDAYLNAVVGTALIKKYPKLESEFVYGDYKVYDVRKMIAKSEQEIGKATAKYFFYSNIMNFFKTEITLANGEIRKRPLIETNGETGEIVWDKGRDFATVRKVLSMPQVNIVKKTEVQTGGFSKESILPKRNSDKLIARKKDWDPKKYGGFDSPTVAYSVLVVAKVEKGKSKKLKSVKELLGITIMERSSFEKNPIDFLEAKGYKEVKKDLIIKLPKYSLFELENGRKRMLASAGELQKGNELALPSKYVNFLYLASHYEKLKGSPEDNEQKQLFVEQHKHYLDEIIEQISEFSKRVILADANLDKVLSAYNKHRDKPIREQAENIIHLFTLTNLGAPAAFKYFDTTIDRKRYTSTKEVLDATLIHQSITGLYETRIDLSQLGGDGGGGGGGSGSSGGVPWLMKKPLQLTVLVPLHEYQERLLQQTALPKEQKELLQKLFLKYDALWQHWENQVGHRRIKPHNIATGTLAPRPQKQYPINPKAKPSIQIVIDDLLKQGVLIQQNSTMNTPVYPVPKPDGKWRMVLDYREVNKTIPLIAAQNQHSAGILSSIYRGKYKTTLDLTNGFWAHPITPESYWLTAFTWQGKQYCWTRLPQGFLNSPALFNADVVDLLKEIPNVQAYVDDIYISHDDPQEHLEQLEKIFSILLNAGYVVSLKKSEIAQREVEFLGFNITKEGRGLTDTFKQKLLNITPPKDLKQLQSILGLLNFARNFIPNYSELVKPLYTIVAPANGKFISWTEDNSNQLQHIISVLNQADNLEERNPETRLIIKVNSSPSAGYIRYYNEGSKRPIMYVNYIFSKAEAKFTQTEKLLTTMHKGLIKAMDLAMGQEILVYSPIVSMTKIQRTPLPERKALPVRWITWMTYLEDPRIQFHYDKSLPELQQIPNVTEDVIAKTKHPSEFAMVFYTDGSAIKHPDVNKSHSAGMGIAQVQFIPEYKIVHQWSIPLGDHTAQLAEIAAVEFACKKALKISGPVLIVTDSFYVAESANKELPYWKSNGFLNNKKKPLRHVSKWKSIAECLQLKPDIIIMHEKGHQQPMTTLHTEGNNLADKLATQGSYVVHAGKRTADGSEFEKRTADGSEFESPKKKAKVE

SEQ ID NO: 6838 - protein, 2174 aa, synthetic construct
MPAAKRVKLDGGDKKYSIGLDIGTNSVGWAVITDEYKVPSKKFKVLGNTDRHSIKKNLIGALLFDSGETAEATRLKRTARRRYTRRKNRICYLQEIFSNEMAKVDDSFFHRLEESFLVEEDKKHERHPIFGNIVDEVAYHEKYPTIYHLRKKLVDSTDKADLRLIYLALAHMIKFRGHFLIEGDLNPDNSDVDKLFIQLVQTYNQLFEENPINASGVDAKAILSARLSKSRRLENLIAQLPGEKKNGLFGNLIALSLGLTPNFKSNFDLAEDAKLQLSKDTYDDDLDNLLAQIGDQYADLFLAAKNLSDAILLSDILRVNTEITKAPLSASMIKRYDEHHQDLTLLKALVRQQLPEKYKEIFFDQSKNGYAGYIDGGASQEEFYKFIKPILEKMDGTEELLVKLNREDLLRKQRTFDNGSIPHQIHLGELHAILRRQEDFYPFLKDNREKIEKILTFRIPYYVGPLARGNSRFAWMTRKSEETITPWNFEEVVDKGASAQSFIERMTNFDKNLPNEKVLPKHSLLYEYFTVYNELTKVKYVTEGMRKPAFLSGEQKKAIVDLLFKTNRKVTVKQLKEDYFKKIECFDSVEISGVEDRFNASLGTYHDLLKIIKDKDFLDNEENEDILEDIVLTLTLFEDREMIEERLKTYAHLFDDKVMKQLKRRRYTGWGRLSRKLINGIRDKQSGKTILDFLKSDGFANRNFMQLIHDDSLTFKEDIQKAQVSGQGDSLHEHIANLAGSPAIKKGILQTVKVVDELVKVMGRHKPENIVIEMARENQTTQKGQKNSRERMKRIEEGIKELGSQILKEHPVENTQLQNEKLYLYYLQNGRDMYVDQELDINRLSDYDVDHIVPQSFLKDDSIDNKVLTRSDKARGKSDNVPSEEVVKKMKNYWRQLLNAKLITQRKFDNLTKAERGGLSELDKAGFIKRQLVETRQITKHVAQILDSRMNTKYDENDKLIREVKVITLKSKLVSDFRKDFQFYKVREINNYHHAHDAYLNAVVGTALIKKYPKLESEFVYGDYKVYDVRKMIAKSEQEIGKATAKYFFYSNIMNFFKTEITLANGEIRKRPLIETNGETGEIVWDKGRDFATVRKVLSMPQVNIVKKTEVQTGGFSKESILPKRNSDKLIARKKDWDPKKYGGFDSPTVAYSVLVVAKVEKGKSKKLKSVKELLGITIMERSSFEKNPIDFLEAKGYKEVKKDLIIKLPKYSLFELENGRKRMLASAGELQKGNELALPSKYVNFLYLASHYEKLKGSPEDNEQKQLFVEQHKHYLDEIIEQISEFSKRVILADANLDKVLSAYNKHRDKPIREQAENIIHLFTLTNLGAPAAFKYFDTTIDRKRYTSTKEVLDATLIHQSITGLYETRIDLSQLGGDGGGGGGGSGSSGGMDPLQLLQPLEAEIKGTKLKAHWNSGATITCVPQAFLEEEVPIKNIWIKTIHGEKEQPVYYLTFKIQGRKVEAEVISSPYDYILVSPSDIPWLMKKPLQLTTLVPLQEYEERLLKQTMLTGSYKEKLQSLFLKYDALWQHWENQVGHRRIKPHHIATGTVNPRPQKQYPINPKAKASIQTVINDLLKQGVLIQQNSIMNTPVYPVPKPDGKWRMVLDYREVNKTIPLIAAQNQHSAGILSSIFRGKYKTTLDLSNGFWAHSITPESYWLTAFTWLGQQYCWTRLPQGFLNSPALFNADVVDLLKEVPNVQVYVDDIYISHDDPREHLEQLEKVFSLLLNAGYVVSLKKSEIAQHEVEFLGFNITKEGRGLTETFKQKLLNITPPRDLKQLQSILGLLNFARNFIPNFSELVKPLYNIIATAPGKYITWTTDNSQQLQNIISMLNSAENLEERNPEVRLIMKVNTSPSAGYIRFYNEFAKRPIMYLNYVYTKAEVKFTNTEKLLTTIHKGLIKALDLGMGQEILVYSPIVSMTKIQKTPLPERKALPIRWITWMSYLEDPRIQFHYDKTLPELQQVPTVTDDIIAKIKHPSEFSMVFYTDGSAIKHPNVNKSHNAGMGIAQVQFKPEFTVINTWSIPLGDHTAQLAEVAAVEFACKKALKIDGPVLIVTDSFYVAESVNKELPYWQSNGFFNNKKKPLKHVSKWKSIADCIQLKPDIIIIHEKGHQPTASTFHTEGNNLADKLATQGSYVVNAGKRTADGSEFEKRTADGSEFESPKKKAKVE

SEQ ID NO: 6839 - protein, 2092 aa, synthetic construct
MPAAKRVKLDGGDKKYSIGLDIGTNSVGWAVITDEYKVPSKKFKVLGNTDRHSIKKNLIGALLFDSGETAEATRLKRTARRRYTRRKNRICYLQEIFSNEMAKVDDSFFHRLEESFLVEEDKKHERHPIFGNIVDEVAYHEKYPTIYHLRKKLVDSTDKADLRLIYLALAHMIKFRGHFLIEGDLNPDNSDVDKLFIQLVQTYNQLFEENPINASGVDAKAILSARLSKSRRLENLIAQLPGEKKNGLFGNLIALSLGLTPNFKSNFDLAEDAKLQLSKDTYDDDLDNLLAQIGDQYADLFLAAKNLSDAILLSDILRVNTEITKAPLSASMIKRYDEHHQDLTLLKALVRQQLPEKYKEIFFDQSKNGYAGYIDGGASQEEFYKFIKPILEKMDGTEELLVKLNREDLLRKQRTFDNGSIPHQIHLGELHAILRRQEDFYPFLKDNREKIEKILTFRIPYYVGPLARGNSRFAWMTRKSEETITPWNFEEVVDKGASAQSFIERMTNFDKNLPNEKVLPKHSLLYEYFTVYNELTKVKYVTEGMRKPAFLSGEQKKAIVDLLFKTNRKVTVKQLKEDYFKKIECFDSVEISGVEDRFNASLGTYHDLLKIIKDKDFLDNEENEDILEDIVLTLTLFEDREMIEERLKTYAHLFDDKVMKQLKRRRYTGWGRLSRKLINGIRDKQSGKTILDFLKSDGFANRNFMQLIHDDSLTFKEDIQKAQVSGQGDSLHEHIANLAGSPAIKKGILQTVKVVDELVKVMGRHKPENIVIEMARENQTTQKGQKNSRERMKRIEEGIKELGSQILKEHPVENTQLQNEKLYLYYLQNGRDMYVDQELDINRLSDYDVDHIVPQSFLKDDSIDNKVLTRSDKARGKSDNVPSEEVVKKMKNYWRQLLNAKLITQRKFDNLTKAERGGLSELDKAGFIKRQLVETRQITKHVAQILDSRMNTKYDENDKLIREVKVITLKSKLVSDFRKDFQFYKVREINNYHHAHDAYLNAVVGTALIKKYPKLESEFVYGDYKVYDVRKMIAKSEQEIGKATAKYFFYSNIMNFFKTEITLANGEIRKRPLIETNGETGEIVWDKGRDFATVRKVLSMPQVNIVKKTEVQTGGFSKESILPKRNSDKLIARKKDWDPKKYGGFDSPTVAYSVLVVAKVEKGKSKKLKSVKELLGITIMERSSFEKNPIDFLEAKGYKEVKKDLIIKLPKYSLFELENGRKRMLASAGELQKGNELALPSKYVNFLYLASHYEKLKGSPEDNEQKQLFVEQHKHYLDEIIEQISEFSKRVILADANLDKVLSAYNKHRDKPIREQAENIIHLFTLTNLGAPAAFKYFDTTIDRKRYTSTKEVLDATLIHQSITGLYETRIDLSQLGGDGGGGGGGSGSSGGVLNLEEEYRLHEKPVPSSIDPSWLQLFPTVWAERAGMGLANQVPPVVVELRSGASPVAVRQYPMSKEAREGIRPHIQRFLDLGVLVPCQSPWNTPLLPVKKPGTNDYRPVQDLREINKRVQDIHPTVPNPYNLLSSLPPSHTWYSVLDLKDAFFCLKLHPNSQPLFAFEWRDPEKGNTGQLTWTRLPQGFKNSPTLFNEALHRDLAPFRALNPQVVLLQYVDDLLVAAPTYRDCKEGTQKLLQELSKLGYRVSAKKAQLCQKEVTYLGYLLKEGKRWLTPARKATVMKIPPPTTPRQVREFLGTAGFCRLWIPGFASLAAPLYPLTKPSIPFIWTEEHQKAFDRIKEALLSAPALALPDLTKPFTLYVDERAGVARGVLTQTLGPWRRPVAYLSKKLDPVASGWPTCLKAVAAVALLLKDADKLTLGQNVTVIASHSLESIVRQPPDRWMTNARMTHYQSLLLNERVSFAPPAVLNPATLLPVESEATPVHRCSEILAEETGTRRDLKDQPLPGVPAWYTDGSSFIAEGKRRAGAAIVDGKRTVWASSLPEGTSAQKAELVALTQALRLAEGKDINIYTDSRYAFATAHIHGAIYKQRGWLTSAGKDIKNKEEILALLEAIHLPKRVAIIHCPGHQKGNDPVATGNRRADEAAKQAALSTRVLAETTKPAGKRTADGSEFEKRTADGSEFESPKKKAKVE

SEQ ID NO: 6840 - protein, 2096 aa, synthetic construct
MPAAKRVKLDGGDKKYSIGLDIGTNSVGWAVITDEYKVPSKKFKVLGNTDRHSIKKNLIGALLFDSGETAEATRLKRTARRRYTRRKNRICYLQEIFSNEMAKVDDSFFHRLEESFLVEEDKKHERHPIFGNIVDEVAYHEKYPTIYHLRKKLVDSTDKADLRLIYLALAHMIKFRGHFLIEGDLNPDNSDVDKLFIQLVQTYNQLFEENPINASGVDAKAILSARLSKSRRLENLIAQLPGEKKNGLFGNLIALSLGLTPNFKSNFDLAEDAKLQLSKDTYDDDLDNLLAQIGDQYADLFLAAKNLSDAILLSDILRVNTEITKAPLSASMIKRYDEHHQDLTLLKALVRQQLPEKYKEIFFDQSKNGYAGYIDGGASQEEFYKFIKPILEKMDGTEELLVKLNREDLLRKQRTFDNGSIPHQIHLGELHAILRRQEDFYPFLKDNREKIEKILTFRIPYYVGPLARGNSRFAWMTRKSEETITPWNFEEVVDKGASAQSFIERMTNFDKNLPNEKVLPKHSLLYEYFTVYNELTKVKYVTEGMRKPAFLSGEQKKAIVDLLFKTNRKVTVKQLKEDYFKKIECFDSVEISGVEDRFNASLGTYHDLLKIIKDKDFLDNEENEDILEDIVLTLTLFEDREMIEERLKTYAHLFDDKVMKQLKRRRYTGWGRLSRKLINGIRDKQSGKTILDFLKSDGFANRNFMQLIHDDSLTFKEDIQKAQVSGQGDSLHEHIANLAGSPAIKKGILQTVKVVDELVKVMGRHKPENIVIEMARENQTTQKGQKNSRERMKRIEEGIKELGSQILKEHPVENTQLQNEKLYLYYLQNGRDMYVDQELDINRLSDYDVDHIVPQSFLKDDSIDNKVLTRSDKARGKSDNVPSEEVVKKMKNYWRQLLNAKLITQRKFDNLTKAERGGLSELDKAGFIKRQLVETRQITKHVAQILDSRMNTKYDENDKLIREVKVITLKSKLVSDFRKDFQFYKVREINNYHHAHDAYLNAVVGTALIKKYPKLESEFVYGDYKVYDVRKMIAKSEQEIGKATAKYFFYSNIMNFFKTEITLANGEIRKRPLIETNGETGEIVWDKGRDFATVRKVLSMPQVNIVKKTEVQTGGFSKESILPKRNSDKLIARKKDWDPKKYGGFDSPTVAYSVLVVAKVEKGKSKKLKSVKELLGITIMERSSFEKNPIDFLEAKGYKEVKKDLIIKLPKYSLFELENGRKRMLASAGELQKGNELALPSKYVNFLYLASHYEKLKGSPEDNEQKQLFVEQHKHYLDEIIEQISEFSKRVILADANLDKVLSAYNKHRDKPIREQAENIIHLFTLTNLGAPAAFKYFDTTIDRKRYTSTKEVLDATLIHQSITGLYETRIDLSQLGGDGGGGGGSSGGSGGTAPLEEEYRLFLEAPIQNVTLLEQWKREIPKVWAEINPPGLASTQAPIHVQLLSTALPVRVRQYPITLEAKRSLRETIRKFRAAGILRPVHSPWNTPLLPVRKSGTSEYRMVQDLREVNKRVETIHPTVPNPYTLLSLLPPDRIWYSVLDLKDAFFCIPLAPESQLIFAFEWADAEEGESGQLTWTRLPQGFKNSPTLFDEALNRDLQGFRLDHPSVSLLQYVDDLLIAADTQAACLSATRDLLMTLAELGYRVSGKKAQLCQEEVTYLGFKIHKGSRSLSNSRTQAILQIPVPKTKRQVREFLGTIGYCRLWIPGFAELAQPLYAATRGGNDPLVWGEKEEEAFQSLKLALTQPPALALPSLDKPFQLFVEETSGAAKGVLTQALGPWKRPVAYLSKRLDPVAAGWPRCLRAIAAAALLTREASKLTFGQDIEITSSHNLESLLRSPPDKWLTNARITQYQVLLLDPPRVRFKQTAALNPATLLPETDDTLPIHHCLDTLDSLTSTRPDLTDQPLAQAEATLFTDGSSYIRDGKRYAGAAVVTLDSVIWAEPLPIGTSAQKAELIALTKALEWSKDKSVNIYTDSRYAFATLHVHGMIYRERGLLTAGGKAIKNAPEILALLTAVWLPKRVAVMHCKGHQKDDAPTSTGNRRADEVAREVAIRPLSTQATISAGKRTADGSEFEKRTADGSEFESPKKKAKVE

SEQ ID NO: 6841 - protein, 2096 aa, synthetic construct
MPAAKRVKLDGGDKKYSIGLDIGTNSVGWAVITDEYKVPSKKFKVLGNTDRHSIKKNLIGALLFDSGETAEATRLKRTARRRYTRRKNRICYLQEIFSNEMAKVDDSFFHRLEESFLVEEDKKHERHPIFGNIVDEVAYHEKYPTIYHLRKKLVDSTDKADLRLIYLALAHMIKFRGHFLIEGDLNPDNSDVDKLFIQLVQTYNQLFEENPINASGVDAKAILSARLSKSRRLENLIAQLPGEKKNGLFGNLIALSLGLTPNFKSNFDLAEDAKLQLSKDTYDDDLDNLLAQIGDQYADLFLAAKNLSDAILLSDILRVNTEITKAPLSASMIKRYDEHHQDLTLLKALVRQQLPEKYKEIFFDQSKNGYAGYIDGGASQEEFYKFIKPILEKMDGTEELLVKLNREDLLRKQRTFDNGSIPHQIHLGELHAILRRQEDFYPFLKDNREKIEKILTFRIPYYVGPLARGNSRFAWMTRKSEETITPWNFEEVVDKGASAQSFIERMTNFDKNLPNEKVLPKHSLLYEYFTVYNELTKVKYVTEGMRKPAFLSGEQKKAIVDLLFKTNRKVTVKQLKEDYFKKIECFDSVEISGVEDRFNASLGTYHDLLKIIKDKDFLDNEENEDILEDIVLTLTLFEDREMIEERLKTYAHLFDDKVMKQLKRRRYTGWGRLSRKLINGIRDKQSGKTILDFLKSDGFANRNFMQLIHDDSLTFKEDIQKAQVSGQGDSLHEHIANLAGSPAIKKGILQTVKVVDELVKVMGRHKPENIVIEMARENQTTQKGQKNSRERMKRIEEGIKELGSQILKEHPVENTQLQNEKLYLYYLQNGRDMYVDQELDINRLSDYDVDHIVPQSFLKDDSIDNKVLTRSDKARGKSDNVPSEEVVKKMKNYWRQLLNAKLITQRKFDNLTKAERGGLSELDKAGFIKRQLVETRQITKHVAQILDSRMNTKYDENDKLIREVKVITLKSKLVSDFRKDFQFYKVREINNYHHAHDAYLNAVVGTALIKKYPKLESEFVYGDYKVYDVRKMIAKSEQEIGKATAKYFFYSNIMNFFKTEITLANGEIRKRPLIETNGETGEIVWDKGRDFATVRKVLSMPQVNIVKKTEVQTGGFSKESILPKRNSDKLIARKKDWDPKKYGGFDSPTVAYSVLVVAKVEKGKSKKLKSVKELLGITIMERSSFEKNPIDFLEAKGYKEVKKDLIIKLPKYSLFELENGRKRMLASAGELQKGNELALPSKYVNFLYLASHYEKLKGSPEDNEQKQLFVEQHKHYLDEIIEQISEFSKRVILADANLDKVLSAYNKHRDKPIREQAENIIHLFTLTNLGAPAAFKYFDTTIDRKRYTSTKEVLDATLIHQSITGLYETRIDLSQLGGDGGGGGGSSGGSGGTAPLEEEYRLFLEAPIQNVTLLEQWKREIPKVWAEINPPGLASTQAPIHVQLLSTALPVRVRQYPITLEAKRSLRETIRKFRAAGILRPVHSPWNTPLLPVRKSGTSEYRMVQDLREVNKRVETIHPTVPNPYTLLSLLPPDRIWYSVLDLKDAFFCIPLAPESQLIFAFEWADAEEGESGQLTWTRLPQGFKNSPTLFNEALNRDLQGFRLDHPSVSLLQYVDDLLIAADTQAACLSATRDLLMTLAELGYRVSGKKAQLCQEEVTYLGFKIHKGSRSLSNSRTQAILQIPVPKTKRQVREFLGTIGYCRLWIPGFAELAQPLYAATRPGNDPLVWGEKEEEAFQSLKLALTQPPALALPSLDKPFQLFVEETSGAAKGVLTQALGPWKRPVAYLSKRLDPVAAGWPRCLRAIAAAALLTREASKLTFGQDIEITSSHNLESLLRSPPDKWLTNARITQYQVLLLDPPRVRFKQTAALNPATLLPETDDTLPIHHCLDTLDSLTSTRPDLTDQPLAQAEATLFTDGSSYIRDGKRYAGAAVVTLDSVIWAEPLPIGTSAQKAELIALTKALEWSKDKSVNIYTDSRYAFATLHVHGMIYRERGWLTAGGKAIKNAPEILALLTAVWLPKRVAVMHCKGHQKDDAPTSTGNRRADEVAREVAIRPLSTQATISAGKRTADGSEFEKRTADGSEFESPKKKAKVE

SEQ ID NO: 6842 - protein, 2100 aa, synthetic construct
MPAAKRVKLDGGDKKYSIGLDIGTNSVGWAVITDEYKVPSKKFKVLGNTDRHSIKKNLIGALLFDSGETAEATRLKRTARRRYTRRKNRICYLQEIFSNEMAKVDDSFFHRLEESFLVEEDKKHERHPIFGNIVDEVAYHEKYPTIYHLRKKLVDSTDKADLRLIYLALAHMIKFRGHFLIEGDLNPDNSDVDKLFIQLVQTYNQLFEENPINASGVDAKAILSARLSKSRRLENLIAQLPGEKKNGLFGNLIALSLGLTPNFKSNFDLAEDAKLQLSKDTYDDDLDNLLAQIGDQYADLFLAAKNLSDAILLSDILRVNTEITKAPLSASMIKRYDEHHQDLTLLKALVRQQLPEKYKEIFFDQSKNGYAGYIDGGASQEEFYKFIKPILEKMDGTEELLVKLNREDLLRKQRTFDNGSIPHQIHLGELHAILRRQEDFYPFLKDNREKIEKILTFRIPYYVGPLARGNSRFAWMTRKSEETITPWNFEEVVDKGASAQSFIERMTNFDKNLPNEKVLPKHSLLYEYFTVYNELTKVKYVTEGMRKPAFLSGEQKKAIVDLLFKTNRKVTVKQLKEDYFKKIECFDSVEISGVEDRFNASLGTYHDLLKIIKDKDFLDNEENEDILEDIVLTLTLFEDREMIEERLKTYAHLFDDKVMKQLKRRRYTGWGRLSRKLINGIRDKQSGKTILDFLKSDGFANRNFMQLIHDDSLTFKEDIQKAQVSGQGDSLHEHIANLAGSPAIKKGILQTVKVVDELVKVMGRHKPENIVIEMARENQTTQKGQKNSRERMKRIEEGIKELGSQILKEHPVENTQLQNEKLYLYYLQNGRDMYVDQELDINRLSDYDVDHIVPQSFLKDDSIDNKVLTRSDKARGKSDNVPSEEVVKKMKNYWRQLLNAKLITQRKFDNLTKAERGGLSELDKAGFIKRQLVETRQITKHVAQILDSRMNTKYDENDKLIREVKVITLKSKLVSDFRKDFQFYKVREINNYHHAHDAYLNAVVGTALIKKYPKLESEFVYGDYKVYDVRKMIAKSEQEIGKATAKYFFYSNIMNFFKTEITLANGEIRKRPLIETNGETGEIVWDKGRDFATVRKVLSMPQVNIVKKTEVQTGGFSKESILPKRNSDKLIARKKDWDPKKYGGFDSPTVAYSVLVVAKVEKGKSKKLKSVKELLGITIMERSSFEKNPIDFLEAKGYKEVKKDLIIKLPKYSLFELENGRKRMLASAGELQKGNELALPSKYVNFLYLASHYEKLKGSPEDNEQKQLFVEQHKHYLDEIIEQISEFSKRVILADANLDKVLSAYNKHRDKPIREQAENIIHLFTLTNLGAPAAFKYFDTTIDRKRYTSTKEVLDATLIHQSITGLYETRIDLSQLGGDGGGGGGSSGGSGGTVSLQDEHRLFDIPVTTSLPDVWLQDFPQAWAETGGLGRAKCQAPIIIDLKPTAVPVSIKQYPMSLEAHMGIRQHIIKFLELGVLRPCRSPWNTPLLPVKKPGTQDYRPVQDLREINKRTVDIHPTVPNPYNLLSTLKPDYSWYTVLDLKDAFFCLPLAPQSQELFAFEWKDPERGISGQLTWTRLPQGFKNSPTLFNEALHRDLTDFRTQHPEVTLLQYVDDLLLAAPTKKACTQGTRHLLQELGEKGYRASAKKAQICQTKVTYLGYILSEGKRWLTPGRIETVARIPPPRNPREVREFLGTAGFCRLWIPGFAELAAPLYALTKPSTPFTWQTEHQLAFEALKKALLSAPALGLPDTSKPFTLFLDERQGIAKGVLTQKLGPWKRPVAYLSKKLDPVAAGWPPCLRIMAATAMLVKDSAKLTLGQPLTVITPHTLEAIVRQPPDRWITNARLTHYQALLLDTDRVQFGPPVTLNPATLLPVPENQPSPHDCRQVLAETHGTREDLKDQELPDADHTWYTDGSSYLDSGTRRAGAAVVDGHNTIWAQSLPPGTSAQKAELIALTKALELSKGKKANIYTDSRYAFATAHTHGSIYERRGWLTSEGKEIKNKAEIIALLKALFLPQEVAIIHCPGHQKGQDPVAVGNRQADRVARQAAMAEVLTLATEPDNTSHITAGKRTADGSEFEKRTADGSEFESPKKKAKVE

SEQ ID NO: 6843 - protein, 2085 aa, synthetic construct
MPAAKRVKLDGGDKKYSIGLDIGTNSVGWAVITDEYKVPSKKFKVLGNTDRHSIKKNLIGALLFDSGETAEATRLKRTARRRYTRRKNRICYLQEIFSNEMAKVDDSFFHRLEESFLVEEDKKHERHPIFGNIVDEVAYHEKYPTIYHLRKKLVDSTDKADLRLIYLALAHMIKFRGHFLIEGDLNPDNSDVDKLFIQLVQTYNQLFEENPINASGVDAKAILSARLSKSRRLENLIAQLPGEKKNGLFGNLIALSLGLTPNFKSNFDLAEDAKLQLSKDTYDDDLDNLLAQIGDQYADLFLAAKNLSDAILLSDILRVNTEITKAPLSASMIKRYDEHHQDLTLLKALVRQQLPEKYKEIFFDQSKNGYAGYIDGGASQEEFYKFIKPILEKMDGTEELLVKLNREDLLRKQRTFDNGSIPHQIHLGELHAILRRQEDFYPFLKDNREKIEKILTFRIPYYVGPLARGNSRFAWMTRKSEETITPWNFEEVVDKGASAQSFIERMTNFDKNLPNEKVLPKHSLLYEYFTVYNELTKVKYVTEGMRKPAFLSGEQKKAIVDLLFKTNRKVTVKQLKEDYFKKIECFDSVEISGVEDRFNASLGTYHDLLKIIKDKDFLDNEENEDILEDIVLTLTLFEDREMIEERLKTYAHLFDDKVMKQLKRRRYTGWGRLSRKLINGIRDKQSGKTILDFLKSDGFANRNFMQLIHDDSLTFKEDIQKAQVSGQGDSLHEHIANLAGSPAIKKGILQTVKVVDELVKVMGRHKPENIVIEMARENQTTQKGQKNSRERMKRIEEGIKELGSQILKEHPVENTQLQNEKLYLYYLQNGRDMYVDQELDINRLSDYDVDHIVPQSFLKDDSIDNKVLTRSDKARGKSDNVPSEEVVKKMKNYWRQLLNAKLITQRKFDNLTKAERGGLSELDKAGFIKRQLVETRQITKHVAQILDSRMNTKYDENDKLIREVKVITLKSKLVSDFRKDFQFYKVREINNYHHAHDAYLNAVVGTALIKKYPKLESEFVYGDYKVYDVRKMIAKSEQEIGKATAKYFFYSNIMNFFKTEITLANGEIRKRPLIETNGETGEIVWDKGRDFATVRKVLSMPQVNIVKKTEVQTGGFSKESILPKRNSDKLIARKKDWDPKKYGGFDSPTVAYSVLVVAKVEKGKSKKLKSVKELLGITIMERSSFEKNPIDFLEAKGYKEVKKDLIIKLPKYSLFELENGRKRMLASAGELQKGNELALPSKYVNFLYLASHYEKLKGSPEDNEQKQLFVEQHKHYLDEIIEQISEFSKRVILADANLDKVLSAYNKHRDKPIREQAENIIHLFTLTNLGAPAAFKYFDTTIDRKRYTSTKEVLDATLIHQSITGLYETRIDLSQLGGDGGGGGGSSGGSGGVPWILKKPLELTIKLDLEEQQGTLLNNSILSKKGKEELKQLFEKYSALWQSWENQVGHRRIRPHKIATGTVKPTPQKQYHINPKAKPDIQIVINDLLKQGVLIQKESTMNTPVYPVPKPNGRWRMVLDYRAVNKVTPLIAVQNQHSYGILGSLFKGRYKTTIDLSNGFWAHPIVPEDYWITAFTWQGKQYCWTVLPQGFLNSPGLFTGDVVDLLQGIPNVEVYVDDVYISHDSEKEHLEYLDILFNRLKEAGYIISLKKSNIANSIVDFLGFQITNEGRGLTDTFKEKLENITAPTTLKQLQSILGLLNFARNFIPDFTELIAPLYALIPKSTKNYVPWQIEHSTTLETLITKLNGAEYLQGRKGDKTLIMKVNASYTTGYIRYYNEGEKKPISYVSIVFSKTELKFTELEKLLTTVHKGLLKALDLSMGQNIHVYSPIVSMQNIQKTPQTAKKALASRWLSWLSYLEDPRIRFFYDPQMPALKDLPAVDTGKDNKKHPSNFQHIFYTDGSAITSPTKEGHLNAGMGIVYFINKDGNLQKQQEWSISLGNHTAQFAEIAAFEFALKKCLPLGGNILVVTDSNYVAKAYNEELDVWASNGFVNNRKKPLKHISKWKSVADLKRLRPDVVVTHEPGHQKLDSSPHAYGNNLADQLATQASFKVHAGKRTADGSEFEKRTADGSEFESPKKKAKVE

SEQ ID NO: 6844 - protein, 2093 aa, synthetic construct
MPAAKRVKLDGGDKKYSIGLDIGTNSVGWAVITDEYKVPSKKFKVLGNTDRHSIKKNLIGALLFDSGETAEATRLKRTARRRYTRRKNRICYLQEIFSNEMAKVDDSFFHRLEESFLVEEDKKHERHPIFGNIVDEVAYHEKYPTIYHLRKKLVDSTDKADLRLIYLALAHMIKFRGHFLIEGDLNPDNSDVDKLFIQLVQTYNQLFEENPINASGVDAKAILSARLSKSRRLENLIAQLPGEKKNGLFGNLIALSLGLTPNFKSNFDLAEDAKLQLSKDTYDDDLDNLLAQIGDQYADLFLAAKNLSDAILLSDILRVNTEITKAPLSASMIKRYDEHHQDLTLLKALVRQQLPEKYKEIFFDQSKNGYAGYIDGGASQEEFYKFIKPILEKMDGTEELLVKLNREDLLRKQRTFDNGSIPHQIHLGELHAILRRQEDFYPFLKDNREKIEKILTFRIPYYVGPLARGNSRFAWMTRKSEETITPWNFEEVVDKGASAQSFIERMTNFDKNLPNEKVLPKHSLLYEYFTVYNELTKVKYVTEGMRKPAFLSGEQKKAIVDLLFKTNRKVTVKQLKEDYFKKIECFDSVEISGVEDRFNASLGTYHDLLKIIKDKDFLDNEENEDILEDIVLTLTLFEDREMIEERLKTYAHLFDDKVMKQLKRRRYTGWGRLSRKLINGIRDKQSGKTILDFLKSDGFANRNFMQLIHDDSLTFKEDIQKAQVSGQGDSLHEHIANLAGSPAIKKGILQTVKVVDELVKVMGRHKPENIVIEMARENQTTQKGQKNSRERMKRIEEGIKELGSQILKEHPVENTQLQNEKLYLYYLQNGRDMYVDQELDINRLSDYDVDHIVPQSFLKDDSIDNKVLTRSDKARGKSDNVPSEEVVKKMKNYWRQLLNAKLITQRKFDNLTKAERGGLSELDKAGFIKRQLVETRQITKHVAQILDSRMNTKYDENDKLIREVKVITLKSKLVSDFRKDFQFYKVREINNYHHAHDAYLNAVVGTALIKKYPKLESEFVYGDYKVYDVRKMIAKSEQEIGKATAKYFFYSNIMNFFKTEITLANGEIRKRPLIETNGETGEIVWDKGRDFATVRKVLSMPQVNIVKKTEVQTGGFSKESILPKRNSDKLIARKKDWDPKKYGGFDSPTVAYSVLVVAKVEKGKSKKLKSVKELLGITIMERSSFEKNPIDFLEAKGYKEVKKDLIIKLPKYSLFELENGRKRMLASAGELQKGNELALPSKYVNFLYLASHYEKLKGSPEDNEQKQLFVEQHKHYLDEIIEQISEFSKRVILADANLDKVLSAYNKHRDKPIREQAENIIHLFTLTNLGAPAAFKYFDTTIDRKRYTSTKEVLDATLIHQSITGLYETRIDLSQLGGDGGGGGGSSGGSGGTLQLEEEYRLFEPESTQKQEMDIWLKNFPQAWAETGGMGTAHCQAPVLIQLKATATPISIRQYPMPHEAYQGIKPHIRRMLDQGILKPCQSPWNTPLLPVKKPGTEDYRPVQDLREVNKRVEDIHPTVPNPYNLLSTLPPSHPWYTVLDLKDAFFCLRLHSESQLLFAFEWRDPEIGLSGQLTWTRLPQGFKNSPTLFNEALHSDLADFRVRYPALVLLQYVDDLLLAAATRTECLEGTKALLETLGNKGYRASAKKAQICLQEVTYLGYSLKDGQRWLTKARKEAILSIPVPKNSRQVREFLGTAGYCRLWIPGFAELAAPLYPLTRPGTLFQWGTEQQLAFEDIKKALLSSPALGLPDITKPFELFIDENSGFAKGVLVQKLGPWKRPVAYLSKKLDTVASGWPPCLRMVAAIAILVKDAGKLTLGQPLTILTSHPVEALVRQPPNKWLSNARMTHYQAMLLDAERVHFGPTVSLNPATLLPLPSGGNHHDCLQILAETHGTRPDLTDQPLPDADLTWYTDGSSFIRNGEREAGAAVTTESEVIWAAPLPPGTSAQRAELIALTQALKMAEGKKLTVYTDSRYAFATTHVHGEIYRRRGWLTSEGKEIKNKNEILALLEALFLPKRLSIIHCPGHQKGDSPQAKGNRLADDTAKKAATETHSSLTVLPAGKRTADGSEFEKRTADGSEFESPKKKAKVE

SEQ ID NO: 6845 - protein, 2125 aa, synthetic construct
MPAAKRVKLDGGDKKYSIGLDIGTNSVGWAVITDEYKVPSKKFKVLGNTDRHSIKKNLIGALLFDSGETAEATRLKRTARRRYTRRKNRICYLQEIFSNEMAKVDDSFFHRLEESFLVEEDKKHERHPIFGNIVDEVAYHEKYPTIYHLRKKLVDSTDKADLRLIYLALAHMIKFRGHFLIEGDLNPDNSDVDKLFIQLVQTYNQLFEENPINASGVDAKAILSARLSKSRRLENLIAQLPGEKKNGLFGNLIALSLGLTPNFKSNFDLAEDAKLQLSKDTYDDDLDNLLAQIGDQYADLFLAAKNLSDAILLSDILRVNTEITKAPLSASMIKRYDEHHQDLTLLKALVRQQLPEKYKEIFFDQSKNGYAGYIDGGASQEEFYKFIKPILEKMDGTEELLVKLNREDLLRKQRTFDNGSIPHQIHLGELHAILRRQEDFYPFLKDNREKIEKILTFRIPYYVGPLARGNSRFAWMTRKSEETITPWNFEEVVDKGASAQSFIERMTNFDKNLPNEKVLPKHSLLYEYFTVYNELTKVKYVTEGMRKPAFLSGEQKKAIVDLLFKTNRKVTVKQLKEDYFKKIECFDSVEISGVEDRFNASLGTYHDLLKIIKDKDFLDNEENEDILEDIVLTLTLFEDREMIEERLKTYAHLFDDKVMKQLKRRRYTGWGRLSRKLINGIRDKQSGKTILDFLKSDGFANRNFMQLIHDDSLTFKEDIQKAQVSGQGDSLHEHIANLAGSPAIKKGILQTVKVVDELVKVMGRHKPENIVIEMARENQTTQKGQKNSRERMKRIEEGIKELGSQILKEHPVENTQLQNEKLYLYYLQNGRDMYVDQELDINRLSDYDVDHIVPQSFLKDDSIDNKVLTRSDKARGKSDNVPSEEVVKKMKNYWRQLLNAKLITQRKFDNLTKAERGGLSELDKAGFIKRQLVETRQITKHVAQILDSRMNTKYDENDKLIREVKVITLKSKLVSDFRKDFQFYKVREINNYHHAHDAYLNAVVGTALIKKYPKLESEFVYGDYKVYDVRKMIAKSEQEIGKATAKYFFYSNIMNFFKTEITLANGEIRKRPLIETNGETGEIVWDKGRDFATVRKVLSMPQVNIVKKTEVQTGGFSKESILPKRNSDKLIARKKDWDPKKYGGFDSPTVAYSVLVVAKVEKGKSKKLKSVKELLGITIMERSSFEKNPIDFLEAKGYKEVKKDLIIKLPKYSLFELENGRKRMLASAGELQKGNELALPSKYVNFLYLASHYEKLKGSPEDNEQKQLFVEQHKHYLDEIIEQISEFSKRVILADANLDKVLSAYNKHRDKPIREQAENIIHLFTLTNLGAPAAFKYFDTTIDRKRYTSTKEVLDATLIHQSITGLYETRIDLSQLGGDGGGGGGSSGGSGGLLGRDLLTKLKAQIQFSTEGPQVTWEDRPAMCLVLNLEEEYRLHEKPVPPSIDPSWLQLFPMVWAEKAGMGLANQVPPVVVELKSDASPVAVRQYPMSKEAREGIRPHIQRFLDLGILVPCQSPWNTPLLPVKKPGTNDYRPVQDLREVNKRVQDIHPTVPNPYNLLSSLPPSHTWYSVLDLKDAFFCLKLHPNSQPLFAFEWRDPEKGNTGQLTWTRLPQGFKNSPTLFNEALHRDLASFRALNPQVVMLQYVDDLLVAAPTYRDCKEGTRRLLQELSKLGYRVSAKKAQLCREEVTYLGYLLKGGKRWLTPARKATVMKIPTPTTPRQVREFLGTAGFCRLWIPGFASLAAPLYPLTRPKVPFTWTEAHQEAFGRIKEALLSAPALALPDLTKPFALYVDEKEGVARGVLTQTLGPWRRPVAYLSKKLDPVASGWPTCLKAIAAVALLLKDADKLTLGQNVLVIAPHNLESIVRQPPDRWMTNARMTHYQSLLLNERVSFAPPAILNPATLLPVESDDTPIHICSEILAEETGTRPDLRDQPLPGVPAWYTDGSSFIMDGRRQAGAAIVDNKRTVWASNLPEGTSAQKAELIALTQALRLAEGKSINIYTDSRYAFATAHVHGAIYKQRGWLTSAGKDIKNKEEILALLEAIHLPKRVAIIHCPGHQRGTDPVATGNRKADEAAKQAAQSTRILTETTKNAGKRTADGSEFEKRTADGSEFESPKKKAKVE

SEQ ID NO: 6846 - protein, 2125 aa, synthetic construct
MPAAKRVKLDGGDKKYSIGLDIGTNSVGWAVITDEYKVPSKKFKVLGNTDRHSIKKNLIGALLFDSGETAEATRLKRTARRRYTRRKNRICYLQEIFSNEMAKVDDSFFHRLEESFLVEEDKKHERHPIFGNIVDEVAYHEKYPTIYHLRKKLVDSTDKADLRLIYLALAHMIKFRGHFLIEGDLNPDNSDVDKLFIQLVQTYNQLFEENPINASGVDAKAILSARLSKSRRLENLIAQLPGEKKNGLFGNLIALSLGLTPNFKSNFDLAEDAKLQLSKDTYDDDLDNLLAQIGDQYADLFLAAKNLSDAILLSDILRVNTEITKAPLSASMIKRYDEHHQDLTLLKALVRQQLPEKYKEIFFDQSKNGYAGYIDGGASQEEFYKFIKPILEKMDGTEELLVKLNREDLLRKQRTFDNGSIPHQIHLGELHAILRRQEDFYPFLKDNREKIEKILTFRIPYYVGPLARGNSRFAWMTRKSEETITPWNFEEVVDKGASAQSFIERMTNFDKNLPNEKVLPKHSLLYEYFTVYNELTKVKYVTEGMRKPAFLSGEQKKAIVDLLFKTNRKVTVKQLKEDYFKKIECFDSVEISGVEDRFNASLGTYHDLLKIIKDKDFLDNEENEDILEDIVLTLTLFEDREMIEERLKTYAHLFDDKVMKQLKRRRYTGWGRLSRKLINGIRDKQSGKTILDFLKSDGFANRNFMQLIHDDSLTFKEDIQKAQVSGQGDSLHEHIANLAGSPAIKKGILQTVKVVDELVKVMGRHKPENIVIEMARENQTTQKGQKNSRERMKRIEEGIKELGSQILKEHPVENTQLQNEKLYLYYLQNGRDMYVDQELDINRLSDYDVDHIVPQSFLKDDSIDNKVLTRSDKARGKSDNVPSEEVVKKMKNYWRQLLNAKLITQRKFDNLTKAERGGLSELDKAGFIKRQLVETRQITKHVAQILDSRMNTKYDENDKLIREVKVITLKSKLVSDFRKDFQFYKVREINNYHHAHDAYLNAVVGTALIKKYPKLESEFVYGDYKVYDVRKMIAKSEQEIGKATAKYFFYSNIMNFFKTEITLANGEIRKRPLIETNGETGEIVWDKGRDFATVRKVLSMPQVNIVKKTEVQTGGFSKESILPKRNSDKLIARKKDWDPKKYGGFDSPTVAYSVLVVAKVEKGKSKKLKSVKELLGITIMERSSFEKNPIDFLEAKGYKEVKKDLIIKLPKYSLFELENGRKRMLASAGELQKGNELALPSKYVNFLYLASHYEKLKGSPEDNEQKQLFVEQHKHYLDEIIEQISEFSKRVILADANLDKVLSAYNKHRDKPIREQAENIIHLFTLTNLGAPAAFKYFDTTIDRKRYTSTKEVLDATLIHQSITGLYETRIDLSQLGGDGGGGGGSSGGSGGLLGRDLLTKLKAQIQFSTEGPQVTWEDRPAMCLVLNLEEEYRLHEKPVPPSIDPSWLQLFPMVWAEKAGMGLANQVPPVVVELKSDASPVAVRQYPMSKEAREGIRPHIQRFLDLGILVPCQSPWNTPLLPVKKPGTNDYRPVQDLREVNKRVQDIHPTVPNPYNLLSSLPPSHTWYSVLDLKDAFFCLKLHPNSQPLFAFEWRDPEKGNTGQLTWTRLPQGFKNSPTLFNEALHRDLASFRALNPQVVMLQYVDDLLVAAPTYRDCKEGTRRLLQELSKLGYRVSAKKAQLCREEVTYLGYLLKGGKRWLTPARKATVMKIPTPTTPRQVREFLGKAGFCRLFIPGFASLAAPLYPLTRPKVPFTWTEAHQEAFGRIKEALLSAPALALPDLTKPFALYVDEKEGVARGVLTQTLGPWRRPVAYLSKKLDPVASGWPTCLKAIAAVALLLKDADKLTLGQNVLVIAPHNLESIVRQPPDRWMTNARMTHYQSLLLNERVSFAPPAILNPATLLPVESDDTPIHICSEILAEETGTRPDLRDQPLPGVPAWYTDGSSFIMDGRRQAGAAIVDNKRTVWASNLPEGTSAQKAELIALTQALRLAEGKSINIYTDSRYAFATAHVHGAIYKQRGWLTSAGKDIKNKEEILALLEAIHLPKRVAIIHCPGHQRGTDPVATGNRKADEAAKQAAQSTRILTETTKNAGKRTADGSEFEKRTADGSEFESPKKKAKVE

SEQ ID NO: 6847 - protein, 2216 aa, synthetic construct
MPAAKRVKLDGGDKKYSIGLDIGTNSVGWAVITDEYKVPSKKFKVLGNTDRHSIKKNLIGALLFDSGETAEATRLKRTARRRYTRRKNRICYLQEIFSNEMAKVDDSFFHRLEESFLVEEDKKHERHPIFGNIVDEVAYHEKYPTIYHLRKKLVDSTDKADLRLIYLALAHMIKFRGHFLIEGDLNPDNSDVDKLFIQLVQTYNQLFEENPINASGVDAKAILSARLSKSRRLENLIAQLPGEKKNGLFGNLIALSLGLTPNFKSNFDLAEDAKLQLSKDTYDDDLDNLLAQIGDQYADLFLAAKNLSDAILLSDILRVNTEITKAPLSASMIKRYDEHHQDLTLLKALVRQQLPEKYKEIFFDQSKNGYAGYIDGGASQEEFYKFIKPILEKMDGTEELLVKLNREDLLRKQRTFDNGSIPHQIHLGELHAILRRQEDFYPFLKDNREKIEKILTFRIPYYVGPLARGNSRFAWMTRKSEETITPWNFEEVVDKGASAQSFIERMTNFDKNLPNEKVLPKHSLLYEYFTVYNELTKVKYVTEGMRKPAFLSGEQKKAIVDLLFKTNRKVTVKQLKEDYFKKIECFDSVEISGVEDRFNASLGTYHDLLKIIKDKDFLDNEENEDILEDIVLTLTLFEDREMIEERLKTYAHLFDDKVMKQLKRRRYTGWGRLSRKLINGIRDKQSGKTILDFLKSDGFANRNFMQLIHDDSLTFKEDIQKAQVSGQGDSLHEHIANLAGSPAIKKGILQTVKVVDELVKVMGRHKPENIVIEMARENQTTQKGQKNSRERMKRIEEGIKELGSQILKEHPVENTQLQNEKLYLYYLQNGRDMYVDQELDINRLSDYDVDHIVPQSFLKDDSIDNKVLTRSDKARGKSDNVPSEEVVKKMKNYWRQLLNAKLITQRKFDNLTKAERGGLSELDKAGFIKRQLVETRQITKHVAQILDSRMNTKYDENDKLIREVKVITLKSKLVSDFRKDFQFYKVREINNYHHAHDAYLNAVVGTALIKKYPKLESEFVYGDYKVYDVRKMIAKSEQEIGKATAKYFFYSNIMNFFKTEITLANGEIRKRPLIETNGETGEIVWDKGRDFATVRKVLSMPQVNIVKKTEVQTGGFSKESILPKRNSDKLIARKKDWDPKKYGGFDSPTVAYSVLVVAKVEKGKSKKLKSVKELLGITIMERSSFEKNPIDFLEAKGYKEVKKDLIIKLPKYSLFELENGRKRMLASAGELQKGNELALPSKYVNFLYLASHYEKLKGSPEDNEQKQLFVEQHKHYLDEIIEQISEFSKRVILADANLDKVLSAYNKHRDKPIREQAENIIHLFTLTNLGAPAAFKYFDTTIDRKRYTSTKEVLDATLIHQSITGLYETRIDLSQLGGDGGGGGGSSGGSGGTLGDQGSRGSDPLPEPRVTLTVEGIPTEFLVNTGAEHSVLTKPMGKMGSKRTVVAGATGSKVYPWTTKRLLKIGQKQVTHSFLVIPECPAPLLGRDLLTKLKAQIQFSTEGPQVTWEDRPAMCLVLNLEEEYRLHEKPVPPSIDPSWLQLFPMVWAEKAGMGLANQVPPVVVELKSDASPVAVRQYPMSKEAREGIRPHIQRFLDLGILVPCQSPWNTPLLPVKKPGTNDYRPVQDLREVNKRVQDIHPTVPNPYNLLSSLPPSHTWYSVLDLKDAFFCLKLHPNSQPLFAFEWRDPEKGNTGQLTWTRLPQGFKNSPTLFNEALHRDLASFRALNPQVVMLQYVDDLLVAAPTYRDCKEGTRRLLQELSKLGYRVSAKKAQLCREEVTYLGYLLKGGKRWLTPARKATVMKIPTPTTPRQVREFLGKAGFCRLFIPGFASLAAPLYPLTRPKVPFTWTEAHQEAFGRIKEALLSAPALALPDLTKPFALYVDEKEGVARGVLTQTLGPWRRPVAYLSKKLDPVASGWPTCLKAIAAVALLLKDADKLTLGQNVLVIAPHNLESIVRQPPDRWMTNARMTHYQSLLLNERVSFAPPAILNPATLLPVESDDTPIHICSEILAEETGTRPDLRDQPLPGVPAWYTDGSSFIMDGRRQAGAAIVDNKRTVWASNLPEGTSAQKAELIALTQALRLAEGKSINIYTDSRYAFATAHVHGAIYKQRGWLTSAGKDIKNKEEILALLEAIHLPKRVAIIHCPGHQRGTDPVATGNRKADEAAKQAAQSTRILTETTKNAGKRTADGSEFEKRTADGSEFESPKKKAKVE

SEQ ID NO: 6848 - protein, 2094 aa, synthetic construct
MPAAKRVKLDGGDKKYSIGLDIGTNSVGWAVITDEYKVPSKKFKVLGNTDRHSIKKNLIGALLFDSGETAEATRLKRTARRRYTRRKNRICYLQEIFSNEMAKVDDSFFHRLEESFLVEEDKKHERHPIFGNIVDEVAYHEKYPTIYHLRKKLVDSTDKADLRLIYLALAHMIKFRGHFLIEGDLNPDNSDVDKLFIQLVQTYNQLFEENPINASGVDAKAILSARLSKSRRLENLIAQLPGEKKNGLFGNLIALSLGLTPNFKSNFDLAEDAKLQLSKDTYDDDLDNLLAQIGDQYADLFLAAKNLSDAILLSDILRVNTEITKAPLSASMIKRYDEHHQDLTLLKALVRQQLPEKYKEIFFDQSKNGYAGYIDGGASQEEFYKFIKPILEKMDGTEELLVKLNREDLLRKQRTFDNGSIPHQIHLGELHAILRRQEDFYPFLKDNREKIEKILTFRIPYYVGPLARGNSRFAWMTRKSEETITPWNFEEVVDKGASAQSFIERMTNFDKNLPNEKVLPKHSLLYEYFTVYNELTKVKYVTEGMRKPAFLSGEQKKAIVDLLFKTNRKVTVKQLKEDYFKKIECFDSVEISGVEDRFNASLGTYHDLLKIIKDKDFLDNEENEDILEDIVLTLTLFEDREMIEERLKTYAHLFDDKVMKQLKRRRYTGWGRLSRKLINGIRDKQSGKTILDFLKSDGFANRNFMQLIHDDSLTFKEDIQKAQVSGQGDSLHEHIANLAGSPAIKKGILQTVKVVDELVKVMGRHKPENIVIEMARENQTTQKGQKNSRERMKRIEEGIKELGSQILKEHPVENTQLQNEKLYLYYLQNGRDMYVDQELDINRLSDYDVDHIVPQSFLKDDSIDNKVLTRSDKARGKSDNVPSEEVVKKMKNYWRQLLNAKLITQRKFDNLTKAERGGLSELDKAGFIKRQLVETRQITKHVAQILDSRMNTKYDENDKLIREVKVITLKSKLVSDFRKDFQFYKVREINNYHHAHDAYLNAVVGTALIKKYPKLESEFVYGDYKVYDVRKMIAKSEQEIGKATAKYFFYSNIMNFFKTEITLANGEIRKRPLIETNGETGEIVWDKGRDFATVRKVLSMPQVNIVKKTEVQTGGFSKESILPKRNSDKLIARKKDWDPKKYGGFDSPTVAYSVLVVAKVEKGKSKKLKSVKELLGITIMERSSFEKNPIDFLEAKGYKEVKKDLIIKLPKYSLFELENGRKRMLASAGELQKGNELALPSKYVNFLYLASHYEKLKGSPEDNEQKQLFVEQHKHYLDEIIEQISEFSKRVILADANLDKVLSAYNKHRDKPIREQAENIIHLFTLTNLGAPAAFKYFDTTIDRKRYTSTKEVLDATLIHQSITGLYETRIDLSQLGGDGGGGGGSSGGSGGTLGIEDEYRLHETSTEPDVSLGSTWLSDFPQAWAETGGMGLAVRQAPLIIPLKATSTPVSIQQYPMSHEARLGIKPHIQRLLDQGILVPCQSPWNTPLLPVKKPGTNDYRPVQDLREVNKRVEDIHPTVPNPYNLLSGLPPSHQWYTVLDLKDAFFCLRLHPTSQPLFAFEWRDPGMGISGQLTWTRLPQGFKNSPTLFNEALHRDLADFRIQHPDLILLQYVDDILLAATSELDCQQGTRALLQTLGDLGYRASAKKAQICQKQVKYLGYLLREGQRWLTEARKETVMGQPVPKTPRQLREFLGTAGFCRLWIPGFAEMAAPLYPLTKPGTLFSWGPDQQKAYQEIKQALLTAPALGLPDLTKPFELFVDEKQGYAKGVLTQKLGPWRRPVAYLSKKLDPVAAGWPPCLRMVAAIAVLTKDAGKLTMGQPLVILAPHAVEALVKQPPDRWLSNARMTHYQAMLLDTDRVQFGPVVALNPATLLPLPEEGAPHDCLEILAETHGTRPDLTDQPIPDADHTWYTDGSSFLQEGQRKAGAAVTTETEVIWAGALPAGTSAQRAELIALTQALKMAEGKRLNVYTDSRYAFATAHIHGEIYRRRGWLTSEGREIKNKSEILALLKALFLPKRLSIIHCLGHQKGDSAEARGNRLADQAAREAAIKTPPDTSTLLAGKRTADGSEFEKRTADGSEFESPKKKAKVE

SEQ ID NO: 6849 - protein, 2094 aa, synthetic construct
MPAAKRVKLDGGDKKYSIGLDIGTNSVGWAVITDEYKVPSKKFKVLGNTDRHSIKKNLIGALLFDSGETAEATRLKRTARRRYTRRKNRICYLQEIFSNEMAKVDDSFFHRLEESFLVEEDKKHERHPIFGNIVDEVAYHEKYPTIYHLRKKLVDSTDKADLRLIYLALAHMIKFRGHFLIEGDLNPDNSDVDKLFIQLVQTYNQLFEENPINASGVDAKAILSARLSKSRRLENLIAQLPGEKKNGLFGNLIALSLGLTPNFKSNFDLAEDAKLQLSKDTYDDDLDNLLAQIGDQYADLFLAAKNLSDAILLSDILRVNTEITKAPLSASMIKRYDEHHQDLTLLKALVRQQLPEKYKEIFFDQSKNGYAGYIDGGASQEEFYKFIKPILEKMDGTEELLVKLNREDLLRKQRTFDNGSIPHQIHLGELHAILRRQEDFYPFLKDNREKIEKILTFRIPYYVGPLARGNSRFAWMTRKSEETITPWNFEEVVDKGASAQSFIERMTNFDKNLPNEKVLPKHSLLYEYFTVYNELTKVKYVTEGMRKPAFLSGEQKKAIVDLLFKTNRKVTVKQLKEDYFKKIECFDSVEISGVEDRFNASLGTYHDLLKIIKDKDFLDNEENEDILEDIVLTLTLFEDREMIEERLKTYAHLFDDKVMKQLKRRRYTGWGRLSRKLINGIRDKQSGKTILDFLKSDGFANRNFMQLIHDDSLTFKEDIQKAQVSGQGDSLHEHIANLAGSPAIKKGILQTVKVVDELVKVMGRHKPENIVIEMARENQTTQKGQKNSRERMKRIEEGIKELGSQILKEHPVENTQLQNEKLYLYYLQNGRDMYVDQELDINRLSDYDVDHIVPQSFLKDDSIDNKVLTRSDKARGKSDNVPSEEVVKKMKNYWRQLLNAKLITQRKFDNLTKAERGGLSELDKAGFIKRQLVETRQITKHVAQILDSRMNTKYDENDKLIREVKVITLKSKLVSDFRKDFQFYKVREINNYHHAHDAYLNAVVGTALIKKYPKLESEFVYGDYKVYDVRKMIAKSEQEIGKATAKYFFYSNIMNFFKTEITLANGEIRKRPLIETNGETGEIVWDKGRDFATVRKVLSMPQVNIVKKTEVQTGGFSKESILPKRNSDKLIARKKDWDPKKYGGFDSPTVAYSVLVVAKVEKGKSKKLKSVKELLGITIMERSSFEKNPIDFLEAKGYKEVKKDLIIKLPKYSLFELENGRKRMLASAGELQKGNELALPSKYVNFLYLASHYEKLKGSPEDNEQKQLFVEQHKHYLDEIIEQISEFSKRVILADANLDKVLSAYNKHRDKPIREQAENIIHLFTLTNLGAPAAFKYFDTTIDRKRYTSTKEVLDATLIHQSITGLYETRIDLSQLGGDGGGGGGSSGGSGGTLNIEDEYRLHETSKEPDVSLGSTWLSDFPQAWAETGGMGLAVRQAPLIIPLKATSTPVSIKQYPMSQEARLGIKPHIQRLLDQGILVPCQSPWNTPLLPVKKPGTNDYRPVQDLREVNKRVEDIHPTVPNPYNLLSGLPPSHQWYTVLDLKDAFFCLRLHPTSQPLFAFEWRDPEMGISGQLTWTRLPQGFKNSPTLFNEALHRDLAGFRIQHPDLILLQYVDDLLLAATSELDCQQGTRALLQTLGDLGYRASAKKAQICQKQVKYLGYLLKEGQRWLTEARKETVMGQPIPKTPRQLREFLGTAGFCRLWIPGFAEMAAPLYPLTKPGTLFNWGPDQQKAFQEIKQALLTAPALGLPDLTKPFELFVDEKQGYAKGVLTQKLGPWRRPVAYLSKKLDPVAAGWPPCLRMVAAIAVLTKDAGKLTMGQPLVILAPHAVEALVKQPPDRWLSNARMTHYQALLLDTDRVQFGPVVALNPATLLPLPEEGLQHDCLDILAEAHGTRSDLMDQPLPDADHTWYTDGSSFLQEGQRKAGAAVTTETEVIWARALPAGTSAQRAELIALTQALKMAEGKKLNVYTDSRYAFATAHIHGEIYRRRGWLTSEGKEIKNKDEILALLKALFLPKRLSIIHCPGHQKGNSAEARGNRMADQAAREVATRETPETSTLLAGKRTADGSEFEKRTADGSEFESPKKKAKVE

SEQ ID NO: 6850 - protein, 2094 aa, synthetic construct
MPAAKRVKLDGGDKKYSIGLDIGTNSVGWAVITDEYKVPSKKFKVLGNTDRHSIKKNLIGALLFDSGETAEATRLKRTARRRYTRRKNRICYLQEIFSNEMAKVDDSFFHRLEESFLVEEDKKHERHPIFGNIVDEVAYHEKYPTIYHLRKKLVDSTDKADLRLIYLALAHMIKFRGHFLIEGDLNPDNSDVDKLFIQLVQTYNQLFEENPINASGVDAKAILSARLSKSRRLENLIAQLPGEKKNGLFGNLIALSLGLTPNFKSNFDLAEDAKLQLSKDTYDDDLDNLLAQIGDQYADLFLAAKNLSDAILLSDILRVNTEITKAPLSASMIKRYDEHHQDLTLLKALVRQQLPEKYKEIFFDQSKNGYAGYIDGGASQEEFYKFIKPILEKMDGTEELLVKLNREDLLRKQRTFDNGSIPHQIHLGELHAILRRQEDFYPFLKDNREKIEKILTFRIPYYVGPLARGNSRFAWMTRKSEETITPWNFEEVVDKGASAQSFIERMTNFDKNLPNEKVLPKHSLLYEYFTVYNELTKVKYVTEGMRKPAFLSGEQKKAIVDLLFKTNRKVTVKQLKEDYFKKIECFDSVEISGVEDRFNASLGTYHDLLKIIKDKDFLDNEENEDILEDIVLTLTLFEDREMIEERLKTYAHLFDDKVMKQLKRRRYTGWGRLSRKLINGIRDKQSGKTILDFLKSDGFANRNFMQLIHDDSLTFKEDIQKAQVSGQGDSLHEHIANLAGSPAIKKGILQTVKVVDELVKVMGRHKPENIVIEMARENQTTQKGQKNSRERMKRIEEGIKELGSQILKEHPVENTQLQNEKLYLYYLQNGRDMYVDQELDINRLSDYDVDHIVPQSFLKDDSIDNKVLTRSDKARGKSDNVPSEEVVKKMKNYWRQLLNAKLITQRKFDNLTKAERGGLSELDKAGFIKRQLVETRQITKHVAQILDSRMNTKYDENDKLIREVKVITLKSKLVSDFRKDFQFYKVREINNYHHAHDAYLNAVVGTALIKKYPKLESEFVYGDYKVYDVRKMIAKSEQEIGKATAKYFFYSNIMNFFKTEITLANGEIRKRPLIETNGETGEIVWDKGRDFATVRKVLSMPQVNIVKKTEVQTGGFSKESILPKRNSDKLIARKKDWDPKKYGGFDSPTVAYSVLVVAKVEKGKSKKLKSVKELLGITIMERSSFEKNPIDFLEAKGYKEVKKDLIIKLPKYSLFELENGRKRMLASAGELQKGNELALPSKYVNFLYLASHYEKLKGSPEDNEQKQLFVEQHKHYLDEIIEQISEFSKRVILADANLDKVLSAYNKHRDKPIREQAENIIHLFTLTNLGAPAAFKYFDTTIDRKRYTSTKEVLDATLIHQSITGLYETRIDLSQLGGDGGGGGGSSGGSGGTLNIEDEYRLHETSKGPDVPLGSTWLSDFPQAWAETGGMGLAVRQAPLIIPLKATSTPVSIKQYPMSQEARLGIKPHIQRLLDQGILVPCQSPWNTPLLPVKKPGTNDYRPVQDLREVNKRVEDIHPTVPNPYNLLSGLPPSHQWYTVLDLKDAFFCLRLHPTSQSLFAFEWRDPEMGISGQLTWTRLPQGFKNSPTLFNEALHRDLADFRIQHPDLILLQYVDDLLLAATSELDCQQGTRALLQTLGDLGYRASAKKAQICQKQVKYLGYLLKEGQRWLTEARKETVMGQPTPKTPRQLREFLGTAGFCRLWIPGFAEMAAPLYPLTKPGTLFEWGPDQQKAYQEIKQALLTAPALGLPDLTKPFELFVDEKQGYAKGVLTQKLGPWRRPVAYLSKKLDPVAAGWPPCLRMVAAIAVLTKDAGKLTMGQPLVILAPHAVEALVKQPPDRWLSNARMTHYQALLLDTDRVQFGPIVALNPATLLPLPEEGLQHDCLDILAEAHGTRPDLTDQPLPDADHTWYTDGSSFLQEGQRKAGAAVTTETEVVWAKALPAGTSAQRAELIALTQALKMAEGKKLNVYTDSRYAFATAHIHGEIYRRRGWLTSEGKEIKNKDEILALLKALFLPKRLSIIHCPGHQKGNRAEARGNRMADQAAREVATRETPETSTLLAGKRTADGSEFEKRTADGSEFESPKKKAKVE

SEQ ID NO: 6851 - protein, 2114 aa, synthetic construct
MPAAKRVKLDGGDKKYSIGLDIGTNSVGWAVITDEYKVPSKKFKVLGNTDRHSIKKNLIGALLFDSGETAEATRLKRTARRRYTRRKNRICYLQEIFSNEMAKVDDSFFHRLEESFLVEEDKKHERHPIFGNIVDEVAYHEKYPTIYHLRKKLVDSTDKADLRLIYLALAHMIKFRGHFLIEGDLNPDNSDVDKLFIQLVQTYNQLFEENPINASGVDAKAILSARLSKSRRLENLIAQLPGEKKNGLFGNLIALSLGLTPNFKSNFDLAEDAKLQLSKDTYDDDLDNLLAQIGDQYADLFLAAKNLSDAILLSDILRVNTEITKAPLSASMIKRYDEHHQDLTLLKALVRQQLPEKYKEIFFDQSKNGYAGYIDGGASQEEFYKFIKPILEKMDGTEELLVKLNREDLLRKQRTFDNGSIPHQIHLGELHAILRRQEDFYPFLKDNREKIEKILTFRIPYYVGPLARGNSRFAWMTRKSEETITPWNFEEVVDKGASAQSFIERMTNFDKNLPNEKVLPKHSLLYEYFTVYNELTKVKYVTEGMRKPAFLSGEQKKAIVDLLFKTNRKVTVKQLKEDYFKKIECFDSVEISGVEDRFNASLGTYHDLLKIIKDKDFLDNEENEDILEDIVLTLTLFEDREMIEERLKTYAHLFDDKVMKQLKRRRYTGWGRLSRKLINGIRDKQSGKTILDFLKSDGFANRNFMQLIHDDSLTFKEDIQKAQVSGQGDSLHEHIANLAGSPAIKKGILQTVKVVDELVKVMGRHKPENIVIEMARENQTTQKGQKNSRERMKRIEEGIKELGSQILKEHPVENTQLQNEKLYLYYLQNGRDMYVDQELDINRLSDYDVDHIVPQSFLKDDSIDNKVLTRSDKARGKSDNVPSEEVVKKMKNYWRQLLNAKLITQRKFDNLTKAERGGLSELDKAGFIKRQLVETRQITKHVAQILDSRMNTKYDENDKLIREVKVITLKSKLVSDFRKDFQFYKVREINNYHHAHDAYLNAVVGTALIKKYPKLESEFVYGDYKVYDVRKMIAKSEQEIGKATAKYFFYSNIMNFFKTEITLANGEIRKRPLIETNGETGEIVWDKGRDFATVRKVLSMPQVNIVKKTEVQTGGFSKESILPKRNSDKLIARKKDWDPKKYGGFDSPTVAYSVLVVAKVEKGKSKKLKSVKELLGITIMERSSFEKNPIDFLEAKGYKEVKKDLIIKLPKYSLFELENGRKRMLASAGELQKGNELALPSKYVNFLYLASHYEKLKGSPEDNEQKQLFVEQHKHYLDEIIEQISEFSKRVILADANLDKVLSAYNKHRDKPIREQAENIIHLFTLTNLGAPAAFKYFDTTIDRKRYTSTKEVLDATLIHQSITGLYETRIDLSQLGGDGGGGGGSSGGSGGVQEISDSRPMLHIYLNGRRFLGLLDTGADKTCIAGRDWPANWPIHQTESSLQGLGMACGVARSSQPLRWQHEDKSGIIHPFVIPTLPFTLWGRDIMKDIKVRLMTDSPDDSQDLMIGAIESNLFADQISWKSDQPVWLNQWPLKQEKLQALQQLVTEQLQLGHLEESNSPWNTPVFVIKKKSGKWRLLQDLRAVNATMHDMGALQPGLPSPPAVPKGWEIIIIDLQDCFFNIKLHPEDCKRFAFSVPSPNFKRPYQRFQWKVLPQGMKNSPTLCQKFVDKAILTVRDKYQDSYIVHYMDDILLAHPSRSIVDEILTSMIQALNKHGLVVSTEKIQKYDNLKYLGTHIQGDSVSYQKLQIRTDKLRTLNDFQKLLGNINWIRPFLKLTTGELKPLFEILNPDSNPISTRKLTPEACKALQLMNERLSTARVKRLDLSQPWSLCILKTEYTPTACLWQDGVVEWIHLPHISPKVITPYDIFCTQLIIKGRHRSKELFSKDPDYIVVPYTKVQFDLLLQEKEDWPISLLGFLGEVHFHLPKDPLLTFTLQTAIIFPHMTSTTPLEKGIVIFTDGSANGRSVTYIQGREPIIKENTQNTAQQAEIVAVITAFEEVSQPFNLYTDSKYVTGLFPEIETATLSPRTKIYTELKHLQRLIHKRQEKFYIGHIRGHTGLPGPLAQGNAYADSLTRILTAAGKRTADGSEFEKRTADGSEFESPKKKAKVE

SEQ ID NO: 6852 - protein, 2088 aa, synthetic construct
MPAAKRVKLDGGDKKYSIGLDIGTNSVGWAVITDEYKVPSKKFKVLGNTDRHSIKKNLIGALLFDSGETAEATRLKRTARRRYTRRKNRICYLQEIFSNEMAKVDDSFFHRLEESFLVEEDKKHERHPIFGNIVDEVAYHEKYPTIYHLRKKLVDSTDKADLRLIYLALAHMIKFRGHFLIEGDLNPDNSDVDKLFIQLVQTYNQLFEENPINASGVDAKAILSARLSKSRRLENLIAQLPGEKKNGLFGNLIALSLGLTPNFKSNFDLAEDAKLQLSKDTYDDDLDNLLAQIGDQYADLFLAAKNLSDAILLSDILRVNTEITKAPLSASMIKRYDEHHQDLTLLKALVRQQLPEKYKEIFFDQSKNGYAGYIDGGASQEEFYKFIKPILEKMDGTEELLVKLNREDLLRKQRTFDNGSIPHQIHLGELHAILRRQEDFYPFLKDNREKIEKILTFRIPYYVGPLARGNSRFAWMTRKSEETITPWNFEEVVDKGASAQSFIERMTNFDKNLPNEKVLPKHSLLYEYFTVYNELTKVKYVTEGMRKPAFLSGEQKKAIVDLLFKTNRKVTVKQLKEDYFKKIECFDSVEISGVEDRFNASLGTYHDLLKIIKDKDFLDNEENEDILEDIVLTLTLFEDREMIEERLKTYAHLFDDKVMKQLKRRRYTGWGRLSRKLINGIRDKQSGKTILDFLKSDGFANRNFMQLIHDDSLTFKEDIQKAQVSGQGDSLHEHIANLAGSPAIKKGILQTVKVVDELVKVMGRHKPENIVIEMARENQTTQKGQKNSRERMKRIEEGIKELGSQILKEHPVENTQLQNEKLYLYYLQNGRDMYVDQELDINRLSDYDVDHIVPQSFLKDDSIDNKVLTRSDKARGKSDNVPSEEVVKKMKNYWRQLLNAKLITQRKFDNLTKAERGGLSELDKAGFIKRQLVETRQITKHVAQILDSRMNTKYDENDKLIREVKVITLKSKLVSDFRKDFQFYKVREINNYHHAHDAYLNAVVGTALIKKYPKLESEFVYGDYKVYDVRKMIAKSEQEIGKATAKYFFYSNIMNFFKTEITLANGEIRKRPLIETNGETGEIVWDKGRDFATVRKVLSMPQVNIVKKTEVQTGGFSKESILPKRNSDKLIARKKDWDPKKYGGFDSPTVAYSVLVVAKVEKGKSKKLKSVKELLGITIMERSSFEKNPIDFLEAKGYKEVKKDLIIKLPKYSLFELENGRKRMLASAGELQKGNELALPSKYVNFLYLASHYEKLKGSPEDNEQKQLFVEQHKHYLDEIIEQISEFSKRVILADANLDKVLSAYNKHRDKPIREQAENIIHLFTLTNLGAPAAFKYFDTTIDRKRYTSTKEVLDATLIHQSITGLYETRIDLSQLGGDGGGGGGSSGGSGGTLQLDDEYRLYSPLVKPDQNIQFWLEQFPQAWAETAGMGLAKQVPPQVIQLKASATPVSVRQYPLSKEAQEGIRPHVQRLIQQGILVPVQSPWNTPLLPVRKPGTNDYRPVQDLREVNKRVQDIHPTVPNPYNLLCALPPQRSWYTVLDLKDAFFCLRLHPTSQPLFAFEWRDPGTGRTGQLTWTRLPQGFKNSPTIFDEALHRDLANFRIQHPQVTLLQYVDDLLLAGATKQDCLEGTKALLLELSDLGYRASAKKAQICRREVTYLGYSLRDGQRWLTEARKKTVVQIPAPTTAKQVREFLGTAGFCRLWIPGFATLAAPLYPLTKEKGEFSWAPEHQKAFDAIKKALLSAPALALPDVTKPFTLYVDERKGVARGVLTQTLGPWRRPVAYLSKKLDPVASGWPVCLKAIAAVAILVKDADKLTLGQNITVIAPHALENIVRQPPDRWMTNARMTHYQSLLLTERVTFAPPAALNPATLLPEETDEPVTHDCHQLLIEETGVRKDLTDIPLTGEVLTWFTDGSSYVVEGKRMAGAAVVDGTRTIWASSLPEGTSAQKAELMALTQALRLAEGKSINIYTDSRYAFATAHVHGAIYKQRGLLTSAGREIKNKEEILSLLEALHLPKRLAIIHCPGHQKAKDPISRGNQMADRVAKQAAQGVNLLAGKRTADGSEFEKRTADGSEFESPKKKAKVE

SEQ ID NO: 6853 - protein, 2085 aa, synthetic construct
MPAAKRVKLDGGDKKYSIGLDIGTNSVGWAVITDEYKVPSKKFKVLGNTDRHSIKKNLIGALLFDSGETAEATRLKRTARRRYTRRKNRICYLQEIFSNEMAKVDDSFFHRLEESFLVEEDKKHERHPIFGNIVDEVAYHEKYPTIYHLRKKLVDSTDKADLRLIYLALAHMIKFRGHFLIEGDLNPDNSDVDKLFIQLVQTYNQLFEENPINASGVDAKAILSARLSKSRRLENLIAQLPGEKKNGLFGNLIALSLGLTPNFKSNFDLAEDAKLQLSKDTYDDDLDNLLAQIGDQYADLFLAAKNLSDAILLSDILRVNTEITKAPLSASMIKRYDEHHQDLTLLKALVRQQLPEKYKEIFFDQSKNGYAGYIDGGASQEEFYKFIKPILEKMDGTEELLVKLNREDLLRKQRTFDNGSIPHQIHLGELHAILRRQEDFYPFLKDNREKIEKILTFRIPYYVGPLARGNSRFAWMTRKSEETITPWNFEEVVDKGASAQSFIERMTNFDKNLPNEKVLPKHSLLYEYFTVYNELTKVKYVTEGMRKPAFLSGEQKKAIVDLLFKTNRKVTVKQLKEDYFKKIECFDSVEISGVEDRFNASLGTYHDLLKIIKDKDFLDNEENEDILEDIVLTLTLFEDREMIEERLKTYAHLFDDKVMKQLKRRRYTGWGRLSRKLINGIRDKQSGKTILDFLKSDGFANRNFMQLIHDDSLTFKEDIQKAQVSGQGDSLHEHIANLAGSPAIKKGILQTVKVVDELVKVMGRHKPENIVIEMARENQTTQKGQKNSRERMKRIEEGIKELGSQILKEHPVENTQLQNEKLYLYYLQNGRDMYVDQELDINRLSDYDVDHIVPQSFLKDDSIDNKVLTRSDKARGKSDNVPSEEVVKKMKNYWRQLLNAKLITQRKFDNLTKAERGGLSELDKAGFIKRQLVETRQITKHVAQILDSRMNTKYDENDKLIREVKVITLKSKLVSDFRKDFQFYKVREINNYHHAHDAYLNAVVGTALIKKYPKLESEFVYGDYKVYDVRKMIAKSEQEIGKATAKYFFYSNIMNFFKTEITLANGEIRKRPLIETNGETGEIVWDKGRDFATVRKVLSMPQVNIVKKTEVQTGGFSKESILPKRNSDKLIARKKDWDPKKYGGFDSPTVAYSVLVVAKVEKGKSKKLKSVKELLGITIMERSSFEKNPIDFLEAKGYKEVKKDLIIKLPKYSLFELENGRKRMLASAGELQKGNELALPSKYVNFLYLASHYEKLKGSPEDNEQKQLFVEQHKHYLDEIIEQISEFSKRVILADANLDKVLSAYNKHRDKPIREQAENIIHLFTLTNLGAPAAFKYFDTTIDRKRYTSTKEVLDATLIHQSITGLYETRIDLSQLGGDGGGGGGSSGGSGGIPWLMKKPLQLTTLVPLQEYEERLLKQTMLTGSYKEKLQSLFLKYDALWQHWENQVGHRRIKPHHIATGTVNPRPQKQYPINPKAKASIQTVINDLLKQGVLIQQNSIMNTPVYPVPKPDGKWRMVLDYREVNKTIPLIAAQNQHSAGILSSIFRGKYKTTLDLSNGFWAHSITPESYWLTAFTWLGQQYCWTRLPQGFLNSPALFNADVVDLLKEVPNVQVYVDDIYISHDDPREHLEQLEKVFSLLLNAGYVVSLKKSEIAQHEVEFLGFNITKEGRGLTETFKQKLLNITPPRDLKQLQSILGKLNFARNFIPNFSELVKPLYNIIATAPGKYITWTTDNSQQLQNIISMLNSAENLEERNPEVRLIMKVNTSPSAGYIRFYNEFAKRPIMYLNYVYTKAEVKFTNTEKLLTTIHKGLIKALDLGMGQEILVYSPIVSMTKIQKTPLPERKALPIRWITWMSYLEDPRIQFHYDKTLPELQQVPTVTDDIIAKIKHPSEFSMVFYTDGSAIKHPNVNKSHNAGMGIAQVQFKPEFTVINTWSIPLGDHTAQLAEVAAVEFACKKALKIDGPVLIVTDSFYVAESVNKELPYWQSNGFFNNKKKPLKHVSKWKSIADCIQLKPDIIIIHEKGHQPTASTFHTEGNNLADKLATQGSYVVNAGKRTADGSEFEKRTADGSEFESPKKKAKVE

SEQ ID NO: 6854 - protein, 2174 aa, synthetic construct
MPAAKRVKLDGGDKKYSIGLDIGTNSVGWAVITDEYKVPSKKFKVLGNTDRHSIKKNLIGALLFDSGETAEATRLKRTARRRYTRRKNRICYLQEIFSNEMAKVDDSFFHRLEESFLVEEDKKHERHPIFGNIVDEVAYHEKYPTIYHLRKKLVDSTDKADLRLIYLALAHMIKFRGHFLIEGDLNPDNSDVDKLFIQLVQTYNQLFEENPINASGVDAKAILSARLSKSRRLENLIAQLPGEKKNGLFGNLIALSLGLTPNFKSNFDLAEDAKLQLSKDTYDDDLDNLLAQIGDQYADLFLAAKNLSDAILLSDILRVNTEITKAPLSASMIKRYDEHHQDLTLLKALVRQQLPEKYKEIFFDQSKNGYAGYIDGGASQEEFYKFIKPILEKMDGTEELLVKLNREDLLRKQRTFDNGSIPHQIHLGELHAILRRQEDFYPFLKDNREKIEKILTFRIPYYVGPLARGNSRFAWMTRKSEETITPWNFEEVVDKGASAQSFIERMTNFDKNLPNEKVLPKHSLLYEYFTVYNELTKVKYVTEGMRKPAFLSGEQKKAIVDLLFKTNRKVTVKQLKEDYFKKIECFDSVEISGVEDRFNASLGTYHDLLKIIKDKDFLDNEENEDILEDIVLTLTLFEDREMIEERLKTYAHLFDDKVMKQLKRRRYTGWGRLSRKLINGIRDKQSGKTILDFLKSDGFANRNFMQLIHDDSLTFKEDIQKAQVSGQGDSLHEHIANLAGSPAIKKGILQTVKVVDELVKVMGRHKPENIVIEMARENQTTQKGQKNSRERMKRIEEGIKELGSQILKEHPVENTQLQNEKLYLYYLQNGRDMYVDQELDINRLSDYDVDHIVPQSFLKDDSIDNKVLTRSDKARGKSDNVPSEEVVKKMKNYWRQLLNAKLITQRKFDNLTKAERGGLSELDKAGFIKRQLVETRQITKHVAQILDSRMNTKYDENDKLIREVKVITLKSKLVSDFRKDFQFYKVREINNYHHAHDAYLNAVVGTALIKKYPKLESEFVYGDYKVYDVRKMIAKSEQEIGKATAKYFFYSNIMNFFKTEITLANGEIRKRPLIETNGETGEIVWDKGRDFATVRKVLSMPQVNIVKKTEVQTGGFSKESILPKRNSDKLIARKKDWDPKKYGGFDSPTVAYSVLVVAKVEKGKSKKLKSVKELLGITIMERSSFEKNPIDFLEAKGYKEVKKDLIIKLPKYSLFELENGRKRMLASAGELQKGNELALPSKYVNFLYLASHYEKLKGSPEDNEQKQLFVEQHKHYLDEIIEQISEFSKRVILADANLDKVLSAYNKHRDKPIREQAENIIHLFTLTNLGAPAAFKYFDTTIDRKRYTSTKEVLDATLIHQSITGLYETRIDLSQLGGDGGGGGGSSGGSGGMDPLQLLQPLEAEIKGTKLKAHWNSGATITCVPQAFLEEEVPIKNIWIKTIHGEKEQPVYYLTFKIQGRKVEAEVISSPYDYILVSPSDIPWLMKKPLQLTTLVPLQEYEERLLKQTMLTGSYKEKLQSLFLKYDALWQHWENQVGHRRIKPHHIATGTVNPRPQKQYPINPKAKASIQTVINDLLKQGVLIQQNSIMNTPVYPVPKPDGKWRMVLDYREVNKTIPLIAAQNQHSAGILSSIFRGKYKTTLDLSNGFWAHSITPESYWLTAFTWLGQQYCWTRLPQGFLNSPALFNADVVDLLKEVPNVQVYVDDIYISHDDPREHLEQLEKVFSLLLNAGYVVSLKKSEIAQHEVEFLGFNITKEGRGLTETFKQKLLNITPPRDLKQLQSILGLLNFARNFIPNFSELVKPLYNIIATAPGKYITWTTDNSQQLQNIISMLNSAENLEERNPEVRLIMKVNTSPSAGYIRFYNEFAKRPIMYLNYVYTKAEVKFTNTEKLLTTIHKGLIKALDLGMGQEILVYSPIVSMTKIQKTPLPERKALPIRWITWMSYLEDPRIQFHYDKTLPELQQVPTVTDDIIAKIKHPSEFSMVFYTDGSAIKHPNVNKSHNAGMGIAQVQFKPEFTVINTWSIPLGDHTAQLAEVAAVEFACKKALKIDGPVLIVTDSFYVAESVNKELPYWQSNGFFNNKKKPLKHVSKWKSIADCIQLKPDIIIIHEKGHQPTASTFHTEGNNLADKLATQGSYVVNAGKRTADGSEFEKRTADGSEFESPKKKAKVE

SEQ ID NO: 6855 - protein, 2094 aa, synthetic construct
MPAAKRVKLDGGDKKYSIGLDIGTNSVGWAVITDEYKVPSKKFKVLGNTDRHSIKKNLIGALLFDSGETAEATRLKRTARRRYTRRKNRICYLQEIFSNEMAKVDDSFFHRLEESFLVEEDKKHERHPIFGNIVDEVAYHEKYPTIYHLRKKLVDSTDKADLRLIYLALAHMIKFRGHFLIEGDLNPDNSDVDKLFIQLVQTYNQLFEENPINASGVDAKAILSARLSKSRRLENLIAQLPGEKKNGLFGNLIALSLGLTPNFKSNFDLAEDAKLQLSKDTYDDDLDNLLAQIGDQYADLFLAAKNLSDAILLSDILRVNTEITKAPLSASMIKRYDEHHQDLTLLKALVRQQLPEKYKEIFFDQSKNGYAGYIDGGASQEEFYKFIKPILEKMDGTEELLVKLNREDLLRKQRTFDNGSIPHQIHLGELHAILRRQEDFYPFLKDNREKIEKILTFRIPYYVGPLARGNSRFAWMTRKSEETITPWNFEEVVDKGASAQSFIERMTNFDKNLPNEKVLPKHSLLYEYFTVYNELTKVKYVTEGMRKPAFLSGEQKKAIVDLLFKTNRKVTVKQLKEDYFKKIECFDSVEISGVEDRFNASLGTYHDLLKIIKDKDFLDNEENEDILEDIVLTLTLFEDREMIEERLKTYAHLFDDKVMKQLKRRRYTGWGRLSRKLINGIRDKQSGKTILDFLKSDGFANRNFMQLIHDDSLTFKEDIQKAQVSGQGDSLHEHIANLAGSPAIKKGILQTVKVVDELVKVMGRHKPENIVIEMARENQTTQKGQKNSRERMKRIEEGIKELGSQILKEHPVENTQLQNEKLYLYYLQNGRDMYVDQELDINRLSDYDVDHIVPQSFLKDDSIDNKVLTRSDKARGKSDNVPSEEVVKKMKNYWRQLLNAKLITQRKFDNLTKAERGGLSELDKAGFIKRQLVETRQITKHVAQILDSRMNTKYDENDKLIREVKVITLKSKLVSDFRKDFQFYKVREINNYHHAHDAYLNAVVGTALIKKYPKLESEFVYGDYKVYDVRKMIAKSEQEIGKATAKYFFYSNIMNFFKTEITLANGEIRKRPLIETNGETGEIVWDKGRDFATVRKVLSMPQVNIVKKTEVQTGGFSKESILPKRNSDKLIARKKDWDPKKYGGFDSPTVAYSVLVVAKVEKGKSKKLKSVKELLGITIMERSSFEKNPIDFLEAKGYKEVKKDLIIKLPKYSLFELENGRKRMLASAGELQKGNELALPSKYVNFLYLASHYEKLKGSPEDNEQKQLFVEQHKHYLDEIIEQISEFSKRVILADANLDKVLSAYNKHRDKPIREQAENIIHLFTLTNLGAPAAFKYFDTTIDRKRYTSTKEVLDATLIHQSITGLYETRIDLSQLGGDGGGGGGSSGGSGGTLNIEDEYRLHETSKEPDVPLGSTWLSDFPQAWAETGGMGLAVRQAPLIIPLKATSTPVSIKQYPMSQEARLGIKPHIQRLLDQGILVPCQSPWNTPLLPVKKPGTNDYRPVQDLREVNKRVEDIHPTVPNPYNLLSGLPPSHQWYTVLDLKDAFFCLRLHPTSQPLFAFEWRDPEMGISGQLTWTRLPQGFKNSPTLFNEALHRDLADFRIQHPDLILLQYVDDLLLAATSEQDCQRGTRALLQTLGNLGYRASAKKAQICQKQVKYLGYLLKEGQRWLTEARKETVMGQPTPKTPRQLREFLGTAGFCRLWIPGFAEMAAPLYPLTKPGTLFNWGPDQQKAYQEIKQALLTAPALGLPDLTKPFELFVDEKQGYAKGVLTQKLGPWRRPVAYLSKKLDPVAAGWPPCLRMVAAIAVLTKDAGKLTMGQPLVILAPHAVEALVKQPPDRWLSNARMTHYQAMLLDTDRVQFGPVVALNPATLLPLPEKEAPHDCLEILAETHGTRPDLTDQPIPDADYTWYTDGSSFLQEGQRRAGAAVTTETEVIWARALPAGTSAQRAELIALTQALKMAEGKKLNVYTDSRYAFATAHVHGEIYRRRGWLTSEGREIKNKNEILALLKALFLPKRLSIIHCPGHQKGNSAEARGNRMADQAAREAAMKAVLETSTLLAGKRTADGSEFEKRTADGSEFESPKKKAKVE

SEQ ID NO: 6856 - protein, 2171 aa, synthetic construct
MPAAKRVKLDGGDKKYSIGLDIGTNSVGWAVITDEYKVPSKKFKVLGNTDRHSIKKNLIGALLFDSGETAEATRLKRTARRRYTRRKNRICYLQEIFSNEMAKVDDSFFHRLEESFLVEEDKKHERHPIFGNIVDEVAYHEKYPTIYHLRKKLVDSTDKADLRLIYLALAHMIKFRGHFLIEGDLNPDNSDVDKLFIQLVQTYNQLFEENPINASGVDAKAILSARLSKSRRLENLIAQLPGEKKNGLFGNLIALSLGLTPNFKSNFDLAEDAKLQLSKDTYDDDLDNLLAQIGDQYADLFLAAKNLSDAILLSDILRVNTEITKAPLSASMIKRYDEHHQDLTLLKALVRQQLPEKYKEIFFDQSKNGYAGYIDGGASQEEFYKFIKPILEKMDGTEELLVKLNREDLLRKQRTFDNGSIPHQIHLGELHAILRRQEDFYPFLKDNREKIEKILTFRIPYYVGPLARGNSRFAWMTRKSEETITPWNFEEVVDKGASAQSFIERMTNFDKNLPNEKVLPKHSLLYEYFTVYNELTKVKYVTEGMRKPAFLSGEQKKAIVDLLFKTNRKVTVKQLKEDYFKKIECFDSVEISGVEDRFNASLGTYHDLLKIIKDKDFLDNEENEDILEDIVLTLTLFEDREMIEERLKTYAHLFDDKVMKQLKRRRYTGWGRLSRKLINGIRDKQSGKTILDFLKSDGFANRNFMQLIHDDSLTFKEDIQKAQVSGQGDSLHEHIANLAGSPAIKKGILQTVKVVDELVKVMGRHKPENIVIEMARENQTTQKGQKNSRERMKRIEEGIKELGSQILKEHPVENTQLQNEKLYLYYLQNGRDMYVDQELDINRLSDYDVDHIVPQSFLKDDSIDNKVLTRSDKARGKSDNVPSEEVVKKMKNYWRQLLNAKLITQRKFDNLTKAERGGLSELDKAGFIKRQLVETRQITKHVAQILDSRMNTKYDENDKLIREVKVITLKSKLVSDFRKDFQFYKVREINNYHHAHDAYLNAVVGTALIKKYPKLESEFVYGDYKVYDVRKMIAKSEQEIGKATAKYFFYSNIMNFFKTEITLANGEIRKRPLIETNGETGEIVWDKGRDFATVRKVLSMPQVNIVKKTEVQTGGFSKESILPKRNSDKLIARKKDWDPKKYGGFDSPTVAYSVLVVAKVEKGKSKKLKSVKELLGITIMERSSFEKNPIDFLEAKGYKEVKKDLIIKLPKYSLFELENGRKRMLASAGELQKGNELALPSKYVNFLYLASHYEKLKGSPEDNEQKQLFVEQHKHYLDEIIEQISEFSKRVILADANLDKVLSAYNKHRDKPIREQAENIIHLFTLTNLGAPAAFKYFDTTIDRKRYTSTKEVLDATLIHQSITGLYETRIDLSQLGGDGGGSSGGSGGGGGMDLLKPLTVERKGVKIKGYWNSQADITCVPKDLLQGEEPVRQQNVTTIHGTQEGDVYYVNLKIDGRRINTEVIGTTLDYAIITPGDVPWILKKPLELTIKLDLEEQQGTLLNNSILSKKGKEELKQLFEKYSALWQSWENQVGHRRIRPHKIATGTVKPTPQKQYHINPKAKPDIQIVINDLLKQGVLIQKESTMNTPVYPVPKPNGRWRMVLDYRAVNKVTPLIAVQNQHSYGILGSLFKGRYKTTIDLSNGFWAHPIVPEDYWITAFTWQGKQYCWTVLPQGFLNSPGLFTGDVVDLLQGIPNVEVYVDDVYISHDSEKEHLEYLDILFNRLKEAGYIISLKKSNIANSIVDFLGFQITNEGRGLTDTFKEKLENITAPTTLKQLQSILGLLNFARNFIPDFTELIAPLYALIPKSTKNYVPWQIEHSTTLETLITKLNGAEYLQGRKGDKTLIMKVNASYTTGYIRYYNEGEKKPISYVSIVFSKTELKFTELEKLLTTVHKGLLKALDLSMGQNIHVYSPIVSMQNIQKTPQTAKKALASRWLSWLSYLEDPRIRFFYDPQMPALKDLPAVDTGKDNKKHPSNFQHIFYTDGSAITSPTKEGHLNAGMGIVYFINKDGNLQKQQEWSISLGNHTAQFAEIAAFEFALKKCLPLGGNILVVTDSNYVAKAYNEELDVWASNGFVNNRKKPLKHISKWKSVADLKRLRPDVVVTHEPGHQKLDSSPHAYGNNLADQLATQASFKVHAGKRTADGSEFEKRTADGSEFESPKKKAKVE

SEQ ID NO: 6857 - protein, 2093 aa, synthetic construct
MPAAKRVKLDGGDKKYSIGLDIGTNSVGWAVITDEYKVPSKKFKVLGNTDRHSIKKNLIGALLFDSGETAEATRLKRTARRRYTRRKNRICYLQEIFSNEMAKVDDSFFHRLEESFLVEEDKKHERHPIFGNIVDEVAYHEKYPTIYHLRKKLVDSTDKADLRLIYLALAHMIKFRGHFLIEGDLNPDNSDVDKLFIQLVQTYNQLFEENPINASGVDAKAILSARLSKSRRLENLIAQLPGEKKNGLFGNLIALSLGLTPNFKSNFDLAEDAKLQLSKDTYDDDLDNLLAQIGDQYADLFLAAKNLSDAILLSDILRVNTEITKAPLSASMIKRYDEHHQDLTLLKALVRQQLPEKYKEIFFDQSKNGYAGYIDGGASQEEFYKFIKPILEKMDGTEELLVKLNREDLLRKQRTFDNGSIPHQIHLGELHAILRRQEDFYPFLKDNREKIEKILTFRIPYYVGPLARGNSRFAWMTRKSEETITPWNFEEVVDKGASAQSFIERMTNFDKNLPNEKVLPKHSLLYEYFTVYNELTKVKYVTEGMRKPAFLSGEQKKAIVDLLFKTNRKVTVKQLKEDYFKKIECFDSVEISGVEDRFNASLGTYHDLLKIIKDKDFLDNEENEDILEDIVLTLTLFEDREMIEERLKTYAHLFDDKVMKQLKRRRYTGWGRLSRKLINGIRDKQSGKTILDFLKSDGFANRNFMQLIHDDSLTFKEDIQKAQVSGQGDSLHEHIANLAGSPAIKKGILQTVKVVDELVKVMGRHKPENIVIEMARENQTTQKGQKNSRERMKRIEEGIKELGSQILKEHPVENTQLQNEKLYLYYLQNGRDMYVDQELDINRLSDYDVDHIVPQSFLKDDSIDNKVLTRSDKARGKSDNVPSEEVVKKMKNYWRQLLNAKLITQRKFDNLTKAERGGLSELDKAGFIKRQLVETRQITKHVAQILDSRMNTKYDENDKLIREVKVITLKSKLVSDFRKDFQFYKVREINNYHHAHDAYLNAVVGTALIKKYPKLESEFVYGDYKVYDVRKMIAKSEQEIGKATAKYFFYSNIMNFFKTEITLANGEIRKRPLIETNGETGEIVWDKGRDFATVRKVLSMPQVNIVKKTEVQTGGFSKESILPKRNSDKLIARKKDWDPKKYGGFDSPTVAYSVLVVAKVEKGKSKKLKSVKELLGITIMERSSFEKNPIDFLEAKGYKEVKKDLIIKLPKYSLFELENGRKRMLASAGELQKGNELALPSKYVNFLYLASHYEKLKGSPEDNEQKQLFVEQHKHYLDEIIEQISEFSKRVILADANLDKVLSAYNKHRDKPIREQAENIIHLFTLTNLGAPAAFKYFDTTIDRKRYTSTKEVLDATLIHQSITGLYETRIDLSQLGGDGGGSSGGSGGGGGTLQLEEEYRLFEPESTQKQEMDIWLKNFPQAWAETGGMGTAHCQAPVLIQLKATATPISIRQYPMPHEAYQGIKPHIRRMLDQGILKPCQSPWNTPLLPVKKPGTEDYRPVQDLREVNKRVEDIHPTVPNPYNLLSTLPPSHPWYTVLDLKDAFFCLRLHSESQLLFAFEWRDPEIGLSGQLTWTRLPQGFKNSPTLFNEALHSDLADFRVRYPALVLLQYVDDLLLAAATRTECLEGTKALLETLGNKGYRASAKKAQICLQEVTYLGYSLKDGQRWLTKARKEAILSIPVPKNSRQVREFLGKAGYCRLFIPGFAELAAPLYPLTRPGTLFQWGTEQQLAFEDIKKALLSSPALGLPDITKPFELFIDENSGFAKGVLVQKLGPWKRPVAYLSKKLDTVASGWPPCLRMVAAIAILVKDAGKLTLGQPLTILTSHPVEALVRQPPNKWLSNARMTHYQAMLLDAERVHFGPTVSLNPATLLPLPSGGNHHDCLQILAETHGTRPDLTDQPLPDADLTWYTDGSSFIRNGEREAGAAVTTESEVIWAAPLPPGTSAQRAELIALTQALKMAEGKKLTVYTDSRYAFATTHVHGEIYRRRGWLTSEGKEIKNKNEILALLEALFLPKRLSIIHCPGHQKGDSPQAKGNRLADDTAKKAATETHSSLTVLPAGKRTADGSEFEKRTADGSEFESPKKKAKVE

SEQ ID NO: 6858 - protein, 2216 aa, synthetic construct
MPAAKRVKLDGGDKKYSIGLDIGTNSVGWAVITDEYKVPSKKFKVLGNTDRHSIKKNLIGALLFDSGETAEATRLKRTARRRYTRRKNRICYLQEIFSNEMAKVDDSFFHRLEESFLVEEDKKHERHPIFGNIVDEVAYHEKYPTIYHLRKKLVDSTDKADLRLIYLALAHMIKFRGHFLIEGDLNPDNSDVDKLFIQLVQTYNQLFEENPINASGVDAKAILSARLSKSRRLENLIAQLPGEKKNGLFGNLIALSLGLTPNFKSNFDLAEDAKLQLSKDTYDDDLDNLLAQIGDQYADLFLAAKNLSDAILLSDILRVNTEITKAPLSASMIKRYDEHHQDLTLLKALVRQQLPEKYKEIFFDQSKNGYAGYIDGGASQEEFYKFIKPILEKMDGTEELLVKLNREDLLRKQRTFDNGSIPHQIHLGELHAILRRQEDFYPFLKDNREKIEKILTFRIPYYVGPLARGNSRFAWMTRKSEETITPWNFEEVVDKGASAQSFIERMTNFDKNLPNEKVLPKHSLLYEYFTVYNELTKVKYVTEGMRKPAFLSGEQKKAIVDLLFKTNRKVTVKQLKEDYFKKIECFDSVEISGVEDRFNASLGTYHDLLKIIKDKDFLDNEENEDILEDIVLTLTLFEDREMIEERLKTYAHLFDDKVMKQLKRRRYTGWGRLSRKLINGIRDKQSGKTILDFLKSDGFANRNFMQLIHDDSLTFKEDIQKAQVSGQGDSLHEHIANLAGSPAIKKGILQTVKVVDELVKVMGRHKPENIVIEMARENQTTQKGQKNSRERMKRIEEGIKELGSQILKEHPVENTQLQNEKLYLYYLQNGRDMYVDQELDINRLSDYDVDHIVPQSFLKDDSIDNKVLTRSDKARGKSDNVPSEEVVKKMKNYWRQLLNAKLITQRKFDNLTKAERGGLSELDKAGFIKRQLVETRQITKHVAQILDSRMNTKYDENDKLIREVKVITLKSKLVSDFRKDFQFYKVREINNYHHAHDAYLNAVVGTALIKKYPKLESEFVYGDYKVYDVRKMIAKSEQEIGKATAKYFFYSNIMNFFKTEITLANGEIRKRPLIETNGETGEIVWDKGRDFATVRKVLSMPQVNIVKKTEVQTGGFSKESILPKRNSDKLIARKKDWDPKKYGGFDSPTVAYSVLVVAKVEKGKSKKLKSVKELLGITIMERSSFEKNPIDFLEAKGYKEVKKDLIIKLPKYSLFELENGRKRMLASAGELQKGNELALPSKYVNFLYLASHYEKLKGSPEDNEQKQLFVEQHKHYLDEIIEQISEFSKRVILADANLDKVLSAYNKHRDKPIREQAENIIHLFTLTNLGAPAAFKYFDTTIDRKRYTSTKEVLDATLIHQSITGLYETRIDLSQLGGDGGGSSGGSGGGGGTLGDQGSRGSDPLPEPRVTLTVEGIPTEFLVNTGAEHSVLTKPMGKMGSKRTVVAGATGSKVYPWTTKRLLKIGQKQVTHSFLVIPECPAPLLGRDLLTKLKAQIQFSTEGPQVTWEDRPAMCLVLNLEEEYRLHEKPVPPSIDPSWLQLFPMVWAEKAGMGLANQVPPVVVELKSDASPVAVRQYPMSKEAREGIRPHIQRFLDLGILVPCQSPWNTPLLPVKKPGTNDYRPVQDLREVNKRVQDIHPTVPNPYNLLSSLPPSHTWYSVLDLKDAFFCLKLHPNSQPLFAFEWRDPEKGNTGQLTWTRLPQGFKNSPTLFDEALHRDLASFRALNPQVVMLQYVDDLLVAAPTYRDCKEGTRRLLQELSKLGYRVSAKKAQLCREEVTYLGYLLKGGKRWLTPARKATVMKIPTPTTPRQVREFLGTAGFCRLWIPGFASLAAPLYPLTREKVPFTWTEAHQEAFGRIKEALLSAPALALPDLTKPFALYVDEKEGVARGVLTQTLGPWRRPVAYLSKKLDPVASGWPTCLKAIAAVALLLKDADKLTLGQNVLVIAPHNLESIVRQPPDRWMTNARMTHYQSLLLNERVSFAPPAILNPATLLPVESDDTPIHICSEILAEETGTRPDLRDQPLPGVPAWYTDGSSFIMDGRRQAGAAIVDNKRTVWASNLPEGTSAQKAELIALTQALRLAEGKSINIYTDSRYAFATAHVHGAIYKQRGLLTSAGKDIKNKEEILALLEAIHLPKRVAIIHCPGHQRGTDPVATGNRKADEAAKQAAQSTRILTETTKNAGKRTADGSEFEKRTADGSEFESPKKKAKVE

SEQ ID NO: 6859 - protein, 2125 aa, synthetic construct
MPAAKRVKLDGGDKKYSIGLDIGTNSVGWAVITDEYKVPSKKFKVLGNTDRHSIKKNLIGALLFDSGETAEATRLKRTARRRYTRRKNRICYLQEIFSNEMAKVDDSFFHRLEESFLVEEDKKHERHPIFGNIVDEVAYHEKYPTIYHLRKKLVDSTDKADLRLIYLALAHMIKFRGHFLIEGDLNPDNSDVDKLFIQLVQTYNQLFEENPINASGVDAKAILSARLSKSRRLENLIAQLPGEKKNGLFGNLIALSLGLTPNFKSNFDLAEDAKLQLSKDTYDDDLDNLLAQIGDQYADLFLAAKNLSDAILLSDILRVNTEITKAPLSASMIKRYDEHHQDLTLLKALVRQQLPEKYKEIFFDQSKNGYAGYIDGGASQEEFYKFIKPILEKMDGTEELLVKLNREDLLRKQRTFDNGSIPHQIHLGELHAILRRQEDFYPFLKDNREKIEKILTFRIPYYVGPLARGNSRFAWMTRKSEETITPWNFEEVVDKGASAQSFIERMTNFDKNLPNEKVLPKHSLLYEYFTVYNELTKVKYVTEGMRKPAFLSGEQKKAIVDLLFKTNRKVTVKQLKEDYFKKIECFDSVEISGVEDRFNASLGTYHDLLKIIKDKDFLDNEENEDILEDIVLTLTLFEDREMIEERLKTYAHLFDDKVMKQLKRRRYTGWGRLSRKLINGIRDKQSGKTILDFLKSDGFANRNFMQLIHDDSLTFKEDIQKAQVSGQGDSLHEHIANLAGSPAIKKGILQTVKVVDELVKVMGRHKPENIVIEMARENQTTQKGQKNSRERMKRIEEGIKELGSQILKEHPVENTQLQNEKLYLYYLQNGRDMYVDQELDINRLSDYDVDHIVPQSFLKDDSIDNKVLTRSDKARGKSDNVPSEEVVKKMKNYWRQLLNAKLITQRKFDNLTKAERGGLSELDKAGFIKRQLVETRQITKHVAQILDSRMNTKYDENDKLIREVKVITLKSKLVSDFRKDFQFYKVREINNYHHAHDAYLNAVVGTALIKKYPKLESEFVYGDYKVYDVRKMIAKSEQEIGKATAKYFFYSNIMNFFKTEITLANGEIRKRPLIETNGETGEIVWDKGRDFATVRKVLSMPQVNIVKKTEVQTGGFSKESILPKRNSDKLIARKKDWDPKKYGGFDSPTVAYSVLVVAKVEKGKSKKLKSVKELLGITIMERSSFEKNPIDFLEAKGYKEVKKDLIIKLPKYSLFELENGRKRMLASAGELQKGNELALPSKYVNFLYLASHYEKLKGSPEDNEQKQLFVEQHKHYLDEIIEQISEFSKRVILADANLDKVLSAYNKHRDKPIREQAENIIHLFTLTNLGAPAAFKYFDTTIDRKRYTSTKEVLDATLIHQSITGLYETRIDLSQLGGDGGGSSGGSGGGGGLLGRDLLTKLKAQIQFSTEGPQVTWEDRPAMCLVLNLEEEYRLHEKPVPPSIDPSWLQLFPMVWAEKAGMGLANQVPPVVVELKSDASPVAVRQYPMSKEAREGIRPHIQRFLDLGILVPCQSPWNTPLLPVKKPGTNDYRPVQDLREVNKRVQDIHPTVPNPYNLLSSLPPSHTWYSVLDLKDAFFCLKLHPNSQPLFAFEWRDPEKGNTGQLTWTRLPQGFKNSPTLFNEALHRDLASFRALNPQVVMLQYVDDLLVAAPTYRDCKEGTRRLLQELSKLGYRVSAKKAQLCREEVTYLGYLLKGGKRWLTPARKATVMKIPTPTTPRQVREFLGTAGFCRLWIPGFASLAAPLYPLTRPKVPFTWTEAHQEAFGRIKEALLSAPALALPDLTKPFALYVDEKEGVARGVLTQTLGPWRRPVAYLSKKLDPVASGWPTCLKAIAAVALLLKDADKLTLGQNVLVIAPHNLESIVRQPPDRWMTNARMTHYQSLLLNERVSFAPPAILNPATLLPVESDDTPIHICSEILAEETGTRPDLRDQPLPGVPAWYTDGSSFIMDGRRQAGAAIVDNKRTVWASNLPEGTSAQKAELIALTQALRLAEGKSINIYTDSRYAFATAHVHGAIYKQRGWLTSAGKDIKNKEEILALLEAIHLPKRVAIIHCPGHQRGTDPVATGNRKADEAAKQAAQSTRILTETTKNAGKRTADGSEFEKRTADGSEFESPKKKAKVE

SEQ ID NO: 6860 - protein, 2125 aa, synthetic construct
MPAAKRVKLDGGDKKYSIGLDIGTNSVGWAVITDEYKVPSKKFKVLGNTDRHSIKKNLIGALLFDSGETAEATRLKRTARRRYTRRKNRICYLQEIFSNEMAKVDDSFFHRLEESFLVEEDKKHERHPIFGNIVDEVAYHEKYPTIYHLRKKLVDSTDKADLRLIYLALAHMIKFRGHFLIEGDLNPDNSDVDKLFIQLVQTYNQLFEENPINASGVDAKAILSARLSKSRRLENLIAQLPGEKKNGLFGNLIALSLGLTPNFKSNFDLAEDAKLQLSKDTYDDDLDNLLAQIGDQYADLFLAAKNLSDAILLSDILRVNTEITKAPLSASMIKRYDEHHQDLTLLKALVRQQLPEKYKEIFFDQSKNGYAGYIDGGASQEEFYKFIKPILEKMDGTEELLVKLNREDLLRKQRTFDNGSIPHQIHLGELHAILRRQEDFYPFLKDNREKIEKILTFRIPYYVGPLARGNSRFAWMTRKSEETITPWNFEEVVDKGASAQSFIERMTNFDKNLPNEKVLPKHSLLYEYFTVYNELTKVKYVTEGMRKPAFLSGEQKKAIVDLLFKTNRKVTVKQLKEDYFKKIECFDSVEISGVEDRFNASLGTYHDLLKIIKDKDFLDNEENEDILEDIVLTLTLFEDREMIEERLKTYAHLFDDKVMKQLKRRRYTGWGRLSRKLINGIRDKQSGKTILDFLKSDGFANRNFMQLIHDDSLTFKEDIQKAQVSGQGDSLHEHIANLAGSPAIKKGILQTVKVVDELVKVMGRHKPENIVIEMARENQTTQKGQKNSRERMKRIEEGIKELGSQILKEHPVENTQLQNEKLYLYYLQNGRDMYVDQELDINRLSDYDVDHIVPQSFLKDDSIDNKVLTRSDKARGKSDNVPSEEVVKKMKNYWRQLLNAKLITQRKFDNLTKAERGGLSELDKAGFIKRQLVETRQITKHVAQILDSRMNTKYDENDKLIREVKVITLKSKLVSDFRKDFQFYKVREINNYHHAHDAYLNAVVGTALIKKYPKLESEFVYGDYKVYDVRKMIAKSEQEIGKATAKYFFYSNIMNFFKTEITLANGEIRKRPLIETNGETGEIVWDKGRDFATVRKVLSMPQVNIVKKTEVQTGGFSKESILPKRNSDKLIARKKDWDPKKYGGFDSPTVAYSVLVVAKVEKGKSKKLKSVKELLGITIMERSSFEKNPIDFLEAKGYKEVKKDLIIKLPKYSLFELENGRKRMLASAGELQKGNELALPSKYVNFLYLASHYEKLKGSPEDNEQKQLFVEQHKHYLDEIIEQISEFSKRVILADANLDKVLSAYNKHRDKPIREQAENIIHLFTLTNLGAPAAFKYFDTTIDRKRYTSTKEVLDATLIHQSITGLYETRIDLSQLGGDGGGSSGGSGGGGGLLGRDLLTKLKAQIQFSTEGPQVTWEDRPAMCLVLNLEEEYRLHEKPVPPSIDPSWLQLFPMVWAEKAGMGLANQVPPVVVELKSDASPVAVRQYPMSKEAREGIRPHIQRFLDLGILVPCQSPWNTPLLPVKKPGTNDYRPVQDLREVNKRVQDIHPTVPNPYNLLSSLPPSHTWYSVLDLKDAFFCLKLHPNSQPLFAFEWRDPEKGNTGQLTWTRLPQGFKNSPTLFNEALHRDLASFRALNPQVVMLQYVDDLLVAAPTYRDCKEGTRRLLQELSKLGYRVSAKKAQLCREEVTYLGYLLKGGKRWLTPARKATVMKIPTPTTPRQVREFLGKAGFCRLFIPGFASLAAPLYPLTRPKVPFTWTEAHQEAFGRIKEALLSAPALALPDLTKPFALYVDEKEGVARGVLTQTLGPWRRPVAYLSKKLDPVASGWPTCLKAIAAVALLLKDADKLTLGQNVLVIAPHNLESIVRQPPDRWMTNARMTHYQSLLLNERVSFAPPAILNPATLLPVESDDTPIHICSEILAEETGTRPDLRDQPLPGVPAWYTDGSSFIMDGRRQAGAAIVDNKRTVWASNLPEGTSAQKAELIALTQALRLAEGKSINIYTDSRYAFATAHVHGAIYKQRGWLTSAGKDIKNKEEILALLEAIHLPKRVAIIHCPGHQRGTDPVATGNRKADEAAKQAAQSTRILTETTKNAGKRTADGSEFEKRTADGSEFESPKKKAKVE

SEQ ID NO: 6861 - protein, 2216 aa, synthetic construct
MPAAKRVKLDGGDKKYSIGLDIGTNSVGWAVITDEYKVPSKKFKVLGNTDRHSIKKNLIGALLFDSGETAEATRLKRTARRRYTRRKNRICYLQEIFSNEMAKVDDSFFHRLEESFLVEEDKKHERHPIFGNIVDEVAYHEKYPTIYHLRKKLVDSTDKADLRLIYLALAHMIKFRGHFLIEGDLNPDNSDVDKLFIQLVQTYNQLFEENPINASGVDAKAILSARLSKSRRLENLIAQLPGEKKNGLFGNLIALSLGLTPNFKSNFDLAEDAKLQLSKDTYDDDLDNLLAQIGDQYADLFLAAKNLSDAILLSDILRVNTEITKAPLSASMIKRYDEHHQDLTLLKALVRQQLPEKYKEIFFDQSKNGYAGYIDGGASQEEFYKFIKPILEKMDGTEELLVKLNREDLLRKQRTFDNGSIPHQIHLGELHAILRRQEDFYPFLKDNREKIEKILTFRIPYYVGPLARGNSRFAWMTRKSEETITPWNFEEVVDKGASAQSFIERMTNFDKNLPNEKVLPKHSLLYEYFTVYNELTKVKYVTEGMRKPAFLSGEQKKAIVDLLFKTNRKVTVKQLKEDYFKKIECFDSVEISGVEDRFNASLGTYHDLLKIIKDKDFLDNEENEDILEDIVLTLTLFEDREMIEERLKTYAHLFDDKVMKQLKRRRYTGWGRLSRKLINGIRDKQSGKTILDFLKSDGFANRNFMQLIHDDSLTFKEDIQKAQVSGQGDSLHEHIANLAGSPAIKKGILQTVKVVDELVKVMGRHKPENIVIEMARENQTTQKGQKNSRERMKRIEEGIKELGSQILKEHPVENTQLQNEKLYLYYLQNGRDMYVDQELDINRLSDYDVDHIVPQSFLKDDSIDNKVLTRSDKARGKSDNVPSEEVVKKMKNYWRQLLNAKLITQRKFDNLTKAERGGLSELDKAGFIKRQLVETRQITKHVAQILDSRMNTKYDENDKLIREVKVITLKSKLVSDFRKDFQFYKVREINNYHHAHDAYLNAVVGTALIKKYPKLESEFVYGDYKVYDVRKMIAKSEQEIGKATAKYFFYSNIMNFFKTEITLANGEIRKRPLIETNGETGEIVWDKGRDFATVRKVLSMPQVNIVKKTEVQTGGFSKESILPKRNSDKLIARKKDWDPKKYGGFDSPTVAYSVLVVAKVEKGKSKKLKSVKELLGITIMERSSFEKNPIDFLEAKGYKEVKKDLIIKLPKYSLFELENGRKRMLASAGELQKGNELALPSKYVNFLYLASHYEKLKGSPEDNEQKQLFVEQHKHYLDEIIEQISEFSKRVILADANLDKVLSAYNKHRDKPIREQAENIIHLFTLTNLGAPAAFKYFDTTIDRKRYTSTKEVLDATLIHQSITGLYETRIDLSQLGGDGGGSSGGSGGGGGTLGDQGSRGSDPLPEPRVTLTVEGIPTEFLVNTGAEHSVLTKPMGKMGSKRTVVAGATGSKVYPWTTKRLLKIGQKQVTHSFLVIPECPAPLLGRDLLTKLKAQIQFSTEGPQVTWEDRPAMCLVLNLEEEYRLHEKPVPPSIDPSWLQLFPMVWAEKAGMGLANQVPPVVVELKSDASPVAVRQYPMSKEAREGIRPHIQRFLDLGILVPCQSPWNTPLLPVKKPGTNDYRPVQDLREVNKRVQDIHPTVPNPYNLLSSLPPSHTWYSVLDLKDAFFCLKLHPNSQPLFAFEWRDPEKGNTGQLTWTRLPQGFKNSPTLFNEALHRDLASFRALNPQVVMLQYVDDLLVAAPTYRDCKEGTRRLLQELSKLGYRVSAKKAQLCREEVTYLGYLLKGGKRWLTPARKATVMKIPTPTTPRQVREFLGTAGFCRLWIPGFASLAAPLYPLTRPKVPFTWTEAHQEAFGRIKEALLSAPALALPDLTKPFALYVDEKEGVARGVLTQTLGPWRRPVAYLSKKLDPVASGWPTCLKAIAAVALLLKDADKLTLGQNVLVIAPHNLESIVRQPPDRWMTNARMTHYQSLLLNERVSFAPPAILNPATLLPVESDDTPIHICSEILAEETGTRPDLRDQPLPGVPAWYTDGSSFIMDGRRQAGAAIVDNKRTVWASNLPEGTSAQKAELIALTQALRLAEGKSINIYTDSRYAFATAHVHGAIYKQRGWLTSAGKDIKNKEEILALLEAIHLPKRVAIIHCPGHQRGTDPVATGNRKADEAAKQAAQSTRILTETTKNAGKRTADGSEFEKRTADGSEFESPKKKAKVE

SEQ ID NO: 6862 - protein, 2216 aa, synthetic construct
MPAAKRVKLDGGDKKYSIGLDIGTNSVGWAVITDEYKVPSKKFKVLGNTDRHSIKKNLIGALLFDSGETAEATRLKRTARRRYTRRKNRICYLQEIFSNEMAKVDDSFFHRLEESFLVEEDKKHERHPIFGNIVDEVAYHEKYPTIYHLRKKLVDSTDKADLRLIYLALAHMIKFRGHFLIEGDLNPDNSDVDKLFIQLVQTYNQLFEENPINASGVDAKAILSARLSKSRRLENLIAQLPGEKKNGLFGNLIALSLGLTPNFKSNFDLAEDAKLQLSKDTYDDDLDNLLAQIGDQYADLFLAAKNLSDAILLSDILRVNTEITKAPLSASMIKRYDEHHQDLTLLKALVRQQLPEKYKEIFFDQSKNGYAGYIDGGASQEEFYKFIKPILEKMDGTEELLVKLNREDLLRKQRTFDNGSIPHQIHLGELHAILRRQEDFYPFLKDNREKIEKILTFRIPYYVGPLARGNSRFAWMTRKSEETITPWNFEEVVDKGASAQSFIERMTNFDKNLPNEKVLPKHSLLYEYFTVYNELTKVKYVTEGMRKPAFLSGEQKKAIVDLLFKTNRKVTVKQLKEDYFKKIECFDSVEISGVEDRFNASLGTYHDLLKIIKDKDFLDNEENEDILEDIVLTLTLFEDREMIEERLKTYAHLFDDKVMKQLKRRRYTGWGRLSRKLINGIRDKQSGKTILDFLKSDGFANRNFMQLIHDDSLTFKEDIQKAQVSGQGDSLHEHIANLAGSPAIKKGILQTVKVVDELVKVMGRHKPENIVIEMARENQTTQKGQKNSRERMKRIEEGIKELGSQILKEHPVENTQLQNEKLYLYYLQNGRDMYVDQELDINRLSDYDVDHIVPQSFLKDDSIDNKVLTRSDKARGKSDNVPSEEVVKKMKNYWRQLLNAKLITQRKFDNLTKAERGGLSELDKAGFIKRQLVETRQITKHVAQILDSRMNTKYDENDKLIREVKVITLKSKLVSDFRKDFQFYKVREINNYHHAHDAYLNAVVGTALIKKYPKLESEFVYGDYKVYDVRKMIAKSEQEIGKATAKYFFYSNIMNFFKTEITLANGEIRKRPLIETNGETGEIVWDKGRDFATVRKVLSMPQVNIVKKTEVQTGGFSKESILPKRNSDKLIARKKDWDPKKYGGFDSPTVAYSVLVVAKVEKGKSKKLKSVKELLGITIMERSSFEKNPIDFLEAKGYKEVKKDLIIKLPKYSLFELENGRKRMLASAGELQKGNELALPSKYVNFLYLASHYEKLKGSPEDNEQKQLFVEQHKHYLDEIIEQISEFSKRVILADANLDKVLSAYNKHRDKPIREQAENIIHLFTLTNLGAPAAFKYFDTTIDRKRYTSTKEVLDATLIHQSITGLYETRIDLSQLGGDGGGSSGGSGGGGGTLGDQGSRGSDPLPEPRVTLTVEGIPTEFLVNTGAEHSVLTKPMGKMGSKRTVVAGATGSKVYPWTTKRLLKIGQKQVTHSFLVIPECPAPLLGRDLLTKLKAQIQFSTEGPQVTWEDRPAMCLVLNLEEEYRLHEKPVPPSIDPSWLQLFPMVWAEKAGMGLANQVPPVVVELKSDASPVAVRQYPMSKEAREGIRPHIQRFLDLGILVPCQSPWNTPLLPVKKPGTNDYRPVQDLREVNKRVQDIHPTVPNPYNLLSSLPPSHTWYSVLDLKDAFFCLKLHPNSQPLFAFEWRDPEKGNTGQLTWTRLPQGFKNSPTLFNEALHRDLASFRALNPQVVMLQYVDDLLVAAPTYRDCKEGTRRLLQELSKLGYRVSAKKAQLCREEVTYLGYLLKGGKRWLTPARKATVMKIPTPTTPRQVREFLGKAGFCRLFIPGFASLAAPLYPLTRPKVPFTWTEAHQEAFGRIKEALLSAPALALPDLTKPFALYVDEKEGVARGVLTQTLGPWRRPVAYLSKKLDPVASGWPTCLKAIAAVALLLKDADKLTLGQNVLVIAPHNLESIVRQPPDRWMTNARMTHYQSLLLNERVSFAPPAILNPATLLPVESDDTPIHICSEILAEETGTRPDLRDQPLPGVPAWYTDGSSFIMDGRRQAGAAIVDNKRTVWASNLPEGTSAQKAELIALTQALRLAEGKSINIYTDSRYAFATAHVHGAIYKQRGWLTSAGKDIKNKEEILALLEAIHLPKRVAIIHCPGHQRGTDPVATGNRKADEAAKQAAQSTRILTETTKNAGKRTADGSEFEKRTADGSEFESPKKKAKVE

SEQ ID NO: 6863 - protein, 2094 aa, synthetic construct
MPAAKRVKLDGGDKKYSIGLDIGTNSVGWAVITDEYKVPSKKFKVLGNTDRHSIKKNLIGALLFDSGETAEATRLKRTARRRYTRRKNRICYLQEIFSNEMAKVDDSFFHRLEESFLVEEDKKHERHPIFGNIVDEVAYHEKYPTIYHLRKKLVDSTDKADLRLIYLALAHMIKFRGHFLIEGDLNPDNSDVDKLFIQLVQTYNQLFEENPINASGVDAKAILSARLSKSRRLENLIAQLPGEKKNGLFGNLIALSLGLTPNFKSNFDLAEDAKLQLSKDTYDDDLDNLLAQIGDQYADLFLAAKNLSDAILLSDILRVNTEITKAPLSASMIKRYDEHHQDLTLLKALVRQQLPEKYKEIFFDQSKNGYAGYIDGGASQEEFYKFIKPILEKMDGTEELLVKLNREDLLRKQRTFDNGSIPHQIHLGELHAILRRQEDFYPFLKDNREKIEKILTFRIPYYVGPLARGNSRFAWMTRKSEETITPWNFEEVVDKGASAQSFIERMTNFDKNLPNEKVLPKHSLLYEYFTVYNELTKVKYVTEGMRKPAFLSGEQKKAIVDLLFKTNRKVTVKQLKEDYFKKIECFDSVEISGVEDRFNASLGTYHDLLKIIKDKDFLDNEENEDILEDIVLTLTLFEDREMIEERLKTYAHLFDDKVMKQLKRRRYTGWGRLSRKLINGIRDKQSGKTILDFLKSDGFANRNFMQLIHDDSLTFKEDIQKAQVSGQGDSLHEHIANLAGSPAIKKGILQTVKVVDELVKVMGRHKPENIVIEMARENQTTQKGQKNSRERMKRIEEGIKELGSQILKEHPVENTQLQNEKLYLYYLQNGRDMYVDQELDINRLSDYDVDHIVPQSFLKDDSIDNKVLTRSDKARGKSDNVPSEEVVKKMKNYWRQLLNAKLITQRKFDNLTKAERGGLSELDKAGFIKRQLVETRQITKHVAQILDSRMNTKYDENDKLIREVKVITLKSKLVSDFRKDFQFYKVREINNYHHAHDAYLNAVVGTALIKKYPKLESEFVYGDYKVYDVRKMIAKSEQEIGKATAKYFFYSNIMNFFKTEITLANGEIRKRPLIETNGETGEIVWDKGRDFATVRKVLSMPQVNIVKKTEVQTGGFSKESILPKRNSDKLIARKKDWDPKKYGGFDSPTVAYSVLVVAKVEKGKSKKLKSVKELLGITIMERSSFEKNPIDFLEAKGYKEVKKDLIIKLPKYSLFELENGRKRMLASAGELQKGNELALPSKYVNFLYLASHYEKLKGSPEDNEQKQLFVEQHKHYLDEIIEQISEFSKRVILADANLDKVLSAYNKHRDKPIREQAENIIHLFTLTNLGAPAAFKYFDTTIDRKRYTSTKEVLDATLIHQSITGLYETRIDLSQLGGDGGGSSGGSGGGGGTLNLEDEYRLYETSAEPEVSPGSTWLSDFPQAWAETGGMGLAVRQAPLIIPLKATSTPVSIKQYPMSQEAKLGIKPHIQRLLDQGILVPCQSPWNTPLLPVKKPGTNDYRPVQDLREVNKRVEDIHPTVPNPYNLLSGLPPSHRWYTVLDLKDAFFCLRLHPTSQPLFAFEWRDPGMGISGQLTWTRLPQGFKNSPTLFNEALHRDLADFRIQHPDLILLQYVDDILLAATSELDCQQGTRALLLTLGNLGYRASAKKAQLCQKQVKYLGYLLKEGQRWLTEARKETVMGQPTPKTPRQLREFLGTAGFCRLWIPGFAEMAAPLYPLTKPGTLFNWGPDQQKAYQEIKQALLTAPALGLPDLTKPFELFVDEKQGYAKGVLTQKLGPWRRPVAYLSKKLDPVAAGWPPCLRMVAAIAVLRKDAGKLTMGQPLVILAPHAVEALVKQPPDRWLSNARMTHYQAMLLDTDRVQFGPVVALNPATLLPLPEEGAPHDCLEILAETHGTRPDLTDQPIPDADHTWYTDGSSFLQEGQRKAGAAVTTETEVIWARALPAGTSAQRAELIALTQALKMAEGKRLNVYTDSRYAFATAHIHGEIYRRRGWLTSEGREIKNKSEILALLKALFLPKRLSIIHCLGHQKGDSAEARGNRLADQAAREAAIKTPPDTSTLLAGKRTADGSEFEKRTADGSEFESPKKKAKVE

SEQ ID NO: 6864 - protein, 2094 aa, synthetic construct
MPAAKRVKLDGGDKKYSIGLDIGTNSVGWAVITDEYKVPSKKFKVLGNTDRHSIKKNLIGALLFDSGETAEATRLKRTARRRYTRRKNRICYLQEIFSNEMAKVDDSFFHRLEESFLVEEDKKHERHPIFGNIVDEVAYHEKYPTIYHLRKKLVDSTDKADLRLIYLALAHMIKFRGHFLIEGDLNPDNSDVDKLFIQLVQTYNQLFEENPINASGVDAKAILSARLSKSRRLENLIAQLPGEKKNGLFGNLIALSLGLTPNFKSNFDLAEDAKLQLSKDTYDDDLDNLLAQIGDQYADLFLAAKNLSDAILLSDILRVNTEITKAPLSASMIKRYDEHHQDLTLLKALVRQQLPEKYKEIFFDQSKNGYAGYIDGGASQEEFYKFIKPILEKMDGTEELLVKLNREDLLRKQRTFDNGSIPHQIHLGELHAILRRQEDFYPFLKDNREKIEKILTFRIPYYVGPLARGNSRFAWMTRKSEETITPWNFEEVVDKGASAQSFIERMTNFDKNLPNEKVLPKHSLLYEYFTVYNELTKVKYVTEGMRKPAFLSGEQKKAIVDLLFKTNRKVTVKQLKEDYFKKIECFDSVEISGVEDRFNASLGTYHDLLKIIKDKDFLDNEENEDILEDIVLTLTLFEDREMIEERLKTYAHLFDDKVMKQLKRRRYTGWGRLSRKLINGIRDKQSGKTILDFLKSDGFANRNFMQLIHDDSLTFKEDIQKAQVSGQGDSLHEHIANLAGSPAIKKGILQTVKVVDELVKVMGRHKPENIVIEMARENQTTQKGQKNSRERMKRIEEGIKELGSQILKEHPVENTQLQNEKLYLYYLQNGRDMYVDQELDINRLSDYDVDHIVPQSFLKDDSIDNKVLTRSDKARGKSDNVPSEEVVKKMKNYWRQLLNAKLITQRKFDNLTKAERGGLSELDKAGFIKRQLVETRQITKHVAQILDSRMNTKYDENDKLIREVKVITLKSKLVSDFRKDFQFYKVREINNYHHAHDAYLNAVVGTALIKKYPKLESEFVYGDYKVYDVRKMIAKSEQEIGKATAKYFFYSNIMNFFKTEITLANGEIRKRPLIETNGETGEIVWDKGRDFATVRKVLSMPQVNIVKKTEVQTGGFSKESILPKRNSDKLIARKKDWDPKKYGGFDSPTVAYSVLVVAKVEKGKSKKLKSVKELLGITIMERSSFEKNPIDFLEAKGYKEVKKDLIIKLPKYSLFELENGRKRMLASAGELQKGNELALPSKYVNFLYLASHYEKLKGSPEDNEQKQLFVEQHKHYLDEIIEQISEFSKRVILADANLDKVLSAYNKHRDKPIREQAENIIHLFTLTNLGAPAAFKYFDTTIDRKRYTSTKEVLDATLIHQSITGLYETRIDLSQLGGDGGGSSGGSGGGGGTLNIEDEHRLHETSKEPDVSLGSTWLSDFPQAWAETGGMGLAVRQAPLIIPLKATSTPVSIKQYPMSQEARLGIKPHIQRLLDQGILVPCQSPWNTPLLPVKKPGTNDYRPVQDLREVNKRVEDIHPTVPNPYNLLSGLPPSHQWYTVLDLKDAFFCLRLHPTSQPLFAFEWRDPEMGISGQLTWTRLPQGFKNSPTLFNEALHRDLADFRIQHPDLILLQYVDDLLLAATSELDCQQGTRALLQTLGNLGYRASAKKAQICQKQVKYLGYLLKEGQRWLTEARKETVMGQPTPKTPRQLREFLGTAGFCRLWIPGFAEMAAPLYPLTKPGTLFNWGPDQQKAYQEIKQALLTAPALGLPDLTKPFELFVDEKQGYAKGVLTQKLGPWRRPVAYLSKKLDPVAAGWPPCLRMVAAIAVLTKDAGKLTMGQPLVILAPHAVEALVKQPPDRWLSNARMTHYQALLLDTDRVQFGPVVALNPATLLPLPEEGLQHNCLDILAEAHGTRPDLTDQPLPDADHTWYTDGSSLLQEGQRKAGAAVTTETEVIWAKALPAGTSAQRAELIALTQALKMAEGKKLNVYTDSRYAFATAHIHGEIYRRRGWLTSEGKEIKNKDEILALLKALFLPKRLSIIHCPGHQKGHSAEARGNRMADQAARKAAITETPDTSTLLAGKRTADGSEFEKRTADGSEFESPKKKAKVE

SEQ ID NO: 6865 - protein, 2094 aa, synthetic construct
MPAAKRVKLDGGDKKYSIGLDIGTNSVGWAVITDEYKVPSKKFKVLGNTDRHSIKKNLIGALLFDSGETAEATRLKRTARRRYTRRKNRICYLQEIFSNEMAKVDDSFFHRLEESFLVEEDKKHERHPIFGNIVDEVAYHEKYPTIYHLRKKLVDSTDKADLRLIYLALAHMIKFRGHFLIEGDLNPDNSDVDKLFIQLVQTYNQLFEENPINASGVDAKAILSARLSKSRRLENLIAQLPGEKKNGLFGNLIALSLGLTPNFKSNFDLAEDAKLQLSKDTYDDDLDNLLAQIGDQYADLFLAAKNLSDAILLSDILRVNTEITKAPLSASMIKRYDEHHQDLTLLKALVRQQLPEKYKEIFFDQSKNGYAGYIDGGASQEEFYKFIKPILEKMDGTEELLVKLNREDLLRKQRTFDNGSIPHQIHLGELHAILRRQEDFYPFLKDNREKIEKILTFRIPYYVGPLARGNSRFAWMTRKSEETITPWNFEEVVDKGASAQSFIERMTNFDKNLPNEKVLPKHSLLYEYFTVYNELTKVKYVTEGMRKPAFLSGEQKKAIVDLLFKTNRKVTVKQLKEDYFKKIECFDSVEISGVEDRFNASLGTYHDLLKIIKDKDFLDNEENEDILEDIVLTLTLFEDREMIEERLKTYAHLFDDKVMKQLKRRRYTGWGRLSRKLINGIRDKQSGKTILDFLKSDGFANRNFMQLIHDDSLTFKEDIQKAQVSGQGDSLHEHIANLAGSPAIKKGILQTVKVVDELVKVMGRHKPENIVIEMARENQTTQKGQKNSRERMKRIEEGIKELGSQILKEHPVENTQLQNEKLYLYYLQNGRDMYVDQELDINRLSDYDVDHIVPQSFLKDDSIDNKVLTRSDKARGKSDNVPSEEVVKKMKNYWRQLLNAKLITQRKFDNLTKAERGGLSELDKAGFIKRQLVETRQITKHVAQILDSRMNTKYDENDKLIREVKVITLKSKLVSDFRKDFQFYKVREINNYHHAHDAYLNAVVGTALIKKYPKLESEFVYGDYKVYDVRKMIAKSEQEIGKATAKYFFYSNIMNFFKTEITLANGEIRKRPLIETNGETGEIVWDKGRDFATVRKVLSMPQVNIVKKTEVQTGGFSKESILPKRNSDKLIARKKDWDPKKYGGFDSPTVAYSVLVVAKVEKGKSKKLKSVKELLGITIMERSSFEKNPIDFLEAKGYKEVKKDLIIKLPKYSLFELENGRKRMLASAGELQKGNELALPSKYVNFLYLASHYEKLKGSPEDNEQKQLFVEQHKHYLDEIIEQISEFSKRVILADANLDKVLSAYNKHRDKPIREQAENIIHLFTLTNLGAPAAFKYFDTTIDRKRYTSTKEVLDATLIHQSITGLYETRIDLSQLGGDGGGSSGGSGGGGGTLNIEDEHRLHETSKEPDVSLGSTWLSDFPQAWAETGGMGLAVRQAPLIIPLKATSTPVSIKQYPMSQEARLGIKPHIQRLLDQGILVPCQSPWNTPLLPVKKPGTNDYRPVQDLREVNKRVEDIHPTVPNPYNLLSGLPPSHQWYTVLDLKDAFFCLRLHPTSQPLFAFEWRDPEMGISGQLTWTRLPQGFKNSPTLFDEALHRDLADFRIQHPDLILLQYVDDLLLAATSELDCQQGTRALLQTLGNLGYRASAKKAQICQKQVKYLGYLLKEGQRWLTEARKETVMGQPTPKTPRQLREFLGTAGFCRLWIPGFAEMAAPLYPLTKTGTLFNWGPDQQKAYQEIKQALLTAPALGLPDLTKPFELFVDEKQGYAKGVLTQKLGPWRRPVAYLSKKLDPVAAGWPPCLRMVAAIAVLTKDAGKLTMGQPLVILAPHAVEALVKQPPDRWLSNARMTHYQALLLDTDRVQFGPVVALNPATLLPLPEEGLQHNCLDILAEAHGTRPDLTDQPLPDADHTWYTDGSSLLQEGQRKAGAAVTTETEVIWAKALPAGTSAQRAELIALTQALKMAEGKKLNVYTDSRYAFATAHIHGEIYRRRGLLTSEGKEIKNKDEILALLKALFLPKRLSIIHCPGHQKGHSAEARGNRMADQAARKAAITETPDTSTLLAGKRTADGSEFEKRTADGSEFESPKKKAKVE

SEQ ID NO: 6866 - protein, 2094 aa, synthetic construct; identical to SEQ ID NO: 6864

SEQ ID NO: 6867 - protein, 2088 aa, synthetic construct
MPAAKRVKLDGGDKKYSIGLDIGTNSVGWAVITDEYKVPSKKFKVLGNTDRHSIKKNLIGALLFDSGETAEATRLKRTARRRYTRRKNRICYLQEIFSNEMAKVDDSFFHRLEESFLVEEDKKHERHPIFGNIVDEVAYHEKYPTIYHLRKKLVDSTDKADLRLIYLALAHMIKFRGHFLIEGDLNPDNSDVDKLFIQLVQTYNQLFEENPINASGVDAKAILSARLSKSRRLENLIAQLPGEKKNGLFGNLIALSLGLTPNFKSNFDLAEDAKLQLSKDTYDDDLDNLLAQIGDQYADLFLAAKNLSDAILLSDILRVNTEITKAPLSASMIKRYDEHHQDLTLLKALVRQQLPEKYKEIFFDQSKNGYAGYIDGGASQEEFYKFIKPILEKMDGTEELLVKLNREDLLRKQRTFDNGSIPHQIHLGELHAILRRQEDFYPFLKDNREKIEKILTFRIPYYVGPLARGNSRFAWMTRKSEETITPWNFEEVVDKGASAQSFIERMTNFDKNLPNEKVLPKHSLLYEYFTVYNELTKVKYVTEGMRKPAFLSGEQKKAIVDLLFKTNRKVTVKQLKEDYFKKIECFDSVEISGVEDRFNASLGTYHDLLKIIKDKDFLDNEENEDILEDIVLTLTLFEDREMIEERLKTYAHLFDDKVMKQLKRRRYTGWGRLSRKLINGIRDKQSGKTILDFLKSDGFANRNFMQLIHDDSLTFKEDIQKAQVSGQGDSLHEHIANLAGSPAIKKGILQTVKVVDELVKVMGRHKPENIVIEMARENQTTQKGQKNSRERMKRIEEGIKELGSQILKEHPVENTQLQNEKLYLYYLQNGRDMYVDQELDINRLSDYDVDHIVPQSFLKDDSIDNKVLTRSDKARGKSDNVPSEEVVKKMKNYWRQLLNAKLITQRKFDNLTKAERGGLSELDKAGFIKRQLVETRQITKHVAQILDSRMNTKYDENDKLIREVKVITLKSKLVSDFRKDFQFYKVREINNYHHAHDAYLNAVVGTALIKKYPKLESEFVYGDYKVYDVRKMIAKSEQEIGKATAKYFFYSNIMNFFKTEITLANGEIRKRPLIETNGETGEIVWDKGRDFATVRKVLSMPQVNIVKKTEVQTGGFSKESILPKRNSDKLIARKKDWDPKKYGGFDSPTVAYSVLVVAKVEKGKSKKLKSVKELLGITIMERSSFEKNPIDFLEAKGYKEVKKDLIIKLPKYSLFELENGRKRMLASAGELQKGNELALPSKYVNFLYLASHYEKLKGSPEDNEQKQLFVEQHKHYLDEIIEQISEFSKRVILADANLDKVLSAYNKHRDKPIREQAENIIHLFTLTNLGAPAAFKYFDTTIDRKRYTSTKEVLDATLIHQSITGLYETRIDLSQLGGDGGGSSGGSGGGGGTLQLDDEYRLYSPLVKPDQNIQFWLEQFPQAWAETAGMGLAKQVPPQVIQLKASATPVSVRQYPLSKEAQEGIRPHVQRLIQQGILVPVQSPWNTPLLPVRKPGTNDYRPVQDLREVNKRVQDIHPTVPNPYNLLCALPPQRSWYTVLDLKDAFFCLRLHPTSQPLFAFEWRDPGTGRTGQLTWTRLPQGFKNSPTIFDEALHRDLANFRIQHPQVTLLQYVDDLLLAGATKQDCLEGTKALLLELSDLGYRASAKKAQICRREVTYLGYSLRDGQRWLTEARKKTVVQIPAPTTAKQVREFLGTAGFCRLWIPGFATLAAPLYPLTKEKGEFSWAPEHQKAFDAIKKALLSAPALALPDVTKPFTLYVDERKGVARGVLTQTLGPWRRPVAYLSKKLDPVASGWPVCLKAIAAVAILVKDADKLTLGQNITVIAPHALENIVRQPPDRWMTNARMTHYQSLLLTERVTFAPPAALNPATLLPEETDEPVTHDCHQLLIEETGVRKDLTDIPLTGEVLTWFTDGSSYVVEGKRMAGAAVVDGTRTIWASSLPEGTSAQKAELMALTQALRLAEGKSINIYTDSRYAFATAHVHGAIYKQRGLLTSAGREIKNKEEILSLLEALHLPKRLAIIHCPGHQKAKDPISRGNQMADRVAKQAAQGVNLLAGKRTADGSEFEKRTADGSEFESPKKKAKVE

SEQ ID NO: 6868 - protein, 2088 aa, synthetic construct; identical to SEQ ID NO: 6867

SEQ ID NO: 6869 - protein, 2092 aa, synthetic construct
MPAAKRVKLDGGDKKYSIGLDIGTNSVGWAVITDEYKVPSKKFKVLGNTDRHSIKKNLIGALLFDSGETAEATRLKRTARRRYTRRKNRICYLQEIFSNEMAKVDDSFFHRLEESFLVEEDKKHERHPIFGNIVDEVAYHEKYPTIYHLRKKLVDSTDKADLRLIYLALAHMIKFRGHFLIEGDLNPDNSDVDKLFIQLVQTYNQLFEENPINASGVDAKAILSARLSKSRRLENLIAQLPGEKKNGLFGNLIALSLGLTPNFKSNFDLAEDAKLQLSKDTYDDDLDNLLAQIGDQYADLFLAAKNLSDAILLSDILRVNTEITKAPLSASMIKRYDEHHQDLTLLKALVRQQLPEKYKEIFFDQSKNGYAGYIDGGASQEEFYKFIKPILEKMDGTEELLVKLNREDLLRKQRTFDNGSIPHQIHLGELHAILRRQEDFYPFLKDNREKIEKILTFRIPYYVGPLARGNSRFAWMTRKSEETITPWNFEEVVDKGASAQSFIERMTNFDKNLPNEKVLPKHSLLYEYFTVYNELTKVKYVTEGMRKPAFLSGEQKKAIVDLLFKTNRKVTVKQLKEDYFKKIECFDSVEISGVEDRFNASLGTYHDLLKIIKDKDFLDNEENEDILEDIVLTLTLFEDREMIEERLKTYAHLFDDKVMKQLKRRRYTGWGRLSRKLINGIRDKQSGKTILDFLKSDGFANRNFMQLIHDDSLTFKEDIQKAQVSGQGDSLHEHIANLAGSPAIKKGILQTVKVVDELVKVMGRHKPENIVIEMARENQTTQKGQKNSRERMKRIEEGIKELGSQILKEHPVENTQLQNEKLYLYYLQNGRDMYVDQELDINRLSDYDVDHIVPQSFLKDDSIDNKVLTRSDKARGKSDNVPSEEVVKKMKNYWRQLLNAKLITQRKFDNLTKAERGGLSELDKAGFIKRQLVETRQITKHVAQILDSRMNTKYDENDKLIREVKVITLKSKLVSDFRKDFQFYKVREINNYHHAHDAYLNAVVGTALIKKYPKLESEFVYGDYKVYDVRKMIAKSEQEIGKATAKYFFYSNIMNFFKTEITLANGEIRKRPLIETNGETGEIVWDKGRDFATVRKVLSMPQVNIVKKTEVQTGGFSKESILPKRNSDKLIARKKDWDPKKYGGFDSPTVAYSVLVVAKVEKGKSKKLKSVKELLGITIMERSSFEKNPIDFLEAKGYKEVKKDLIIKLPKYSLFELENGRKRMLASAGELQKGNELALPSKYVNFLYLASHYEKLKGSPEDNEQKQLFVEQHKHYLDEIIEQISEFSKRVILADANLDKVLSAYNKHRDKPIREQAENIIHLFTLTNLGAPAAFKYFDTTIDRKRYTSTKEVLDATLIHQSITGLYETRIDLSQLGGDGGGSSGGSGGGGGVLNLEEEYRLHEKPVPSSIDPSWLQLFPTVWAERAGMGLANQVPPVVVELRSGASPVAVRQYPMSKEAREGIRPHIQRFLDLGVLVPCQSPWNTPLLPVKKPGTNDYRPVQDLREINKRVQDIHPTVPNPYNLLSSLPPSHTWYSVLDLKDAFFCLKLHPNSQPLFAFEWRDPEKGNTGQLTWTRLPQGFKNSPTLFNEALHRDLAPFRALNPQVVLLQYVDDLLVAAPTYRDCKEGTQKLLQELSKLGYRVSAKKAQLCQKEVTYLGYLLKEGKRWLTPARKATVMKIPPPTTPRQVREFLGTAGFCRLWIPGFASLAAPLYPLTKPSIPFIWTEEHQKAFDRIKEALLSAPALALPDLTKPFTLYVDERAGVARGVLTQTLGPWRRPVAYLSKKLDPVASGWPTCLKAVAAVALLLKDADKLTLGQNVTVIASHSLESIVRQPPDRWMTNARMTHYQSLLLNERVSFAPPAVLNPATLLPVESEATPVHRCSEILAEETGTRRDLKDQPLPGVPAWYTDGSSFIAEGKRRAGAAIVDGKRTVWASSLPEGTSAQKAELVALTQALRLAEGKDINIYTDSRYAFATAHIHGAIYKQRGWLTSAGKDIKNKEEILALLEAIHLPKRVAIIHCPGHQKGNDPVATGNRRADEAAKQAALSTRVLAETTKPAGKRTADGSEFEKRTADGSEFESPKKKAKVE

SEQ ID NO: 6870 - protein, 2092 aa, synthetic construct
MPAAKRVKLDGGDKKYSIGLDIGTNSVGWAVITDEYKVPSKKFKVLGNTDRHSIKKNLIGALLFDSGETAEATRLKRTARRRYTRRKNRICYLQEIFSNEMAKVDDSFFHRLEESFLVEEDKKHERHPIFGNIVDEVAYHEKYPTIYHLRKKLVDSTDKADLRLIYLALAHMIKFRGHFLIEGDLNPDNSDVDKLFIQLVQTYNQLFEENPINASGVDAKAILSARLSKSRRLENLIAQLPGEKKNGLFGNLIALSLGLTPNFKSNFDLAEDAKLQLSKDTYDDDLDNLLAQIGDQYADLFLAAKNLSDAILLSDILRVNTEITKAPLSASMIKRYDEHHQDLTLLKALVRQQLPEKYKEIFFDQSKNGYAGYIDGGASQEEFYKFIKPILEKMDGTEELLVKLNREDLLRKQRTFDNGSIPHQIHLGELHAILRRQEDFYPFLKDNREKIEKILTFRIPYYVGPLARGNSRFAWMTRKSEETITPWNFEEVVDKGASAQSFIERMTNFDKNLPNEKVLPKHSLLYEYFTVYNELTKVKYVTEGMRKPAFLSGEQKKAIVDLLFKTNRKVTVKQLKEDYFKKIECFDSVEISGVEDRFNASLGTYHDLLKIIKDKDFLDNEENEDILEDIVLTLTLFEDREMIEERLKTYAHLFDDKVMKQLKRRRYTGWGRLSRKLINGIRDKQSGKTILDFLKSDGFANRNFMQLIHDDSLTFKEDIQKAQVSGQGDSLHEHIANLAGSPAIKKGILQTVKVVDELVKVMGRHKPENIVIEMARENQTTQKGQKNSRERMKRIEEGIKELGSQILKEHPVENTQLQNEKLYLYYLQNGRDMYVDQELDINRLSDYDVDHIVPQSFLKDDSIDNKVLTRSDKARGKSDNVPSEEVVKKMKNYWRQLLNAKLITQRKFDNLTKAERGGLSELDKAGFIKRQLVETRQITKHVAQILDSRMNTKYDENDKLIREVKVITLKSKLVSDFRKDFQFYKVREINNYHHAHDAYLNAVVGTALIKKYPKLESEFVYGDYKVYDVRKMIAKSEQEIGKATAKYFFYSNIMNFFKTEITLANGEIRKRPLIETNGETGEIVWDKGRDFATVRKVLSMPQVNIVKKTEVQTGGFSKESILPKRNSDKLIARKKDWDPKKYGGFDSPTVAYSVLVVAKVEKGKSKKLKSVKELLGITIMERSSFEKNPIDFLEAKGYKEVKKDLIIKLPKYSLFELENGRKRMLASAGELQKGNELALPSKYVNFLYLASHYEKLKGSPEDNEQKQLFVEQHKHYLDEIIEQISEFSKRVILADANLDKVLSAYNKHRDKPIREQAENIIHLFTLTNLGAPAAFKYFDTTIDRKRYTSTKEVLDATLIHQSITGLYETRIDLSQLGGDGGGSSGGSGGGGGVLNLEEEYRLHEKPVPSSIDPSWLQLFPTVWAERAGMGLANQVPPVVVELRSGASPVAVRQYPMSKEAREGIRPHIQRFLDLGVLVPCQSPWNTPLLPVKKPGTNDYRPVQDLREINKRVQDIHPTVPNPYNLLSSLPPSHTWYSVLDLKDAFFCLKLHPNSQPLFAFEWRDPEKGNTGQLTWTRLPQGFKNSPTLFNEALHRDLAPFRALNPQVVLLQYVDDLLVAAPTYRDCKEGTQKLLQELSKLGYRVSAKKAQLCQKEVTYLGYLLKEGKRWLTPARKATVMKIPPPTTPRQVREFLGKAGFCRLFIPGFASLAAPLYPLTKPSIPFIWTEEHQKAFDRIKEALLSAPALALPDLTKPFTLYVDERAGVARGVLTQTLGPWRRPVAYLSKKLDPVASGWPTCLKAVAAVALLLKDADKLTLGQNVTVIASHSLESIVRQPPDRWMTNARMTHYQSLLLNERVSFAPPAVLNPATLLPVESEATPVHRCSEILAEETGTRRDLKDQPLPGVPAWYTDGSSFIAEGKRRAGAAIVDGKRTVWASSLPEGTSAQKAELVALTQALRLAEGKDINIYTDSRYAFATAHIHGAIYKQRGWLTSAGKDIKNKEEILALLEAIHLPKRVAIIHCPGHQKGNDPVATGNRRADEAAKQAALSTRVLAETTKPAGKRTADGSEFEKRTADGSEFESPKKKAKVE

SEQ ID NO: 6871 - protein, 2096 aa, synthetic construct
MPAAKRVKLDGGDKKYSIGLDIGTNSVGWAVITDEYKVPSKKFKVLGNTDRHSIKKNLIGALLFDSGETAEATRLKRTARRRYTRRKNRICYLQEIFSNEMAKVDDSFFHRLEESFLVEEDKKHERHPIFGNIVDEVAYHEKYPTIYHLRKKLVDSTDKADLRLIYLALAHMIKFRGHFLIEGDLNPDNSDVDKLFIQLVQTYNQLFEENPINASGVDAKAILSARLSKSRRLENLIAQLPGEKKNGLFGNLIALSLGLTPNFKSNFDLAEDAKLQLSKDTYDDDLDNLLAQIGDQYADLFLAAKNLSDAILLSDILRVNTEITKAPLSASMIKRYDEHHQDLTLLKALVRQQLPEKYKEIFFDQSKNGYAGYIDGGASQEEFYKFIKPILEKMDGTEELLVKLNREDLLRKQRTFDNGSIPHQIHLGELHAILRRQEDFYPFLKDNREKIEKILTFRIPYYVGPLARGNSRFAWMTRKSEETITPWNFEEVVDKGASAQSFIERMTNFDKNLPNEKVLPKHSLLYEYFTVYNELTKVKYVTEGMRKPAFLSGEQKKAIVDLLFKTNRKVTVKQLKEDYFKKIECFDSVEISGVEDRFNASLGTYHDLLKIIKDKDFLDNEENEDILEDIVLTLTLFEDREMIEERLKTYAHLFDDKVMKQLKRRRYTGWGRLSRKLINGIRDKQSGKTILDFLKSDGFANRNFMQLIHDDSLTFKEDIQKAQVSGQGDSLHEHIANLAGSPAIKKGILQTVKVVDELVKVMGRHKPENIVIEMARENQTTQKGQKNSRERMKRIEEGIKELGSQILKEHPVENTQLQNEKLYLYYLQNGRDMYVDQELDINRLSDYDVDHIVPQSFLKDDSIDNKVLTRSDKARGKSDNVPSEEVVKKMKNYWRQLLNAKLITQRKFDNLTKAERGGLSELDKAGFIKRQLVETRQITKHVAQILDSRMNTKYDENDKLIREVKVITLKSKLVSDFRKDFQFYKVREINNYHHAHDAYLNAVVGTALIKKYPKLESEFVYGDYKVYDVRKMIAKSEQEIGKATAKYFFYSNIMNFFKTEITLANGEIRKRPLIETNGETGEIVWDKGRDFATVRKVLSMPQVNIVKKTEVQTGGFSKESILPKRNSDKLIARKKDWDPKKYGGFDSPTVAYSVLVVAKVEKGKSKKLKSVKELLGITIMERSSFEKNPIDFLEAKGYKEVKKDLIIKLPKYSLFELENGRKRMLASAGELQKGNELALPSKYVNFLYLASHYEKLKGSPEDNEQKQLFVEQHKHYLDEIIEQISEFSKRVILADANLDKVLSAYNKHRDKPIREQAENIIHLFTLTNLGAPAAFKYFDTTIDRKRYTSTKEVLDATLIHQSITGLYETRIDLSQLGGDGGGSSGGGGGSGGTAPLEEEYRLFLEAPIQNVTLLEQWKREIPKVWAEINPPGLASTQAPIHVQLLSTALPVRVRQYPITLEAKRSLRETIRKFRAAGILRPVHSPWNTPLLPVRKSGTSEYRMVQDLREVNKRVETIHPTVPNPYTLLSLLPPDRIWYSVLDLKDAFFCIPLAPESQLIFAFEWADAEEGESGQLTWTRLPQGFKNSPTLFNEALNRDLQGFRLDHPSVSLLQYVDDLLIAADTQAACLSATRDLLMTLAELGYRVSGKKAQLCQEEVTYLGFKIHKGSRSLSNSRTQAILQIPVPKTKRQVREFLGTIGYCRLWIPGFAELAQPLYAATRPGNDPLVWGEKEEEAFQSLKLALTQPPALALPSLDKPFQLFVEETSGAAKGVLTQALGPWKRPVAYLSKRLDPVAAGWPRCLRAIAAAALLTREASKLTFGQDIEITSSHNLESLLRSPPDKWLTNARITQYQVLLLDPPRVRFKQTAALNPATLLPETDDTLPIHHCLDTLDSLTSTRPDLTDQPLAQAEATLFTDGSSYIRDGKRYAGAAVVTLDSVIWAEPLPIGTSAQKAELIALTKALEWSKDKSVNIYTDSRYAFATLHVHGMIYRERGWLTAGGKAIKNAPEILALLTAVWLPKRVAVMHCKGHQKDDAPTSTGNRRADEVAREVAIRPLSTQATISAGKRTADGSEFEKRTADGSEFESPKKKAKVE

SEQ ID NO: 6872 - protein, 2100 aa, synthetic construct
MPAAKRVKLDGGDKKYSIGLDIGTNSVGWAVITDEYKVPSKKFKVLGNTDRHSIKKNLIGALLFDSGETAEATRLKRTARRRYTRRKNRICYLQEIFSNEMAKVDDSFFHRLEESFLVEEDKKHERHPIFGNIVDEVAYHEKYPTIYHLRKKLVDSTDKADLRLIYLALAHMIKFRGHFLIEGDLNPDNSDVDKLFIQLVQTYNQLFEENPINASGVDAKAILSARLSKSRRLENLIAQLPGEKKNGLFGNLIALSLGLTPNFKSNFDLAEDAKLQLSKDTYDDDLDNLLAQIGDQYADLFLAAKNLSDAILLSDILRVNTEITKAPLSASMIKRYDEHHQDLTLLKALVRQQLPEKYKEIFFDQSKNGYAGYIDGGASQEEFYKFIKPILEKMDGTEELLVKLNREDLLRKQRTFDNGSIPHQIHLGELHAILRRQEDFYPFLKDNREKIEKILTFRIPYYVGPLARGNSRFAWMTRKSEETITPWNFEEVVDKGASAQSFIERMTNFDKNLPNEKVLPKHSLLYEYFTVYNELTKVKYVTEGMRKPAFLSGEQKKAIVDLLFKTNRKVTVKQLKEDYFKKIECFDSVEISGVEDRFNASLGTYHDLLKIIKDKDFLDNEENEDILEDIVLTLTLFEDREMIEERLKTYAHLFDDKVMKQLKRRRYTGWGRLSRKLINGIRDKQSGKTILDFLKSDGFANRNFMQLIHDDSLTFKEDIQKAQVSGQGDSLHEHIANLAGSPAIKKGILQTVKVVDELVKVMGRHKPENIVIEMARENQTTQKGQKNSRERMKRIEEGIKELGSQILKEHPVENTQLQNEKLYLYYLQNGRDMYVDQELDINRLSDYDVDHIVPQSFLKDDSIDNKVLTRSDKARGKSDNVPSEEVVKKMKNYWRQLLNAKLITQRKFDNLTKAERGGLSELDKAGFIKRQLVETRQITKHVAQILDSRMNTKYDENDKLIREVKVITLKSKLVSDFRKDFQFYKVREINNYHHAHDAYLNAVVGTALIKKYPKLESEFVYGDYKVYDVRKMIAKSEQEIGKATAKYFFYSNIMNFFKTEITLANGEIRKRPLIETNGETGEIVWDKGRDFATVRKVLSMPQVNIVKKTEVQTGGFSKESILPKRNSDKLIARKKDWDPKKYGGFDSPTVAYSVLVVAKVEKGKSKKLKSVKELLGITIMERSSFEKNPIDFLEAKGYKEVKKDLIIKLPKYSLFELENGRKRMLASAGELQKGNELALPSKYVNFLYLASHYEKLKGSPEDNEQKQLFVEQHKHYLDEIIEQISEFSKRVILADANLDKVLSAYNKHRDKPIREQAENIIHLFTLTNLGAPAAFKYFDTTIDRKRYTSTKEVLDATLIHQSITGLYETRIDLSQLGGDGGGSSGGGGGSGGTVSLQDEHRLFDIPVTTSLPDVWLQDFPQAWAETGGLGRAKCQAPIIIDLKPTAVPVSIKQYPMSLEAHMGIRQHIIKFLELGVLRPCRSPWNTPLLPVKKPGTQDYRPVQDLREINKRTVDIHPTVPNPYNLLSTLKPDYSWYTVLDLKDAFFCLPLAPQSQELFAFEWKDPERGISGQLTWTRLPQGFKNSPTLFNEALHRDLTDFRTQHPEVTLLQYVDDLLLAAPTKKACTQGTRHLLQELGEKGYRASAKKAQICQTKVTYLGYILSEGKRWLTPGRIETVARIPPPRNPREVREFLGTAGFCRLWIPGFAELAAPLYALTKPSTPFTWQTEHQLAFEALKKALLSAPALGLPDTSKPFTLFLDERQGIAKGVLTQKLGPWKRPVAYLSKKLDPVAAGWPPCLRIMAATAMLVKDSAKLTLGQPLTVITPHTLEAIVRQPPDRWITNARLTHYQALLLDTDRVQFGPPVTLNPATLLPVPENQPSPHDCRQVLAETHGTREDLKDQELPDADHTWYTDGSSYLDSGTRRAGAAVVDGHNTIWAQSLPPGTSAQKAELIALTKALELSKGKKANIYTDSRYAFATAHTHGSIYERRGWLTSEGKEIKNKAEIIALLKALFLPQEVAIIHCPGHQKGQDPVAVGNRQADRVARQAAMAEVLTLATEPDNTSHITAGKRTADGSEFEKRTADGSEFESPKKKAKVE

SEQ ID NO: 6873 - protein, 2216 aa, synthetic construct
MPAAKRVKLDGGDKKYSIGLDIGTNSVGWAVITDEYKVPSKKFKVLGNTDRHSIKKNLIGALLFDSGETAEATRLKRTARRRYTRRKNRICYLQEIFSNEMAKVDDSFFHRLEESFLVEEDKKHERHPIFGNIVDEVAYHEKYPTIYHLRKKLVDSTDKADLRLIYLALAHMIKFRGHFLIEGDLNPDNSDVDKLFIQLVQTYNQLFEENPINASGVDAKAILSARLSKSRRLENLIAQLPGEKKNGLFGNLIALSLGLTPNFKSNFDLAEDAKLQLSKDTYDDDLDNLLAQIGDQYADLFLAAKNLSDAILLSDILRVNTEITKAPLSASMIKRYDEHHQDLTLLKALVRQQLPEKYKEIFFDQSKNGYAGYIDGGASQEEFYKFIKPILEKMDGTEELLVKLNREDLLRKQRTFDNGSIPHQIHLGELHAILRRQEDFYPFLKDNREKIEKILTFRIPYYVGPLARGNSRFAWMTRKSEETITPWNFEEVVDKGASAQSFIERMTNFDKNLPNEKVLPKHSLLYEYFTVYNELTKVKYVTEGMRKPAFLSGEQKKAIVDLLFKTNRKVTVKQLKEDYFKKIECFDSVEISGVEDRFNASLGTYHDLLKIIKDKDFLDNEENEDILEDIVLTLTLFEDREMIEERLKTYAHLFDDKVMKQLKRRRYTGWGRLSRKLINGIRDKQSGKTILDFLKSDGFANRNFMQLIHDDSLTFKEDIQKAQVSGQGDSLHEHIANLAGSPAIKKGILQTVKVVDELVKVMGRHKPENIVIEMARENQTTQKGQKNSRERMKRIEEGIKELGSQILKEHPVENTQLQNEKLYLYYLQNGRDMYVDQELDINRLSDYDVDHIVPQSFLKDDSIDNKVLTRSDKARGKSDNVPSEEVVKKMKNYWRQLLNAKLITQRKFDNLTKAERGGLSELDKAGFIKRQLVETRQITKHVAQILDSRMNTKYDENDKLIREVKVITLKSKLVSDFRKDFQFYKVREINNYHHAHDAYLNAVVGTALIKKYPKLESEFVYGDYKVYDVRKMIAKSEQEIGKATAKYFFYSNIMNFFKTEITLANGEIRKRPLIETNGETGEIVWDKGRDFATVRKVLSMPQVNIVKKTEVQTGGFSKESILPKRNSDKLIARKKDWDPKKYGGFDSPTVAYSVLVVAKVEKGKSKKLKSVKELLGITIMERSSFEKNPIDFLEAKGYKEVKKDLIIKLPKYSLFELENGRKRMLASAGELQKGNELALPSKYVNFLYLASHYEKLKGSPEDNEQKQLFVEQHKHYLDEIIEQISEFSKRVILADANLDKVLSAYNKHRDKPIREQAENIIHLFTLTNLGAPAAFKYFDTTIDRKRYTSTKEVLDATLIHQSITGLYETRIDLSQLGGDGGGSSGGGGGSGGTLGDQGSRGSDPLPEPRVTLTVEGIPTEFLVNTGAEHSVLTKPMGKMGSKRTVVAGATGSKVYPWTTKRLLKIGQKQVTHSFLVIPECPAPLLGRDLLTKLKAQIQFSTEGPQVTWEDRPAMCLVLNLEEEYRLHEKPVPPSIDPSWLQLFPMVWAEKAGMGLANQVPPVVVELKSDASPVAVRQYPMSKEAREGIRPHIQRFLDLGILVPCQSPWNTPLLPVKKPGTNDYRPVQDLREVNKRVQDIHPTVPNPYNLLSSLPPSHTWYSVLDLKDAFFCLKLHPNSQPLFAFEWRDPEKGNTGQLTWTRLPQGFKNSPTLFDEALHRDLASFRALNPQVVMLQYVDDLLVAAPTYRDCKEGTRRLLQELSKLGYRVSAKKAQLCREEVTYLGYLLKGGKRWLTPARKATVMKIPTPTTPRQVREFLGTAGFCRLWIPGFASLAAPLYPLTREKVPFTWTEAHQEAFGRIKEALLSAPALALPDLTKPFALYVDEKEGVARGVLTQTLGPWRRPVAYLSKKLDPVASGWPTCLKAIAAVALLLKDADKLTLGQNVLVIAPHNLESIVRQPPDRWMTNARMTHYQSLLLNERVSFAPPAILNPATLLPVESDDTPIHICSEILAEETGTRPDLRDQPLPGVPAWYTDGSSFIMDGRRQAGAAIVDNKRTVWASNLPEGTSAQKAELIALTQALRLAEGKSINIYTDSRYAFATAHVHGAIYKQRGLLTSAGKDIKNKEEILALLEAIHLPKRVAIIHCPGHQRGTDPVATGNRKADEAAKQAAQSTRILTETTKNAGKRTADGSEFEKRTADGSEFESPKKKAKVE

SEQ ID NO: 6874 - protein, 2125 aa, synthetic construct
MPAAKRVKLDGGDKKYSIGLDIGTNSVGWAVITDEYKVPSKKFKVLGNTDRHSIKKNLIGALLFDSGETAEATRLKRTARRRYTRRKNRICYLQEIFSNEMAKVDDSFFHRLEESFLVEEDKKHERHPIFGNIVDEVAYHEKYPTIYHLRKKLVDSTDKADLRLIYLALAHMIKFRGHFLIEGDLNPDNSDVDKLFIQLVQTYNQLFEENPINASGVDAKAILSARLSKSRRLENLIAQLPGEKKNGLFGNLIALSLGLTPNFKSNFDLAEDAKLQLSKDTYDDDLDNLLAQIGDQYADLFLAAKNLSDAILLSDILRVNTEITKAPLSASMIKRYDEHHQDLTLLKALVRQQLPEKYKEIFFDQSKNGYAGYIDGGASQEEFYKFIKPILEKMDGTEELLVKLNREDLLRKQRTFDNGSIPHQIHLGELHAILRRQEDFYPFLKDNREKIEKILTFRIPYYVGPLARGNSRFAWMTRKSEETITPWNFEEVVDKGASAQSFIERMTNFDKNLPNEKVLPKHSLLYEYFTVYNELTKVKYVTEGMRKPAFLSGEQKKAIVDLLFKTNRKVTVKQLKEDYFKKIECFDSVEISGVEDRFNASLGTYHDLLKIIKDKDFLDNEENEDILEDIVLTLTLFEDREMIEERLKTYAHLFDDKVMKQLKRRRYTGWGRLSRKLINGIRDKQSGKTILDFLKSDGFANRNFMQLIHDDSLTFKEDIQKAQVSGQGDSLHEHIANLAGSPAIKKGILQTVKVVDELVKVMGRHKPENIVIEMARENQTTQKGQKNSRERMKRIEEGIKELGSQILKEHPVENTQLQNEKLYLYYLQNGRDMYVDQELDINRLSDYDVDHIVPQSFLKDDSIDNKVLTRSDKARGKSDNVPSEEVVKKMKNYWRQLLNAKLITQRKFDNLTKAERGGLSELDKAGFIKRQLVETRQITKHVAQILDSRMNTKYDENDKLIREVKVITLKSKLVSDFRKDFQFYKVREINNYHHAHDAYLNAVVGTALIKKYPKLESEFVYGDYKVYDVRKMIAKSEQEIGKATAKYFFYSNIMNFFKTEITLANGEIRKRPLIETNGETGEIVWDKGRDFATVRKVLSMPQVNIVKKTEVQTGGFSKESILPKRNSDKLIARKKDWDPKKYGGFDSPTVAYSVLVVAKVEKGKSKKLKSVKELLGITIMERSSFEKNPIDFLEAKGYKEVKKDLIIKLPKYSLFELENGRKRMLASAGELQKGNELALPSKYVNFLYLASHYEKLKGSPEDNEQKQLFVEQHKHYLDEIIEQISEFSKRVILADANLDKVLSAYNKHRDKPIREQAENIIHLFTLTNLGAPAAFKYFDTTIDRKRYTSTKEVLDATLIHQSITGLYETRIDLSQLGGDGGGSSGGGGGSGGLLGRDLLTKLKAQIQFSTEGPQVTWEDRPAMCLVLNLEEEYRLHEKPVPPSIDPSWLQLFPMVWAEKAGMGLANQVPPVVVELKSDASPVAVRQYPMSKEAREGIRPHIQRFLDLGILVPCQSPWNTPLLPVKKPGTNDYRPVQDLREVNKRVQDIHPTVPNPYNLLSSLPPSHTWYSVLDLKDAFFCLKLHPNSQPLFAFEWRDPEKGNTGQLTWTRLPQGFKNSPTLFNEALHRDLASFRALNPQVVMLQYVDDLLVAAPTYRDCKEGTRRLLQELSKLGYRVSAKKAQLCREEVTYLGYLLKGGKRWLTPARKATVMKIPTPTTPRQVREFLGTAGFCRLWIPGFASLAAPLYPLTRPKVPFTWTEAHQEAFGRIKEALLSAPALALPDLTKPFALYVDEKEGVARGVLTQTLGPWRRPVAYLSKKLDPVASGWPTCLKAIAAVALLLKDADKLTLGQNVLVIAPHNLESIVRQPPDRWMTNARMTHYQSLLLNERVSFAPPAILNPATLLPVESDDTPIHICSEILAEETGTRPDLRDQPLPGVPAWYTDGSSFIMDGRRQAGAAIVDNKRTVWASNLPEGTSAQKAELIALTQALRLAEGKSINIYTDSRYAFATAHVHGAIYKQRGWLTSAGKDIKNKEEILALLEAIHLPKRVAIIHCPGHQRGTDPVATGNRKADEAAKQAAQSTRILTETTKNAGKRTADGSEFEKRTADGSEFESPKKKAKVE

SEQ ID NO: 6875 - protein, 2094 aa, synthetic construct; identical to SEQ ID NO: 4517

SEQ ID NO: 6876 - protein, 2094 aa, synthetic construct; identical to SEQ ID NO: 4517

SEQ ID NO: 6877 - protein, 2094 aa, synthetic construct
MPAAKRVKLDGGDKKYSIGLDIGTNSVGWAVITDEYKVPSKKFKVLGNTDRHSIKKNLIGALLFDSGETAEATRLKRTARRRYTRRKNRICYLQEIFSNEMAKVDDSFFHRLEESFLVEEDKKHERHPIFGNIVDEVAYHEKYPTIYHLRKKLVDSTDKADLRLIYLALAHMIKFRGHFLIEGDLNPDNSDVDKLFIQLVQTYNQLFEENPINASGVDAKAILSARLSKSRRLENLIAQLPGEKKNGLFGNLIALSLGLTPNFKSNFDLAEDAKLQLSKDTYDDDLDNLLAQIGDQYADLFLAAKNLSDAILLSDILRVNTEITKAPLSASMIKRYDEHHQDLTLLKALVRQQLPEKYKEIFFDQSKNGYAGYIDGGASQEEFYKFIKPILEKMDGTEELLVKLNREDLLRKQRTFDNGSIPHQIHLGELHAILRRQEDFYPFLKDNREKIEKILTFRIPYYVGPLARGNSRFAWMTRKSEETITPWNFEEVVDKGASAQSFIERMTNFDKNLPNEKVLPKHSLLYEYFTVYNELTKVKYVTEGMRKPAFLSGEQKKAIVDLLFKTNRKVTVKQLKEDYFKKIECFDSVEISGVEDRFNASLGTYHDLLKIIKDKDFLDNEENEDILEDIVLTLTLFEDREMIEERLKTYAHLFDDKVMKQLKRRRYTGWGRLSRKLINGIRDKQSGKTILDFLKSDGFANRNFMQLIHDDSLTFKEDIQKAQVSGQGDSLHEHIANLAGSPAIKKGILQTVKVVDELVKVMGRHKPENIVIEMARENQTTQKGQKNSRERMKRIEEGIKELGSQILKEHPVENTQLQNEKLYLYYLQNGRDMYVDQELDINRLSDYDVDHIVPQSFLKDDSIDNKVLTRSDKARGKSDNVPSEEVVKKMKNYWRQLLNAKLITQRKFDNLTKAERGGLSELDKAGFIKRQLVETRQITKHVAQILDSRMNTKYDENDKLIREVKVITLKSKLVSDFRKDFQFYKVREINNYHHAHDAYLNAVVGTALIKKYPKLESEFVYGDYKVYDVRKMIAKSEQEIGKATAKYFFYSNIMNFFKTEITLANGEIRKRPLIETNGETGEIVWDKGRDFATVRKVLSMPQVNIVKKTEVQTGGFSKESILPKRNSDKLIARKKDWDPKKYGGFDSPTVAYSVLVVAKVEKGKSKKLKSVKELLGITIMERSSFEKNPIDFLEAKGYKEVKKDLIIKLPKYSLFELENGRKRMLASAGELQKGNELALPSKYVNFLYLASHYEKLKGSPEDNEQKQLFVEQHKHYLDEIIEQISEFSKRVILADANLDKVLSAYNKHRDKPIREQAENIIHLFTLTNLGAPAAFKYFDTTIDRKRYTSTKEVLDATLIHQSITGLYETRIDLSQLGGDGGGSSGGGGGSGGTLGIEDEYRLHETSTEPDVSLGSTWLSDFPQAWAETGGMGLAVRQAPLIIPLKATSTPVSIQQYPMSHEARLGIKPHIQRLLDQGILVPCQSPWNTPLLPVKKPGTNDYRPVQDLREVNKRVEDIHPTVPNPYNLLSGLPPSHQWYTVLDLKDAFFCLRLHPTSQPLFAFEWRDPGMGISGQLTWTRLPQGFKNSPTLFNEALHRDLADFRIQHPDLILLQYVDDILLAATSELDCQQGTRALLQTLGDLGYRASAKKAQICQKQVKYLGYLLREGQRWLTEARKETVMGQPVPKTPRQLREFLGTAGFCRLWIPGFAEMAAPLYPLTKPGTLFSWGPDQQKAYQEIKQALLTAPALGLPDLTKPFELFVDEKQGYAKGVLTQKLGPWRRPVAYLSKKLDPVAAGWPPCLRMVAAIAVLTKDAGKLTMGQPLVILAPHAVEALVKQPPDRWLSNARMTHYQAMLLDTDRVQFGPVVALNPATLLPLPEEGAPHDCLEILAETHGTRPDLTDQPIPDADHTWYTDGSSFLQEGQRKAGAAVTTETEVIWAGALPAGTSAQRAELIALTQALKMAEGKRLNVYTDSRYAFATAHIHGEIYRRRGWLTSEGREIKNKSEILALLKALFLPKRLSIIHCLGHQKGDSAEARGNRLADQAAREAAIKTPPDTSTLLAGKRTADGSEFEKRTADGSEFESPKKKAKVE

SEQ ID NO: 6878 - protein, 2094 aa, synthetic construct
MPAAKRVKLDGGDKKYSIGLDIGTNSVGWAVITDEYKVPSKKFKVLGNTDRHSIKKNLIGALLFDSGETAEATRLKRTARRRYTRRKNRICYLQEIFSNEMAKVDDSFFHRLEESFLVEEDKKHERHPIFGNIVDEVAYHEKYPTIYHLRKKLVDSTDKADLRLIYLALAHMIKFRGHFLIEGDLNPDNSDVDKLFIQLVQTYNQLFEENPINASGVDAKAILSARLSKSRRLENLIAQLPGEKKNGLFGNLIALSLGLTPNFKSNFDLAEDAKLQLSKDTYDDDLDNLLAQIGDQYADLFLAAKNLSDAILLSDILRVNTEITKAPLSASMIKRYDEHHQDLTLLKALVRQQLPEKYKEIFFDQSKNGYAGYIDGGASQEEFYKFIKPILEKMDGTEELLVKLNREDLLRKQRTFDNGSIPHQIHLGELHAILRRQEDFYPFLKDNREKIEKILTFRIPYYVGPLARGNSRFAWMTRKSEETITPWNFEEVVDKGASAQSFIERMTNFDKNLPNEKVLPKHSLLYEYFTVYNELTKVKYVTEGMRKPAFLSGEQKKAIVDLLFKTNRKVTVKQLKEDYFKKIECFDSVEISGVEDRFNASLGTYHDLLKIIKDKDFLDNEENEDILEDIVLTLTLFEDREMIEERLKTYAHLFDDKVMKQLKRRRYTGWGRLSRKLINGIRDKQSGKTILDFLKSDGFANRNFMQLIHDDSLTFKEDIQKAQVSGQGDSLHEHIANLAGSPAIKKGILQTVKVVDELVKVMGRHKPENIVIEMARENQTTQKGQKNSRERMKRIEEGIKELGSQILKEHPVENTQLQNEKLYLYYLQNGRDMYVDQELDINRLSDYDVDHIVPQSFLKDDSIDNKVLTRSDKARGKSDNVPSEEVVKKMKNYWRQLLNAKLITQRKFDNLTKAERGGLSELDKAGFIKRQLVETRQITKHVAQILDSRMNTKYDENDKLIREVKVITLKSKLVSDFRKDFQFYKVREINNYHHAHDAYLNAVVGTALIKKYPKLESEFVYGDYKVYDVRKMIAKSEQEIGKATAKYFFYSNIMNFFKTEITLANGEIRKRPLIETNGETGEIVWDKGRDFATVRKVLSMPQVNIVKKTEVQTGGFSKESILPKRNSDKLIARKKDWDPKKYGGFDSPTVAYSVLVVAKVEKGKSKKLKSVKELLGITIMERSSFEKNPIDFLEAKGYKEVKKDLIIKLPKYSLFELENGRKRMLASAGELQKGNELALPSKYVNFLYLASHYEKLKGSPEDNEQKQLFVEQHKHYLDEIIEQISEFSKRVILADANLDKVLSAYNKHRDKPIREQAENIIHLFTLTNLGAPAAFKYFDTTIDRKRYTSTKEVLDATLIHQSITGLYETRIDLSQLGGDGGGSSGGGGGSGGTLNIEDEYRLHETSKEPDVSLGSTWLSDFPQAWAETGGMGLAVRQAPLIIPLKATSTPVSIKQYPMSQEARLGIKPHIQRLLDQGILVPCQSPWNTPLLPVKKPGTNDYRPVQDLREVNKRVEDIHPTVPNPYNLLSGLPPSHQWYTVLDLKDAFFCLRLHPTSQPLFAFEWRDPEMGISGQLTWTRLPQGFKNSPTLFNEALHRDLAGFRIQHPDLILLQYVDDLLLAATSELDCQQGTRALLQTLGDLGYRASAKKAQICQKQVKYLGYLLKEGQRWLTEARKETVMGQPIPKTPRQLREFLGTAGFCRLWIPGFAEMAAPLYPLTKPGTLFNWGPDQQKAFQEIKQALLTAPALGLPDLTKPFELFVDEKQGYAKGVLTQKLGPWRRPVAYLSKKLDPVAAGWPPCLRMVAAIAVLTKDAGKLTMGQPLVILAPHAVEALVKQPPDRWLSNARMTHYQALLLDTDRVQFGPVVALNPATLLPLPEEGLQHDCLDILAEAHGTRSDLMDQPLPDADHTWYTDGSSFLQEGQRKAGAAVTTETEVIWARALPAGTSAQRAELIALTQALKMAEGKKLNVYTDSRYAFATAHIHGEIYRRRGWLTSEGKEIKNKDEILALLKALFLPKRLSIIHCPGHQKGNSAEARGNRMADQAAREVATRETPETSTLLAGKRTADGSEFEKRTADGSEFESPKKKAKVE

SEQ ID NO: 6879 - protein, 2094 aa, synthetic construct
MPAAKRVKLDGGDKKYSIGLDIGTNSVGWAVITDEYKVPSKKFKVLGNTDRHSIKKNLIGALLFDSGETAEATRLKRTARRRYTRRKNRICYLQEIFSNEMAKVDDSFFHRLEESFLVEEDKKHERHPIFGNIVDEVAYHEKYPTIYHLRKKLVDSTDKADLRLIYLALAHMIKFRGHFLIEGDLNPDNSDVDKLFIQLVQTYNQLFEENPINASGVDAKAILSARLSKSRRLENLIAQLPGEKKNGLFGNLIALSLGLTPNFKSNFDLAEDAKLQLSKDTYDDDLDNLLAQIGDQYADLFLAAKNLSDAILLSDILRVNTEITKAPLSASMIKRYDEHHQDLTLLKALVRQQLPEKYKEIFFDQSKNGYAGYIDGGASQEEFYKFIKPILEKMDGTEELLVKLNREDLLRKQRTFDNGSIPHQIHLGELHAILRRQEDFYPFLKDNREKIEKILTFRIPYYVGPLARGNSRFAWMTRKSEETITPWNFEEVVDKGASAQSFIERMTNFDKNLPNEKVLPKHSLLYEYFTVYNELTKVKYVTEGMRKPAFLSGEQKKAIVDLLFKTNRKVTVKQLKEDYFKKIECFDSVEISGVEDRFNASLGTYHDLLKIIKDKDFLDNEENEDILEDIVLTLTLFEDREMIEERLKTYAHLFDDKVMKQLKRRRYTGWGRLSRKLINGIRDKQSGKTILDFLKSDGFANRNFMQLIHDDSLTFKEDIQKAQVSGQGDSLHEHIANLAGSPAIKKGILQTVKVVDELVKVMGRHKPENIVIEMARENQTTQKGQKNSRERMKRIEEGIKELGSQILKEHPVENTQLQNEKLYLYYLQNGRDMYVDQELDINRLSDYDVDHIVPQSFLKDDSIDNKVLTRSDKARGKSDNVPSEEVVKKMKNYWRQLLNAKLITQRKFDNLTKAERGGLSELDKAGFIKRQLVETRQITKHVAQILDSRMNTKYDENDKLIREVKVITLKSKLVSDFRKDFQFYKVREINNYHHAHDAYLNAVVGTALIKKYPKLESEFVYGDYKVYDVRKMIAKSEQEIGKATAKYFFYSNIMNFFKTEITLANGEIRKRPLIETNGETGEIVWDKGRDFATVRKVLSMPQVNIVKKTEVQTGGFSKESILPKRNSDKLIARKKDWDPKKYGGFDSPTVAYSVLVVAKVEKGKSKKLKSVKELLGITIMERSSFEKNPIDFLEAKGYKEVKKDLIIKLPKYSLFELENGRKRMLASAGELQKGNELALPSKYVNFLYLASHYEKLKGSPEDNEQKQLFVEQHKHYLDEIIEQISEFSKRVILADANLDKVLSAYNKHRDKPIREQAENIIHLFTLTNLGAPAAFKYFDTTIDRKRYTSTKEVLDATLIHQSITGLYETRIDLSQLGGDGGGSSGGGGGSGGTLNIEDEYRLHETSKEPDVSLGSTWLSDFPQAWAETGGMGLAVRQAPLIIPLKATSTPVSIKQYPMSQEARLGIKPHIQRLLDQGILVPCQSPWNTPLLPVKKPGTNDYRPVQDLREVNKRVEDIHPTVPNPYNLLSGLPPSHQWYTVLDLKDAFFCLRLHPTSQPLFAFEWRDPEMGISGQLTWTRLPQGFKNSPTLFNEALHRDLAGFRIQHPDLILLQYVDDLLLAATSELDCQQGTRALLQTLGDLGYRASAKKAQICQKQVKYLGYLLKEGQRWLTEARKETVMGQPIPKTPRQLREFLGKAGFCRLFIPGFAEMAAPLYPLTKPGTLFNWGPDQQKAFQEIKQALLTAPALGLPDLTKPFELFVDEKQGYAKGVLTQKLGPWRRPVAYLSKKLDPVAAGWPPCLRMVAAIAVLTKDAGKLTMGQPLVILAPHAVEALVKQPPDRWLSNARMTHYQALLLDTDRVQFGPVVALNPATLLPLPEEGLQHDCLDILAEAHGTRSDLMDQPLPDADHTWYTDGSSFLQEGQRKAGAAVTTETEVIWARALPAGTSAQRAELIALTQALKMAEGKKLNVYTDSRYAFATAHIHGEIYRRRGWLTSEGKEIKNKDEILALLKALFLPKRLSIIHCPGHQKGNSAEARGNRMADQAAREVATRETPETSTLLAGKRTADGSEFEKRTADGSEFESPKKKAKVE

SEQ ID NO: 6880 - protein, 2114 aa, synthetic construct
MPAAKRVKLDGGDKKYSIGLDIGTNSVGWAVITDEYKVPSKKFKVLGNTDRHSIKKNLIGALLFDSGETAEATRLKRTARRRYTRRKNRICYLQEIFSNEMAKVDDSFFHRLEESFLVEEDKKHERHPIFGNIVDEVAYHEKYPTIYHLRKKLVDSTDKADLRLIYLALAHMIKFRGHFLIEGDLNPDNSDVDKLFIQLVQTYNQLFEENPINASGVDAKAILSARLSKSRRLENLIAQLPGEKKNGLFGNLIALSLGLTPNFKSNFDLAEDAKLQLSKDTYDDDLDNLLAQIGDQYADLFLAAKNLSDAILLSDILRVNTEITKAPLSASMIKRYDEHHQDLTLLKALVRQQLPEKYKEIFFDQSKNGYAGYIDGGASQEEFYKFIKPILEKMDGTEELLVKLNREDLLRKQRTFDNGSIPHQIHLGELHAILRRQEDFYPFLKDNREKIEKILTFRIPYYVGPLARGNSRFAWMTRKSEETITPWNFEEVVDKGASAQSFIERMTNFDKNLPNEKVLPKHSLLYEYFTVYNELTKVKYVTEGMRKPAFLSGEQKKAIVDLLFKTNRKVTVKQLKEDYFKKIECFDSVEISGVEDRFNASLGTYHDLLKIIKDKDFLDNEENEDILEDIVLTLTLFEDREMIEERLKTYAHLFDDKVMKQLKRRRYTGWGRLSRKLINGIRDKQSGKTILDFLKSDGFANRNFMQLIHDDSLTFKEDIQKAQVSGQGDSLHEHIANLAGSPAIKKGILQTVKVVDELVKVMGRHKPENIVIEMARENQTTQKGQKNSRERMKRIEEGIKELGSQILKEHPVENTQLQNEKLYLYYLQNGRDMYVDQELDINRLSDYDVDHIVPQSFLKDDSIDNKVLTRSDKARGKSDNVPSEEVVKKMKNYWRQLLNAKLITQRKFDNLTKAERGGLSELDKAGFIKRQLVETRQITKHVAQILDSRMNTKYDENDKLIREVKVITLKSKLVSDFRKDFQFYKVREINNYHHAHDAYLNAVVGTALIKKYPKLESEFVYGDYKVYDVRKMIAKSEQEIGKATAKYFFYSNIMNFFKTEITLANGEIRKRPLIETNGETGEIVWDKGRDFATVRKVLSMPQVNIVKKTEVQTGGFSKESILPKRNSDKLIARKKDWDPKKYGGFDSPTVAYSVLVVAKVEKGKSKKLKSVKELLGITIMERSSFEKNPIDFLEAKGYKEVKKDLIIKLPKYSLFELENGRKRMLASAGELQKGNELALPSKYVNFLYLASHYEKLKGSPEDNEQKQLFVEQHKHYLDEIIEQISEFSKRVILADANLDKVLSAYNKHRDKPIREQAENIIHLFTLTNLGAPAAFKYFDTTIDRKRYTSTKEVLDATLIHQSITGLYETRIDLSQLGGDGGGSSGGGGGSGGVQEISDSRPMLHIYLNGRRFLGLLDTGADKTCIAGRDWPANWPIHQTESSLQGLGMACGVARSSQPLRWQHEDKSGIIHPFVIPTLPFTLWGRDIMKDIKVRLMTDSPDDSQDLMIGAIESNLFADQISWKSDQPVWLNQWPLKQEKLQALQQLVTEQLQLGHLEESNSPWNTPVFVIKKKSGKWRLLQDLRAVNATMHDMGALQPGLPSPVAVPKGWEIIIIDLQDCFFNIKLHPEDCKRFAFSVPSPNFKRPYQRFQWKVLPQGMKNSPTLCQKFVDKAILTVRDKYQDSYIVHYMDDILLAHPSRSIVDEILTSMIQALNKHGLVVSTEKIQKYDNLKYLGTHIQGDSVSYQKLQIRTDKLRTLNDFQKLLGNINWIRPFLKLTTGELKPLFEILNGDSNPISTRKLTPEACKALQLMNERLSTARVKRLDLSQPWSLCILKTEYTPTACLWQDGVVEWIHLPHISPKVITPYDIFCTQLIIKGRHRSKELFSKDPDYIVVPYTKVQFDLLLQEKEDWPISLLGFLGEVHFHLPKDPLLTFTLQTAIIFPHMTSTTPLEKGIVIFTDGSANGRSVTYIQGREPIIKENTQNTAQQAEIVAVITAFEEVSQPFNLYTDSKYVTGLFPEIETATLSPRTKIYTELKHLQRLIHKRQEKFYIGHIRGHTGLPGPLAQGNAYADSLTRILTAAGKRTADGSEFEKRTADGSEFESPKKKAKVE

SEQ ID NO: 6881 - protein, 2086 aa, synthetic construct
MPAAKRVKLDGGDKKYSIGLDIGTNSVGWAVITDEYKVPSKKFKVLGNTDRHSIKKNLIGALLFDSGETAEATRLKRTARRRYTRRKNRICYLQEIFSNEMAKVDDSFFHRLEESFLVEEDKKHERHPIFGNIVDEVAYHEKYPTIYHLRKKLVDSTDKADLRLIYLALAHMIKFRGHFLIEGDLNPDNSDVDKLFIQLVQTYNQLFEENPINASGVDAKAILSARLSKSRRLENLIAQLPGEKKNGLFGNLIALSLGLTPNFKSNFDLAEDAKLQLSKDTYDDDLDNLLAQIGDQYADLFLAAKNLSDAILLSDILRVNTEITKAPLSASMIKRYDEHHQDLTLLKALVRQQLPEKYKEIFFDQSKNGYAGYIDGGASQEEFYKFIKPILEKMDGTEELLVKLNREDLLRKQRTFDNGSIPHQIHLGELHAILRRQEDFYPFLKDNREKIEKILTFRIPYYVGPLARGNSRFAWMTRKSEETITPWNFEEVVDKGASAQSFIERMTNFDKNLPNEKVLPKHSLLYEYFTVYNELTKVKYVTEGMRKPAFLSGEQKKAIVDLLFKTNRKVTVKQLKEDYFKKIECFDSVEISGVEDRFNASLGTYHDLLKIIKDKDFLDNEENEDILEDIVLTLTLFEDREMIEERLKTYAHLFDDKVMKQLKRRRYTGWGRLSRKLINGIRDKQSGKTILDFLKSDGFANRNFMQLIHDDSLTFKEDIQKAQVSGQGDSLHEHIANLAGSPAIKKGILQTVKVVDELVKVMGRHKPENIVIEMARENQTTQKGQKNSRERMKRIEEGIKELGSQILKEHPVENTQLQNEKLYLYYLQNGRDMYVDQELDINRLSDYDVDHIVPQSFLKDDSIDNKVLTRSDKARGKSDNVPSEEVVKKMKNYWRQLLNAKLITQRKFDNLTKAERGGLSELDKAGFIKRQLVETRQITKHVAQILDSRMNTKYDENDKLIREVKVITLKSKLVSDFRKDFQFYKVREINNYHHAHDAYLNAVVGTALIKKYPKLESEFVYGDYKVYDVRKMIAKSEQEIGKATAKYFFYSNIMNFFKTEITLANGEIRKRPLIETNGETGEIVWDKGRDFATVRKVLSMPQVNIVKKTEVQTGGFSKESILPKRNSDKLIARKKDWDPKKYGGFDSPTVAYSVLVVAKVEKGKSKKLKSVKELLGITIMERSSFEKNPIDFLEAKGYKEVKKDLIIKLPKYSLFELENGRKRMLASAGELQKGNELALPSKYVNFLYLASHYEKLKGSPEDNEQKQLFVEQHKHYLDEIIEQISEFSKRVILADANLDKVLSAYNKHRDKPIREQAENIIHLFTLTNLGAPAAFKYFDTTIDRKRYTSTKEVLDATLIHQSITGLYETRIDLSQLGGDGGGSSGGGGGSGGLDDEYRLYSPLVKPDQNIQFWLEQFPQAWAETAGMGLAKQVPPQVIQLKASATPVSVRQYPLSKEAQEGIRPHVQRLIQQGILVPVQSPWNTPLLPVRKPGTNDYRPVQDLREVNKRVQDIHPTVPNPYNLLCALPPQRSWYTVLDLKDAFFCLRLHPTSQPLFAFEWRDPGTGRTGQLTWTRLPQGFKNSPTIFNEALHRDLANFRIQHPQVTLLQYVDDLLLAGATKQDCLEGTKALLLELSDLGYRASAKKAQICRREVTYLGYSLRDGQRWLTEARKKTVVQIPAPTTAKQVREFLGKAGFCRLFIPGFATLAAPLYPLTKPKGEFSWAPEHQKAFDAIKKALLSAPALALPDVTKPFTLYVDERKGVARGVLTQTLGPWRRPVAYLSKKLDPVASGWPVCLKAIAAVAILVKDADKLTLGQNITVIAPHALENIVRQPPDRWMTNARMTHYQSLLLTERVTFAPPAALNPATLLPEETDEPVTHDCHQLLIEETGVRKDLTDIPLTGEVLTWFTDGSSYVVEGKRMAGAAVVDGTRTIWASSLPEGTSAQKAELMALTQALRLAEGKSINIYTDSRYAFATAHVHGAIYKQRGWLTSAGREIKNKEEILSLLEALHLPKRLAIIHCPGHQKAKDPISRGNQMADRVAKQAAQGVNLLPAGKRTADGSEFEKRTADGSEFESPKKKAKVE

SEQ ID NO: 6882 - protein, 2094 aa, synthetic construct
MPAAKRVKLDGGDKKYSIGLDIGTNSVGWAVITDEYKVPSKKFKVLGNTDRHSIKKNLIGALLFDSGETAEATRLKRTARRRYTRRKNRICYLQEIFSNEMAKVDDSFFHRLEESFLVEEDKKHERHPIFGNIVDEVAYHEKYPTIYHLRKKLVDSTDKADLRLIYLALAHMIKFRGHFLIEGDLNPDNSDVDKLFIQLVQTYNQLFEENPINASGVDAKAILSARLSKSRRLENLIAQLPGEKKNGLFGNLIALSLGLTPNFKSNFDLAEDAKLQLSKDTYDDDLDNLLAQIGDQYADLFLAAKNLSDAILLSDILRVNTEITKAPLSASMIKRYDEHHQDLTLLKALVRQQLPEKYKEIFFDQSKNGYAGYIDGGASQEEFYKFIKPILEKMDGTEELLVKLNREDLLRKQRTFDNGSIPHQIHLGELHAILRRQEDFYPFLKDNREKIEKILTFRIPYYVGPLARGNSRFAWMTRKSEETITPWNFEEVVDKGASAQSFIERMTNFDKNLPNEKVLPKHSLLYEYFTVYNELTKVKYVTEGMRKPAFLSGEQKKAIVDLLFKTNRKVTVKQLKEDYFKKIECFDSVEISGVEDRFNASLGTYHDLLKIIKDKDFLDNEENEDILEDIVLTLTLFEDREMIEERLKTYAHLFDDKVMKQLKRRRYTGWGRLSRKLINGIRDKQSGKTILDFLKSDGFANRNFMQLIHDDSLTFKEDIQKAQVSGQGDSLHEHIANLAGSPAIKKGILQTVKVVDELVKVMGRHKPENIVIEMARENQTTQKGQKNSRERMKRIEEGIKELGSQILKEHPVENTQLQNEKLYLYYLQNGRDMYVDQELDINRLSDYDVDHIVPQSFLKDDSIDNKVLTRSDKARGKSDNVPSEEVVKKMKNYWRQLLNAKLITQRKFDNLTKAERGGLSELDKAGFIKRQLVETRQITKHVAQILDSRMNTKYDENDKLIREVKVITLKSKLVSDFRKDFQFYKVREINNYHHAHDAYLNAVVGTALIKKYPKLESEFVYGDYKVYDVRKMIAKSEQEIGKATAKYFFYSNIMNFFKTEITLANGEIRKRPLIETNGETGEIVWDKGRDFATVRKVLSMPQVNIVKKTEVQTGGFSKESILPKRNSDKLIARKKDWDPKKYGGFDSPTVAYSVLVVAKVEKGKSKKLKSVKELLGITIMERSSFEKNPIDFLEAKGYKEVKKDLIIKLPKYSLFELENGRKRMLASAGELQKGNELALPSKYVNFLYLASHYEKLKGSPEDNEQKQLFVEQHKHYLDEIIEQISEFSKRVILADANLDKVLSAYNKHRDKPIREQAENIIHLFTLTNLGAPAAFKYFDTTIDRKRYTSTKEVLDATLIHQSITGLYETRIDLSQLGGDGGGSSGGGGGSGGTLNIEDEYRLHETSKEPDVPLGSTWLSDFPQAWAETGGMGLAVRQAPLIIPLKATSTPVSIKQYPMSQEARLGIKPHIQRLLDQGILVPCQSPWNTPLLPVKKPGTNDYRPVQDLREVNKRVEDIHPTVPNPYNLLSGLPPSHQWYTVLDLKDAFFCLRLHPTSQPLFAFEWRDPEMGISGQLTWTRLPQGFKNSPTLFNEALHRDLADFRIQHPDLILLQYVDDLLLAATSEQDCQRGTRALLQTLGNLGYRASAKKAQICQKQVKYLGYLLKEGQRWLTEARKETVMGQPTPKTPRQLREFLGTAGFCRLWIPGFAEMAAPLYPLTKPGTLFNWGPDQQKAYQEIKQALLTAPALGLPDLTKPFELFVDEKQGYAKGVLTQKLGPWRRPVAYLSKKLDPVAAGWPPCLRMVAAIAVLTKDAGKLTMGQPLVILAPHAVEALVKQPPDRWLSNARMTHYQAMLLDTDRVQFGPVVALNPATLLPLPEKEAPHDCLEILAETHGTRPDLTDQPIPDADYTWYTDGSSFLQEGQRRAGAAVTTETEVIWARALPAGTSAQRAELIALTQALKMAEGKKLNVYTDSRYAFATAHVHGEIYRRRGWLTSEGREIKNKNEILALLKALFLPKRLSIIHCPGHQKGNSAEARGNRMADQAAREAAMKAVLETSTLLAGKRTADGSEFEKRTADGSEFESPKKKAKVE

SEQ ID NO: 6883 - protein, 2094 aa, synthetic construct; identical to SEQ ID NO: 4518

SEQ ID NO: 6884 - protein, 2098 aa, synthetic construct
MPAAKRVKLDGGDKKYSIGLDIGTNSVGWAVITDEYKVPSKKFKVLGNTDRHSIKKNLIGALLFDSGETAEATRLKRTARRRYTRRKNRICYLQEIFSNEMAKVDDSFFHRLEESFLVEEDKKHERHPIFGNIVDEVAYHEKYPTIYHLRKKLVDSTDKADLRLIYLALAHMIKFRGHFLIEGDLNPDNSDVDKLFIQLVQTYNQLFEENPINASGVDAKAILSARLSKSRRLENLIAQLPGEKKNGLFGNLIALSLGLTPNFKSNFDLAEDAKLQLSKDTYDDDLDNLLAQIGDQYADLFLAAKNLSDAILLSDILRVNTEITKAPLSASMIKRYDEHHQDLTLLKALVRQQLPEKYKEIFFDQSKNGYAGYIDGGASQEEFYKFIKPILEKMDGTEELLVKLNREDLLRKQRTFDNGSIPHQIHLGELHAILRRQEDFYPFLKDNREKIEKILTFRIPYYVGPLARGNSRFAWMTRKSEETITPWNFEEVVDKGASAQSFIERMTNFDKNLPNEKVLPKHSLLYEYFTVYNELTKVKYVTEGMRKPAFLSGEQKKAIVDLLFKTNRKVTVKQLKEDYFKKIECFDSVEISGVEDRFNASLGTYHDLLKIIKDKDFLDNEENEDILEDIVLTLTLFEDREMIEERLKTYAHLFDDKVMKQLKRRRYTGWGRLSRKLINGIRDKQSGKTILDFLKSDGFANRNFMQLIHDDSLTFKEDIQKAQVSGQGDSLHEHIANLAGSPAIKKGILQTVKVVDELVKVMGRHKPENIVIEMARENQTTQKGQKNSRERMKRIEEGIKELGSQILKEHPVENTQLQNEKLYLYYLQNGRDMYVDQELDINRLSDYDVDHIVPQSFLKDDSIDNKVLTRSDKARGKSDNVPSEEVVKKMKNYWRQLLNAKLITQRKFDNLTKAERGGLSELDKAGFIKRQLVETRQITKHVAQILDSRMNTKYDENDKLIREVKVITLKSKLVSDFRKDFQFYKVREINNYHHAHDAYLNAVVGTALIKKYPKLESEFVYGDYKVYDVRKMIAKSEQEIGKATAKYFFYSNIMNFFKTEITLANGEIRKRPLIETNGETGEIVWDKGRDFATVRKVLSMPQVNIVKKTEVQTGGFSKESILPKRNSDKLIARKKDWDPKKYGGFDSPTVAYSVLVVAKVEKGKSKKLKSVKELLGITIMERSSFEKNPIDFLEAKGYKEVKKDLIIKLPKYSLFELENGRKRMLASAGELQKGNELALPSKYVNFLYLASHYEKLKGSPEDNEQKQLFVEQHKHYLDEIIEQISEFSKRVILADANLDKVLSAYNKHRDKPIREQAENIIHLFTLTNLGAPAAFKYFDTTIDRKRYTSTKEVLDATLIHQSITGLYETRIDLSQLGGDGGGGSGGGEAAAKGGTAPLEEEYRLFLEAPIQNVTLLEQWKREIPKVWAEINPPGLASTQAPIHVQLLSTALPVRVRQYPITLEAKRSLRETIRKFRAAGILRPVHSPWNTPLLPVRKSGTSEYRMVQDLREVNKRVETIHPTVPNPYTLLSLLPPDRIWYSVLDLKDAFFCIPLAPESQLIFAFEWADAEEGESGQLTWTRLPQGFKNSPTLFDEALNRDLQGFRLDHPSVSLLQYVDDLLIAADTQAACLSATRDLLMTLAELGYRVSGKKAQLCQEEVTYLGFKIHKGSRSLSNSRTQAILQIPVPKTKRQVREFLGTIGYCRLWIPGFAELAQPLYAATRGGNDPLVWGEKEEEAFQSLKLALTQPPALALPSLDKPFQLFVEETSGAAKGVLTQALGPWKRPVAYLSKRLDPVAAGWPRCLRAIAAAALLTREASKLTFGQDIEITSSHNLESLLRSPPDKWLTNARITQYQVLLLDPPRVRFKQTAALNPATLLPETDDTLPIHHCLDTLDSLTSTRPDLTDQPLAQAEATLFTDGSSYIRDGKRYAGAAVVTLDSVIWAEPLPIGTSAQKAELIALTKALEWSKDKSVNIYTDSRYAFATLHVHGMIYRERGLLTAGGKAIKNAPEILALLTAVWLPKRVAVMHCKGHQKDDAPTSTGNRRADEVAREVAIRPLSTQATISAGKRTADGSEFEKRTADGSEFESPKKKAKVE

SEQ ID NO: 6885 - protein, 2098 aa, synthetic construct
MPAAKRVKLDGGDKKYSIGLDIGTNSVGWAVITDEYKVPSKKFKVLGNTDRHSIKKNLIGALLFDSGETAEATRLKRTARRRYTRRKNRICYLQEIFSNEMAKVDDSFFHRLEESFLVEEDKKHERHPIFGNIVDEVAYHEKYPTIYHLRKKLVDSTDKADLRLIYLALAHMIKFRGHFLIEGDLNPDNSDVDKLFIQLVQTYNQLFEENPINASGVDAKAILSARLSKSRRLENLIAQLPGEKKNGLFGNLIALSLGLTPNFKSNFDLAEDAKLQLSKDTYDDDLDNLLAQIGDQYADLFLAAKNLSDAILLSDILRVNTEITKAPLSASMIKRYDEHHQDLTLLKALVRQQLPEKYKEIFFDQSKNGYAGYIDGGASQEEFYKFIKPILEKMDGTEELLVKLNREDLLRKQRTFDNGSIPHQIHLGELHAILRRQEDFYPFLKDNREKIEKILTFRIPYYVGPLARGNSRFAWMTRKSEETITPWNFEEVVDKGASAQSFIERMTNFDKNLPNEKVLPKHSLLYEYFTVYNELTKVKYVTEGMRKPAFLSGEQKKAIVDLLFKTNRKVTVKQLKEDYFKKIECFDSVEISGVEDRFNASLGTYHDLLKIIKDKDFLDNEENEDILEDIVLTLTLFEDREMIEERLKTYAHLFDDKVMKQLKRRRYTGWGRLSRKLINGIRDKQSGKTILDFLKSDGFANRNFMQLIHDDSLTFKEDIQKAQVSGQGDSLHEHIANLAGSPAIKKGILQTVKVVDELVKVMGRHKPENIVIEMARENQTTQKGQKNSRERMKRIEEGIKELGSQILKEHPVENTQLQNEKLYLYYLQNGRDMYVDQELDINRLSDYDVDHIVPQSFLKDDSIDNKVLTRSDKARGKSDNVPSEEVVKKMKNYWRQLLNAKLITQRKFDNLTKAERGGLSELDKAGFIKRQLVETRQITKHVAQILDSRMNTKYDENDKLIREVKVITLKSKLVSDFRKDFQFYKVREINNYHHAHDAYLNAVVGTALIKKYPKLESEFVYGDYKVYDVRKMIAKSEQEIGKATAKYFFYSNIMNFFKTEITLANGEIRKRPLIETNGETGEIVWDKGRDFATVRKVLSMPQVNIVKKTEVQTGGFSKESILPKRNSDKLIARKKDWDPKKYGGFDSPTVAYSVLVVAKVEKGKSKKLKSVKELLGITIMERSSFEKNPIDFLEAKGYKEVKKDLIIKLPKYSLFELENGRKRMLASAGELQKGNELALPSKYVNFLYLASHYEKLKGSPEDNEQKQLFVEQHKHYLDEIIEQISEFSKRVILADANLDKVLSAYNKHRDKPIREQAENIIHLFTLTNLGAPAAFKYFDTTIDRKRYTSTKEVLDATLIHQSITGLYETRIDLSQLGGDGGGGSGGGEAAAKGGTAPLEEEYRLFLEAPIQNVTLLEQWKREIPKVWAEINPPGLASTQAPIHVQLLSTALPVRVRQYPITLEAKRSLRETIRKFRAAGILRPVHSPWNTPLLPVRKSGTSEYRMVQDLREVNKRVETIHPTVPNPYTLLSLLPPDRIWYSVLDLKDAFFCIPLAPESQLIFAFEWADAEEGESGQLTWTRLPQGFKNSPTLFNEALNRDLQGFRLDHPSVSLLQYVDDLLIAADTQAACLSATRDLLMTLAELGYRVSGKKAQLCQEEVTYLGFKIHKGSRSLSNSRTQAILQIPVPKTKRQVREFLGTIGYCRLWIPGFAELAQPLYAATRPGNDPLVWGEKEEEAFQSLKLALTQPPALALPSLDKPFQLFVEETSGAAKGVLTQALGPWKRPVAYLSKRLDPVAAGWPRCLRAIAAAALLTREASKLTFGQDIEITSSHNLESLLRSPPDKWLTNARITQYQVLLLDPPRVRFKQTAALNPATLLPETDDTLPIHHCLDTLDSLTSTRPDLTDQPLAQAEATLFTDGSSYIRDGKRYAGAAVVTLDSVIWAEPLPIGTSAQKAELIALTKALEWSKDKSVNIYTDSRYAFATLHVHGMIYRERGWLTAGGKAIKNAPEILALLTAVWLPKRVAVMHCKGHQKDDAPTSTGNRRADEVAREVAIRPLSTQATISAGKRTADGSEFEKRTADGSEFESPKKKAKVE

SEQ ID NO: 6886 - protein, 2102 aa, synthetic construct
MPAAKRVKLDGGDKKYSIGLDIGTNSVGWAVITDEYKVPSKKFKVLGNTDRHSIKKNLIGALLFDSGETAEATRLKRTARRRYTRRKNRICYLQEIFSNEMAKVDDSFFHRLEESFLVEEDKKHERHPIFGNIVDEVAYHEKYPTIYHLRKKLVDSTDKADLRLIYLALAHMIKFRGHFLIEGDLNPDNSDVDKLFIQLVQTYNQLFEENPINASGVDAKAILSARLSKSRRLENLIAQLPGEKKNGLFGNLIALSLGLTPNFKSNFDLAEDAKLQLSKDTYDDDLDNLLAQIGDQYADLFLAAKNLSDAILLSDILRVNTEITKAPLSASMIKRYDEHHQDLTLLKALVRQQLPEKYKEIFFDQSKNGYAGYIDGGASQEEFYKFIKPILEKMDGTEELLVKLNREDLLRKQRTFDNGSIPHQIHLGELHAILRRQEDFYPFLKDNREKIEKILTFRIPYYVGPLARGNSRFAWMTRKSEETITPWNFEEVVDKGASAQSFIERMTNFDKNLPNEKVLPKHSLLYEYFTVYNELTKVKYVTEGMRKPAFLSGEQKKAIVDLLFKTNRKVTVKQLKEDYFKKIECFDSVEISGVEDRFNASLGTYHDLLKIIKDKDFLDNEENEDILEDIVLTLTLFEDREMIEERLKTYAHLFDDKVMKQLKRRRYTGWGRLSRKLINGIRDKQSGKTILDFLKSDGFANRNFMQLIHDDSLTFKEDIQKAQVSGQGDSLHEHIANLAGSPAIKKGILQTVKVVDELVKVMGRHKPENIVIEMARENQTTQKGQKNSRERMKRIEEGIKELGSQILKEHPVENTQLQNEKLYLYYLQNGRDMYVDQELDINRLSDYDVDHIVPQSFLKDDSIDNKVLTRSDKARGKSDNVPSEEVVKKMKNYWRQLLNAKLITQRKFDNLTKAERGGLSELDKAGFIKRQLVETRQITKHVAQILDSRMNTKYDENDKLIREVKVITLKSKLVSDFRKDFQFYKVREINNYHHAHDAYLNAVVGTALIKKYPKLESEFVYGDYKVYDVRKMIAKSEQEIGKATAKYFFYSNIMNFFKTEITLANGEIRKRPLIETNGETGEIVWDKGRDFATVRKVLSMPQVNIVKKTEVQTGGFSKESILPKRNSDKLIARKKDWDPKKYGGFDSPTVAYSVLVVAKVEKGKSKKLKSVKELLGITIMERSSFEKNPIDFLEAKGYKEVKKDLIIKLPKYSLFELENGRKRMLASAGELQKGNELALPSKYVNFLYLASHYEKLKGSPEDNEQKQLFVEQHKHYLDEIIEQISEFSKRVILADANLDKVLSAYNKHRDKPIREQAENIIHLFTLTNLGAPAAFKYFDTTIDRKRYTSTKEVLDATLIHQSITGLYETRIDLSQLGGDGGGGSGGGEAAAKGGTVSLQDEHRLFDIPVTTSLPDVWLQDFPQAWAETGGLGRAKCQAPIIIDLKPTAVPVSIKQYPMSLEAHMGIRQHIIKFLELGVLRPCRSPWNTPLLPVKKPGTQDYRPVQDLREINKRTVDIHPTVPNPYNLLSTLKPDYSWYTVLDLKDAFFCLPLAPQSQELFAFEWKDPERGISGQLTWTRLPQGFKNSPTLFNEALHRDLTDFRTQHPEVTLLQYVDDLLLAAPTKKACTQGTRHLLQELGEKGYRASAKKAQICQTKVTYLGYILSEGKRWLTPGRIETVARIPPPRNPREVREFLGTAGFCRLWIPGFAELAAPLYALTKPSTPFTWQTEHQLAFEALKKALLSAPALGLPDTSKPFTLFLDERQGIAKGVLTQKLGPWKRPVAYLSKKLDPVAAGWPPCLRIMAATAMLVKDSAKLTLGQPLTVITPHTLEAIVRQPPDRWITNARLTHYQALLLDTDRVQFGPPVTLNPATLLPVPENQPSPHDCRQVLAETHGTREDLKDQELPDADHTWYTDGSSYLDSGTRRAGAAVVDGHNTIWAQSLPPGTSAQKAELIALTKALELSKGKKANIYTDSRYAFATAHTHGSIYERRGWLTSEGKEIKNKAEIIALLKALFLPQEVAIIHCPGHQKGQDPVAVGNRQADRVARQAAMAEVLTLATEPDNTSHITAGKRTADGSEFEKRTADGSEFESPKKKAKVE

SEQ ID NO: 6887 - protein, 2173 aa, synthetic construct
MPAAKRVKLDGGDKKYSIGLDIGTNSVGWAVITDEYKVPSKKFKVLGNTDRHSIKKNLIGALLFDSGETAEATRLKRTARRRYTRRKNRICYLQEIFSNEMAKVDDSFFHRLEESFLVEEDKKHERHPIFGNIVDEVAYHEKYPTIYHLRKKLVDSTDKADLRLIYLALAHMIKFRGHFLIEGDLNPDNSDVDKLFIQLVQTYNQLFEENPINASGVDAKAILSARLSKSRRLENLIAQLPGEKKNGLFGNLIALSLGLTPNFKSNFDLAEDAKLQLSKDTYDDDLDNLLAQIGDQYADLFLAAKNLSDAILLSDILRVNTEITKAPLSASMIKRYDEHHQDLTLLKALVRQQLPEKYKEIFFDQSKNGYAGYIDGGASQEEFYKFIKPILEKMDGTEELLVKLNREDLLRKQRTFDNGSIPHQIHLGELHAILRRQEDFYPFLKDNREKIEKILTFRIPYYVGPLARGNSRFAWMTRKSEETITPWNFEEVVDKGASAQSFIERMTNFDKNLPNEKVLPKHSLLYEYFTVYNELTKVKYVTEGMRKPAFLSGEQKKAIVDLLFKTNRKVTVKQLKEDYFKKIECFDSVEISGVEDRFNASLGTYHDLLKIIKDKDFLDNEENEDILEDIVLTLTLFEDREMIEERLKTYAHLFDDKVMKQLKRRRYTGWGRLSRKLINGIRDKQSGKTILDFLKSDGFANRNFMQLIHDDSLTFKEDIQKAQVSGQGDSLHEHIANLAGSPAIKKGILQTVKVVDELVKVMGRHKPENIVIEMARENQTTQKGQKNSRERMKRIEEGIKELGSQILKEHPVENTQLQNEKLYLYYLQNGRDMYVDQELDINRLSDYDVDHIVPQSFLKDDSIDNKVLTRSDKARGKSDNVPSEEVVKKMKNYWRQLLNAKLITQRKFDNLTKAERGGLSELDKAGFIKRQLVETRQITKHVAQILDSRMNTKYDENDKLIREVKVITLKSKLVSDFRKDFQFYKVREINNYHHAHDAYLNAVVGTALIKKYPKLESEFVYGDYKVYDVRKMIAKSEQEIGKATAKYFFYSNIMNFFKTEITLANGEIRKRPLIETNGETGEIVWDKGRDFATVRKVLSMPQVNIVKKTEVQTGGFSKESILPKRNSDKLIARKKDWDPKKYGGFDSPTVAYSVLVVAKVEKGKSKKLKSVKELLGITIMERSSFEKNPIDFLEAKGYKEVKKDLIIKLPKYSLFELENGRKRMLASAGELQKGNELALPSKYVNFLYLASHYEKLKGSPEDNEQKQLFVEQHKHYLDEIIEQISEFSKRVILADANLDKVLSAYNKHRDKPIREQAENIIHLFTLTNLGAPAAFKYFDTTIDRKRYTSTKEVLDATLIHQSITGLYETRIDLSQLGGDGGGGSGGGEAAAKGGMDLLKPLTVERKGVKIKGYWNSQADITCVPKDLLQGEEPVRQQNVTTIHGTQEGDVYYVNLKIDGRRINTEVIGTTLDYAIITPGDVPWILKKPLELTIKLDLEEQQGTLLNNSILSKKGKEELKQLFEKYSALWQSWENQVGHRRIRPHKIATGTVKPTPQKQYHINPKAKPDIQIVINDLLKQGVLIQKESTMNTPVYPVPKPNGRWRMVLDYRAVNKVTPLIAVQNQHSYGILGSLFKGRYKTTIDLSNGFWAHPIVPEDYWITAFTWQGKQYCWTVLPQGFLNSPGLFTGDVVDLLQGIPNVEVYVDDVYISHDSEKEHLEYLDILFNRLKEAGYIISLKKSNIANSIVDFLGFQITNEGRGLTDTFKEKLENITAPTTLKQLQSILGLLNFARNFIPDFTELIAPLYALIPKSTKNYVPWQIEHSTTLETLITKLNGAEYLQGRKGDKTLIMKVNASYTTGYIRYYNEGEKKPISYVSIVFSKTELKFTELEKLLTTVHKGLLKALDLSMGQNIHVYSPIVSMQNIQKTPQTAKKALASRWLSWLSYLEDPRIRFFYDPQMPALKDLPAVDTGKDNKKHPSNFQHIFYTDGSAITSPTKEGHLNAGMGIVYFINKDGNLQKQQEWSISLGNHTAQFAEIAAFEFALKKCLPLGGNILVVTDSNYVAKAYNEELDVWASNGFVNNRKKPLKHISKWKSVADLKRLRPDVVVTHEPGHQKLDSSPHAYGNNLADQLATQASFKVHAGKRTADGSEFEKRTADGSEFESPKKKAKVE

SEQ ID NO: 6888 - protein, 2173 aa, synthetic construct
MPAAKRVKLDGGDKKYSIGLDIGTNSVGWAVITDEYKVPSKKFKVLGNTDRHSIKKNLIGALLFDSGETAEATRLKRTARRRYTRRKNRICYLQEIFSNEMAKVDDSFFHRLEESFLVEEDKKHERHPIFGNIVDEVAYHEKYPTIYHLRKKLVDSTDKADLRLIYLALAHMIKFRGHFLIEGDLNPDNSDVDKLFIQLVQTYNQLFEENPINASGVDAKAILSARLSKSRRLENLIAQLPGEKKNGLFGNLIALSLGLTPNFKSNFDLAEDAKLQLSKDTYDDDLDNLLAQIGDQYADLFLAAKNLSDAILLSDILRVNTEITKAPLSASMIKRYDEHHQDLTLLKALVRQQLPEKYKEIFFDQSKNGYAGYIDGGASQEEFYKFIKPILEKMDGTEELLVKLNREDLLRKQRTFDNGSIPHQIHLGELHAILRRQEDFYPFLKDNREKIEKILTFRIPYYVGPLARGNSRFAWMTRKSEETITPWNFEEVVDKGASAQSFIERMTNFDKNLPNEKVLPKHSLLYEYFTVYNELTKVKYVTEGMRKPAFLSGEQKKAIVDLLFKTNRKVTVKQLKEDYFKKIECFDSVEISGVEDRFNASLGTYHDLLKIIKDKDFLDNEENEDILEDIVLTLTLFEDREMIEERLKTYAHLFDDKVMKQLKRRRYTGWGRLSRKLINGIRDKQSGKTILDFLKSDGFANRNFMQLIHDDSLTFKEDIQKAQVSGQGDSLHEHIANLAGSPAIKKGILQTVKVVDELVKVMGRHKPENIVIEMARENQTTQKGQKNSRERMKRIEEGIKELGSQILKEHPVENTQLQNEKLYLYYLQNGRDMYVDQELDINRLSDYDVDHIVPQSFLKDDSIDNKVLTRSDKARGKSDNVPSEEVVKKMKNYWRQLLNAKLITQRKFDNLTKAERGGLSELDKAGFIKRQLVETRQITKHVAQILDSRMNTKYDENDKLIREVKVITLKSKLVSDFRKDFQFYKVREINNYHHAHDAYLNAVVGTALIKKYPKLESEFVYGDYKVYDVRKMIAKSEQEIGKATAKYFFYSNIMNFFKTEITLANGEIRKRPLIETNGETGEIVWDKGRDFATVRKVLSMPQVNIVKKTEVQTGGFSKESILPKRNSDKLIARKKDWDPKKYGGFDSPTVAYSVLVVAKVEKGKSKKLKSVKELLGITIMERSSFEKNPIDFLEAKGYKEVKKDLIIKLPKYSLFELENGRKRMLASAGELQKGNELALPSKYVNFLYLASHYEKLKGSPEDNEQKQLFVEQHKHYLDEIIEQISEFSKRVILADANLDKVLSAYNKHRDKPIREQAENIIHLFTLTNLGAPAAFKYFDTTIDRKRYTSTKEVLDATLIHQSITGLYETRIDLSQLGGDGGGGSGGGEAAAKGGMDLLKPLTVERKGVKIKGYWNSQADITCVPKDLLQGEEPVRQQNVTTIHGTQEGDVYYVNLKIDGRRINTEVIGTTLDYAIITPGDVPWILKKPLELTIKLDLEEQQGTLLNNSILSKKGKEELKQLFEKYSALWQSWENQVGHRRIRPHKIATGTVKPTPQKQYHINPKAKPDIQIVINDLLKQGVLIQKESTMNTPVYPVPKPNGRWRMVLDYRAVNKVTPLIAVQNQHSYGILGSLFKGRYKTTIDLSNGFWAHPIVPEDYWITAFTWQGKQYCWTVLPQGFLNSPGLFNGDVVDLLQGIPNVEVYVDDVYISHDSEKEHLEYLDILFNRLKEAGYIISLKKSNIANSIVDFLGFQITNEGRGLTDTFKEKLENITAPTTLKQLQSILGLLNFARNFIPDFTELIAPLYALIPKSPKNYVPWQIEHSTTLETLITKLNGAEYLQGRKGDKTLIMKVNASYTTGYIRYYNEGEKKPISYVSIVFSKTELKFTELEKLLTTVHKGLLKALDLSMGQNIHVYSPIVSMQNIQKTPQTAKKALASRWLSWLSYLEDPRIRFFYDPQMPALKDLPAVDTGKDNKKHPSNFQHIFYTDGSAITSPTKEGHLNAGMGIVYFINKDGNLQKQQEWSISLGNHTAQFAEIAAFEFALKKCLPLGGNILVVTDSNYVAKAYNEELDVWASNGFVNNRKKPLKHISKWKSVADLKRLRPDVVVTHEPGHQKLDSSPHAYGNNLADQLATQASFKVHAGKRTADGSEFEKRTADGSEFESPKKKAKVE

SEQ ID NO: 6889 - protein, 2095 aa, synthetic construct
MPAAKRVKLDGGDKKYSIGLDIGTNSVGWAVITDEYKVPSKKFKVLGNTDRHSIKKNLIGALLFDSGETAEATRLKRTARRRYTRRKNRICYLQEIFSNEMAKVDDSFFHRLEESFLVEEDKKHERHPIFGNIVDEVAYHEKYPTIYHLRKKLVDSTDKADLRLIYLALAHMIKFRGHFLIEGDLNPDNSDVDKLFIQLVQTYNQLFEENPINASGVDAKAILSARLSKSRRLENLIAQLPGEKKNGLFGNLIALSLGLTPNFKSNFDLAEDAKLQLSKDTYDDDLDNLLAQIGDQYADLFLAAKNLSDAILLSDILRVNTEITKAPLSASMIKRYDEHHQDLTLLKALVRQQLPEKYKEIFFDQSKNGYAGYIDGGASQEEFYKFIKPILEKMDGTEELLVKLNREDLLRKQRTFDNGSIPHQIHLGELHAILRRQEDFYPFLKDNREKIEKILTFRIPYYVGPLARGNSRFAWMTRKSEETITPWNFEEVVDKGASAQSFIERMTNFDKNLPNEKVLPKHSLLYEYFTVYNELTKVKYVTEGMRKPAFLSGEQKKAIVDLLFKTNRKVTVKQLKEDYFKKIECFDSVEISGVEDRFNASLGTYHDLLKIIKDKDFLDNEENEDILEDIVLTLTLFEDREMIEERLKTYAHLFDDKVMKQLKRRRYTGWGRLSRKLINGIRDKQSGKTILDFLKSDGFANRNFMQLIHDDSLTFKEDIQKAQVSGQGDSLHEHIANLAGSPAIKKGILQTVKVVDELVKVMGRHKPENIVIEMARENQTTQKGQKNSRERMKRIEEGIKELGSQILKEHPVENTQLQNEKLYLYYLQNGRDMYVDQELDINRLSDYDVDHIVPQSFLKDDSIDNKVLTRSDKARGKSDNVPSEEVVKKMKNYWRQLLNAKLITQRKFDNLTKAERGGLSELDKAGFIKRQLVETRQITKHVAQILDSRMNTKYDENDKLIREVKVITLKSKLVSDFRKDFQFYKVREINNYHHAHDAYLNAVVGTALIKKYPKLESEFVYGDYKVYDVRKMIAKSEQEIGKATAKYFFYSNIMNFFKTEITLANGEIRKRPLIETNGETGEIVWDKGRDFATVRKVLSMPQVNIVKKTEVQTGGFSKESILPKRNSDKLIARKKDWDPKKYGGFDSPTVAYSVLVVAKVEKGKSKKLKSVKELLGITIMERSSFEKNPIDFLEAKGYKEVKKDLIIKLPKYSLFELENGRKRMLASAGELQKGNELALPSKYVNFLYLASHYEKLKGSPEDNEQKQLFVEQHKHYLDEIIEQISEFSKRVILADANLDKVLSAYNKHRDKPIREQAENIIHLFTLTNLGAPAAFKYFDTTIDRKRYTSTKEVLDATLIHQSITGLYETRIDLSQLGGDGGGGSGGGEAAAKGGTLQLEEEYRLFEPESTQKQEMDIWLKNFPQAWAETGGMGTAHCQAPVLIQLKATATPISIRQYPMPHEAYQGIKPHIRRMLDQGILKPCQSPWNTPLLPVKKPGTEDYRPVQDLREVNKRVEDIHPTVPNPYNLLSTLPPSHPWYTVLDLKDAFFCLRLHSESQLLFAFEWRDPEIGLSGQLTWTRLPQGFKNSPTLFNEALHSDLADFRVRYPALVLLQYVDDLLLAAATRTECLEGTKALLETLGNKGYRASAKKAQICLQEVTYLGYSLKDGQRWLTKARKEAILSIPVPKNSRQVREFLGTAGYCRLWIPGFAELAAPLYPLTRPGTLFQWGTEQQLAFEDIKKALLSSPALGLPDITKPFELFIDENSGFAKGVLVQKLGPWKRPVAYLSKKLDTVASGWPPCLRMVAAIAILVKDAGKLTLGQPLTILTSHPVEALVRQPPNKWLSNARMTHYQAMLLDAERVHFGPTVSLNPATLLPLPSGGNHHDCLQILAETHGTRPDLTDQPLPDADLTWYTDGSSFIRNGEREAGAAVTTESEVIWAAPLPPGTSAQRAELIALTQALKMAEGKKLTVYTDSRYAFATTHVHGEIYRRRGWLTSEGKEIKNKNEILALLEALFLPKRLSIIHCPGHQKGDSPQAKGNRLADDTAKKAATETHSSLTVLPAGKRTADGSEFEKRTADGSEFESPKKKAKVE

SEQ ID NO: 6890 - protein, 2127 aa, synthetic construct
MPAAKRVKLDGGDKKYSIGLDIGTNSVGWAVITDEYKVPSKKFKVLGNTDRHSIKKNLIGALLFDSGETAEATRLKRTARRRYTRRKNRICYLQEIFSNEMAKVDDSFFHRLEESFLVEEDKKHERHPIFGNIVDEVAYHEKYPTIYHLRKKLVDSTDKADLRLIYLALAHMIKFRGHFLIEGDLNPDNSDVDKLFIQLVQTYNQLFEENPINASGVDAKAILSARLSKSRRLENLIAQLPGEKKNGLFGNLIALSLGLTPNFKSNFDLAEDAKLQLSKDTYDDDLDNLLAQIGDQYADLFLAAKNLSDAILLSDILRVNTEITKAPLSASMIKRYDEHHQDLTLLKALVRQQLPEKYKEIFFDQSKNGYAGYIDGGASQEEFYKFIKPILEKMDGTEELLVKLNREDLLRKQRTFDNGSIPHQIHLGELHAILRRQEDFYPFLKDNREKIEKILTFRIPYYVGPLARGNSRFAWMTRKSEETITPWNFEEVVDKGASAQSFIERMTNFDKNLPNEKVLPKHSLLYEYFTVYNELTKVKYVTEGMRKPAFLSGEQKKAIVDLLFKTNRKVTVKQLKEDYFKKIECFDSVEISGVEDRFNASLGTYHDLLKIIKDKDFLDNEENEDILEDIVLTLTLFEDREMIEERLKTYAHLFDDKVMKQLKRRRYTGWGRLSRKLINGIRDKQSGKTILDFLKSDGFANRNFMQLIHDDSLTFKEDIQKAQVSGQGDSLHEHIANLAGSPAIKKGILQTVKVVDELVKVMGRHKPENIVIEMARENQTTQKGQKNSRERMKRIEEGIKELGSQILKEHPVENTQLQNEKLYLYYLQNGRDMYVDQELDINRLSDYDVDHIVPQSFLKDDSIDNKVLTRSDKARGKSDNVPSEEVVKKMKNYWRQLLNAKLITQRKFDNLTKAERGGLSELDKAGFIKRQLVETRQITKHVAQILDSRMNTKYDENDKLIREVKVITLKSKLVSDFRKDFQFYKVREINNYHHAHDAYLNAVVGTALIKKYPKLESEFVYGDYKVYDVRKMIAKSEQEIGKATAKYFFYSNIMNFFKTEITLANGEIRKRPLIETNGETGEIVWDKGRDFATVRKVLSMPQVNIVKKTEVQTGGFSKESILPKRNSDKLIARKKDWDPKKYGGFDSPTVAYSVLVVAKVEKGKSKKLKSVKELLGITIMERSSFEKNPIDFLEAKGYKEVKKDLIIKLPKYSLFELENGRKRMLASAGELQKGNELALPSKYVNFLYLASHYEKLKGSPEDNEQKQLFVEQHKHYLDEIIEQISEFSKRVILADANLDKVLSAYNKHRDKPIREQAENIIHLFTLTNLGAPAAFKYFDTTIDRKRYTSTKEVLDATLIHQSITGLYETRIDLSQLGGDGGGGSGGGEAAAKGGLLGRDLLTKLKAQIQFSTEGPQVTWEDRPAMCLVLNLEEEYRLHEKPVPPSIDPSWLQLFPMVWAEKAGMGLANQVPPVVVELKSDASPVAVRQYPMSKEAREGIRPHIQRFLDLGILVPCQSPWNTPLLPVKKPGTNDYRPVQDLREVNKRVQDIHPTVPNPYNLLSSLPPSHTWYSVLDLKDAFFCLKLHPNSQPLFAFEWRDPEKGNTGQLTWTRLPQGFKNSPTLFDEALHRDLASFRALNPQVVMLQYVDDLLVAAPTYRDCKEGTRRLLQELSKLGYRVSAKKAQLCREEVTYLGYLLKGGKRWLTPARKATVMKIPTPTTPRQVREFLGTAGFCRLWIPGFASLAAPLYPLTREKVPFTWTEAHQEAFGRIKEALLSAPALALPDLTKPFALYVDEKEGVARGVLTQTLGPWRRPVAYLSKKLDPVASGWPTCLKAIAAVALLLKDADKLTLGQNVLVIAPHNLESIVRQPPDRWMTNARMTHYQSLLLNERVSFAPPAILNPATLLPVESDDTPIHICSEILAEETGTRPDLRDQPLPGVPAWYTDGSSFIMDGRRQAGAAIVDNKRTVWASNLPEGTSAQKAELIALTQALRLAEGKSINIYTDSRYAFATAHVHGAIYKQRGLLTSAGKDIKNKEEILALLEAIHLPKRVAIIHCPGHQRGTDPVATGNRKADEAAKQAAQSTRILTETTKNAGKRTADGSEFEKRTADGSEFESPKKKAKVE

SEQ ID NO: 6891 - protein, 2218 aa, synthetic construct
MPAAKRVKLDGGDKKYSIGLDIGTNSVGWAVITDEYKVPSKKFKVLGNTDRHSIKKNLIGALLFDSGETAEATRLKRTARRRYTRRKNRICYLQEIFSNEMAKVDDSFFHRLEESFLVEEDKKHERHPIFGNIVDEVAYHEKYPTIYHLRKKLVDSTDKADLRLIYLALAHMIKFRGHFLIEGDLNPDNSDVDKLFIQLVQTYNQLFEENPINASGVDAKAILSARLSKSRRLENLIAQLPGEKKNGLFGNLIALSLGLTPNFKSNFDLAEDAKLQLSKDTYDDDLDNLLAQIGDQYADLFLAAKNLSDAILLSDILRVNTEITKAPLSASMIKRYDEHHQDLTLLKALVRQQLPEKYKEIFFDQSKNGYAGYIDGGASQEEFYKFIKPILEKMDGTEELLVKLNREDLLRKQRTFDNGSIPHQIHLGELHAILRRQEDFYPFLKDNREKIEKILTFRIPYYVGPLARGNSRFAWMTRKSEETITPWNFEEVVDKGASAQSFIERMTNFDKNLPNEKVLPKHSLLYEYFTVYNELTKVKYVTEGMRKPAFLSGEQKKAIVDLLFKTNRKVTVKQLKEDYFKKIECFDSVEISGVEDRFNASLGTYHDLLKIIKDKDFLDNEENEDILEDIVLTLTLFEDREMIEERLKTYAHLFDDKVMKQLKRRRYTGWGRLSRKLINGIRDKQSGKTILDFLKSDGFANRNFMQLIHDDSLTFKEDIQKAQVSGQGDSLHEHIANLAGSPAIKKGILQTVKVVDELVKVMGRHKPENIVIEMARENQTTQKGQKNSRERMKRIEEGIKELGSQILKEHPVENTQLQNEKLYLYYLQNGRDMYVDQELDINRLSDYDVDHIVPQSFLKDDSIDNKVLTRSDKARGKSDNVPSEEVVKKMKNYWRQLLNAKLITQRKFDNLTKAERGGLSELDKAGFIKRQLVETRQITKHVAQILDSRMNTKYDENDKLIREVKVITLKSKLVSDFRKDFQFYKVREINNYHHAHDAYLNAVVGTALIKKYPKLESEFVYGDYKVYDVRKMIAKSEQEIGKATAKYFFYSNIMNFFKTEITLANGEIRKRPLIETNGETGEIVWDKGRDFATVRKVLSMPQVNIVKKTEVQTGGFSKESILPKRNSDKLIARKKDWDPKKYGGFDSPTVAYSVLVVAKVEKGKSKKLKSVKELLGITIMERSSFEKNPIDFLEAKGYKEVKKDLIIKLPKYSLFELENGRKRMLASAGELQKGNELALPSKYVNFLYLASHYEKLKGSPEDNEQKQLFVEQHKHYLDEIIEQISEFSKRVILADANLDKVLSAYNKHRDKPIREQAENIIHLFTLTNLGAPAAFKYFDTTIDRKRYTSTKEVLDATLIHQSITGLYETRIDLSQLGGDGGGGSGGGEAAAKGGTLGDQGSRGSDPLPEPRVTLTVEGIPTEFLVNTGAEHSVLTKPMGKMGSKRTVVAGATGSKVYPWTTKRLLKIGQKQVTHSFLVIPECPAPLLGRDLLTKLKAQIQFSTEGPQVTWEDRPAMCLVLNLEEEYRLHEKPVPPSIDPSWLQLFPMVWAEKAGMGLANQVPPVVVELKSDASPVAVRQYPMSKEAREGIRPHIQRFLDLGILVPCQSPWNTPLLPVKKPGTNDYRPVQDLREVNKRVQDIHPTVPNPYNLLSSLPPSHTWYSVLDLKDAFFCLKLHPNSQPLFAFEWRDPEKGNTGQLTWTRLPQGFKNSPTLFNEALHRDLASFRALNPQVVMLQYVDDLLVAAPTYRDCKEGTRRLLQELSKLGYRVSAKKAQLCREEVTYLGYLLKGGKRWLTPARKATVMKIPTPTTPRQVREFLGKAGFCRLFIPGFASLAAPLYPLTRPKVPFTWTEAHQEAFGRIKEALLSAPALALPDLTKPFALYVDEKEGVARGVLTQTLGPWRRPVAYLSKKLDPVASGWPTCLKAIAAVALLLKDADKLTLGQNVLVIAPHNLESIVRQPPDRWMTNARMTHYQSLLLNERVSFAPPAILNPATLLPVESDDTPIHICSEILAEETGTRPDLRDQPLPGVPAWYTDGSSFIMDGRRQAGAAIVDNKRTVWASNLPEGTSAQKAELIALTQALRLAEGKSINIYTDSRYAFATAHVHGAIYKQRGWLTSAGKDIKNKEEILALLEAIHLPKRVAIIHCPGHQRGTDPVATGNRKADEAAKQAAQSTRILTETTKNAGKRTADGSEFEKRTADGSEFESPKKKAKVE

SEQ ID NO: 6892 - protein, 2096 aa, synthetic construct
MPAAKRVKLDGGDKKYSIGLDIGTNSVGWAVITDEYKVPSKKFKVLGNTDRHSIKKNLIGALLFDSGETAEATRLKRTARRRYTRRKNRICYLQEIFSNEMAKVDDSFFHRLEESFLVEEDKKHERHPIFGNIVDEVAYHEKYPTIYHLRKKLVDSTDKADLRLIYLALAHMIKFRGHFLIEGDLNPDNSDVDKLFIQLVQTYNQLFEENPINASGVDAKAILSARLSKSRRLENLIAQLPGEKKNGLFGNLIALSLGLTPNFKSNFDLAEDAKLQLSKDTYDDDLDNLLAQIGDQYADLFLAAKNLSDAILLSDILRVNTEITKAPLSASMIKRYDEHHQDLTLLKALVRQQLPEKYKEIFFDQSKNGYAGYIDGGASQEEFYKFIKPILEKMDGTEELLVKLNREDLLRKQRTFDNGSIPHQIHLGELHAILRRQEDFYPFLKDNREKIEKILTFRIPYYVGPLARGNSRFAWMTRKSEETITPWNFEEVVDKGASAQSFIERMTNFDKNLPNEKVLPKHSLLYEYFTVYNELTKVKYVTEGMRKPAFLSGEQKKAIVDLLFKTNRKVTVKQLKEDYFKKIECFDSVEISGVEDRFNASLGTYHDLLKIIKDKDFLDNEENEDILEDIVLTLTLFEDREMIEERLKTYAHLFDDKVMKQLKRRRYTGWGRLSRKLINGIRDKQSGKTILDFLKSDGFANRNFMQLIHDDSLTFKEDIQKAQVSGQGDSLHEHIANLAGSPAIKKGILQTVKVVDELVKVMGRHKPENIVIEMARENQTTQKGQKNSRERMKRIEEGIKELGSQILKEHPVENTQLQNEKLYLYYLQNGRDMYVDQELDINRLSDYDVDHIVPQSFLKDDSIDNKVLTRSDKARGKSDNVPSEEVVKKMKNYWRQLLNAKLITQRKFDNLTKAERGGLSELDKAGFIKRQLVETRQITKHVAQILDSRMNTKYDENDKLIREVKVITLKSKLVSDFRKDFQFYKVREINNYHHAHDAYLNAVVGTALIKKYPKLESEFVYGDYKVYDVRKMIAKSEQEIGKATAKYFFYSNIMNFFKTEITLANGEIRKRPLIETNGETGEIVWDKGRDFATVRKVLSMPQVNIVKKTEVQTGGFSKESILPKRNSDKLIARKKDWDPKKYGGFDSPTVAYSVLVVAKVEKGKSKKLKSVKELLGITIMERSSFEKNPIDFLEAKGYKEVKKDLIIKLPKYSLFELENGRKRMLASAGELQKGNELALPSKYVNFLYLASHYEKLKGSPEDNEQKQLFVEQHKHYLDEIIEQISEFSKRVILADANLDKVLSAYNKHRDKPIREQAENIIHLFTLTNLGAPAAFKYFDTTIDRKRYTSTKEVLDATLIHQSITGLYETRIDLSQLGGDGGGGSGGGEAAAKGGTLNLEDEYRLYETSAEPEVSPGSTWLSDFPQAWAETGGMGLAVRQAPLIIPLKATSTPVSIKQYPMSQEAKLGIKPHIQRLLDQGILVPCQSPWNTPLLPVKKPGTNDYRPVQDLREVNKRVEDIHPTVPNPYNLLSGLPPSHRWYTVLDLKDAFFCLRLHPTSQPLFAFEWRDPGMGISGQLTWTRLPQGFKNSPTLFNEALHRDLADFRIQHPDLILLQYVDDILLAATSELDCQQGTRALLLTLGNLGYRASAKKAQLCQKQVKYLGYLLKEGQRWLTEARKETVMGQPTPKTPRQLREFLGKAGFCRLFIPGFAEMAAPLYPLTKPGTLFNWGPDQQKAYQEIKQALLTAPALGLPDLTKPFELFVDEKQGYAKGVLTQKLGPWRRPVAYLSKKLDPVAAGWPPCLRMVAAIAVLRKDAGKLTMGQPLVILAPHAVEALVKQPPDRWLSNARMTHYQAMLLDTDRVQFGPVVALNPATLLPLPEEGAPHDCLEILAETHGTRPDLTDQPIPDADHTWYTDGSSFLQEGQRKAGAAVTTETEVIWARALPAGTSAQRAELIALTQALKMAEGKRLNVYTDSRYAFATAHIHGEIYRRRGWLTSEGREIKNKSEILALLKALFLPKRLSIIHCLGHQKGDSAEARGNRLADQAAREAAIKTPPDTSTLLAGKRTADGSEFEKRTADGSEFESPKKKAKVE

SEQ ID NO: 6893 - protein, 2096 aa, synthetic construct
MPAAKRVKLDGGDKKYSIGLDIGTNSVGWAVITDEYKVPSKKFKVLGNTDRHSIKKNLIGALLFDSGETAEATRLKRTARRRYTRRKNRICYLQEIFSNEMAKVDDSFFHRLEESFLVEEDKKHERHPIFGNIVDEVAYHEKYPTIYHLRKKLVDSTDKADLRLIYLALAHMIKFRGHFLIEGDLNPDNSDVDKLFIQLVQTYNQLFEENPINASGVDAKAILSARLSKSRRLENLIAQLPGEKKNGLFGNLIALSLGLTPNFKSNFDLAEDAKLQLSKDTYDDDLDNLLAQIGDQYADLFLAAKNLSDAILLSDILRVNTEITKAPLSASMIKRYDEHHQDLTLLKALVRQQLPEKYKEIFFDQSKNGYAGYIDGGASQEEFYKFIKPILEKMDGTEELLVKLNREDLLRKQRTFDNGSIPHQIHLGELHAILRRQEDFYPFLKDNREKIEKILTFRIPYYVGPLARGNSRFAWMTRKSEETITPWNFEEVVDKGASAQSFIERMTNFDKNLPNEKVLPKHSLLYEYFTVYNELTKVKYVTEGMRKPAFLSGEQKKAIVDLLFKTNRKVTVKQLKEDYFKKIECFDSVEISGVEDRFNASLGTYHDLLKIIKDKDFLDNEENEDILEDIVLTLTLFEDREMIEERLKTYAHLFDDKVMKQLKRRRYTGWGRLSRKLINGIRDKQSGKTILDFLKSDGFANRNFMQLIHDDSLTFKEDIQKAQVSGQGDSLHEHIANLAGSPAIKKGILQTVKVVDELVKVMGRHKPENIVIEMARENQTTQKGQKNSRERMKRIEEGIKELGSQILKEHPVENTQLQNEKLYLYYLQNGRDMYVDQELDINRLSDYDVDHIVPQSFLKDDSIDNKVLTRSDKARGKSDNVPSEEVVKKMKNYWRQLLNAKLITQRKFDNLTKAERGGLSELDKAGFIKRQLVETRQITKHVAQILDSRMNTKYDENDKLIREVKVITLKSKLVSDFRKDFQFYKVREINNYHHAHDAYLNAVVGTALIKKYPKLESEFVYGDYKVYDVRKMIAKSEQEIGKATAKYFFYSNIMNFFKTEITLANGEIRKRPLIETNGETGEIVWDKGRDFATVRKVLSMPQVNIVKKTEVQTGGFSKESILPKRNSDKLIARKKDWDPKKYGGFDSPTVAYSVLVVAKVEKGKSKKLKSVKELLGITIMERSSFEKNPIDFLEAKGYKEVKKDLIIKLPKYSLFELENGRKRMLASAGELQKGNELALPSKYVNFLYLASHYEKLKGSPEDNEQKQLFVEQHKHYLDEIIEQISEFSKRVILADANLDKVLSAYNKHRDKPIREQAENIIHLFTLTNLGAPAAFKYFDTTIDRKRYTSTKEVLDATLIHQSITGLYETRIDLSQLGGDGGGGSGGGEAAAKGGTLNIEDEYRLHEISTEPDVSPGSTWLSDFPQAWAETGGMGLAVRQAPLIIPLKATSTPVSIKQYPMSQEAKLGIKPHIQRLLDQGILVPCQSPWNTPLLPVKKPGTNDYRPVQGLREVNKRVEDIHPTVPNPYNLLSGLPTSHRWYTVLDLKDAFFCLRLHPTSQPLFASEWRDPGMGISGQLTWTRLPQGFKNSPTLFNEALHRGLADFRIQHPDLILLQYVDDLLLAATSELDCQQGTRALLKTLGNLGYRASAKKAQICQKQVKYLGYLLREGQRWLTEARKETVMGQPTPKTPRQLREFLGTAGFCRLWIPRFAEMAAPLYPLTKPGTLFNWGPDQQKAYHEIKQALLTAPALGLPDLTKPFELFVDEKQGYAKGVLTQKLGPWRRPVAYLSKKLDPVAAGWPPCLRMVAAIAVLTKDAGKLTMGQPLVILAPHAVEALVKQPPDRWLSNARMTHYQAMLLDTDRVQFGPVVALNPATLLPLPEEGAPHDCLEILAETHGTEPDLTDQPIPDADHTWYTDGSSFLQEGQRKAGAAVTTETEVIWARALPAGTSAQRAELIALTQALKMAEGKRLNVYTDSRYAFATAHIHGEIYKRRGWLTSEGREIKNKSEILALLKALFLPKRLSIIHCLGHQKGDSAEARGNRLADQAAREAAIKTPPDTSTLLAGKRTADGSEFEKRTADGSEFESPKKKAKVE
